United States Patent Application Publication US 2006/0134663 A1 - sequence listing, part 80

SEQ ID NO: 218143 - DNA, 712 bp, Homo Sapiens
cgacacaagctgtcgcactcggacgagaagccctaccagtgcccggtgtgccagcagcgcttcaagcgcaaggaccgcatgagctaccacgtgcgctcacatgacggcgctgtgcacaagccctacaactgctcccactgtggcaagagcttctcccggccggatcacctcaacagtcacgtcagacaagtgcactcaacagaacggcccttcaaatgtgagaaatgtgaggcagctttcgccacgaaggatcggctgcgggcgcacacagtacgacacgaggagaaagtgccatgtcacgtgtgtggcaagatgctgagctcggcttatatttcggaccacatgaaggtgcacagccagggtcctcaccatgtctgtgagctctgcaacaaaggtactggtgaggtttgtccaatggcggcggcagcggcagcggcggcagcggcagcagcggcagcagtagcagcccctcccacagctgtgggctccctctcgggggcggagggggtgcctgtgatctctcagccccttccctcccaaccttggtgtgcaccaagttggctgcggaggaaattgattaaaatatattgatttacttttgtaaaactatctacttcttatttcttgtatcttctcctattcattctaccattaatgagtgctttcaatccccctcggcatctaatgtaatacctcaatcatgtatttagat

SEQ ID NO: 218144 - DNA, 829 bp, Homo Sapiens; identical to SEQ ID NO: 40797
  misc_feature (644)..(644): n is a, c, g, or t
  misc_feature (690)..(690): n is a, c, g, or t

SEQ ID NO: 218145 - DNA, 777 bp, Homo Sapiens
  misc_feature (677)..(677): n is a, c, g, or t
ttttttttccttaaggagaacatgaatttccttggaggtgaggctccaggtagggacagggcctggtctgctgaaggccacaggaagcaaatggcccccagtccacctttctgtccctgccatgaagggccattacactggggtggggaggtcctcaggagggtgtcacacatagccttaggcaatagcaagtctttcctattcagctctgtccagcctccaattgaggagggataatgggggtgagacagggttgggggtgaagtggccaccaaacccggcaaaagtgagcagctccatcttgtctgaagttaacatcatcccctcaggtataaagcctcctcctcacatcgactttggtaaaccagtcagtgacaggccttggccaagctgagacttgggcaaaaacctgaacgagtgccaccggaaagccatcatcctagctctgtccttccaatgctgagagtcacatgttcccccatgggcatccctctcctgagtcggctatgtgtgtgaagccaggccaggccgtgtgcctcagtttcctcatcttccaagtcgggataccagccacagagccatctcacagggcttcaggagaaacttcccagtactcaggacaggagctggcagtgagcatgtgttggctctcattaggaccccacctgtcagcgtcntacaacatgatgttcagtggacccaaactttttctcttcccagaagtggcggctgacagagccagaccctgatccccagtccttggtgtctcttgtctgc

SEQ ID NO: 218146 - DNA, 757 bp, Homo Sapiens; identical to SEQ ID NO: 50715
  misc_feature (672)..(672): n is a, c, g, or t

SEQ ID NO: 218147 - DNA, 724 bp, Homo Sapiens
aaatggtgtgttgcaatgccctgaaggtacggccgctctgctgctacagggttcggcatcgtctggtgatgggtctggcctcgcagaagaggccctcgggcctggagatgtgaacacaggcagcgaccctgttccagagggcttctgcgagtcctcgtgaggccagtgcttgtcgtggtgtggggttcagcacggacggaatgtgtgtgcagctcagccttcagagcgtgcattccccagccaggaggcgaccactcagaggaactctgggaaacccacttttgtgcaaatgctgtttttaacacaaacacaaaggctagtgaaccgttcagtcatctgctttctgtttctggatgtgccttttcatacatgtgtcctcttgtccctggcttcttacacttggcgttgtttttaaggtttatccatgcagttcccctccaatgtataaaacaaaggaggtgaaaacctgtccatgcggaagcttgtgcacccatgttcacagcagcattggagaaggataccgaacatcttctcgtgggcttactggccatttgtgtatctcctttggagaggagtctattcaaacctcttgcctatttttaattgaatgatttatcttgagttgtaacagttgttttttttttgtttttccttttagagatgggcttttgctcttacccaggctgaatgcagtggcagaatcatagctcagtgcagcctcaca

SEQ ID NO: 218148 - DNA, 845 bp, Homo Sapiens
tttttttttttcacataaaaacatcatttattgttagaaatcatgacatgatacaaagtcaaaatccacttgtgtcttgctaaagactacagaaagccatgctcagcagcttcttctccaatgctggccagcagcgtacctttccaagtcacaaagcagttcatcccgccctcaaggagccgacagggcagcccagagcctcccactgacaagtgtggtcacccactcaagatactgggaaagatccctgttctagcatcacattttaatcagatttgtcaaaatcaggttgcttggggcaaaggctctttcaccgaggatgctagtcctggaagacttctccttcggcgagccgccagctcaatcttctgaaccaggctcacatcccagggatgggtcacaaaactgatgacggtgcctggcacctcgctccccacacggcccactctccctgctctgtggatgtaatcttgcagcgttggggggaaatcataattgacaaccagctccacaccagtgctgtccaggccccgagaggctatgtctgtgcagagaagtatgtctcgggagctcttctggaaggactggaagattcctaccctcatcaaggctggcatttgcccctgcaccttaggtgttggattttgtggtctccagaatatatccagccagtcacagtgctgagctatacagacaccagaacagtctgaggacagtcttctgctcgccgatgctgagagtgacagtcgcactatcgctctatccaaagtcgtcatgagagacatgactgactggagtggaacttgctgcatatccatgcactcgatggcacgcacactgatagc

SEQ ID NO: 218149 - DNA, 749 bp, Homo Sapiens
gctagctccgcctgcggtacgtgctcccgcctccgactcaaaatgcctgtctggggaggtggaaacaagtgtggggcctgtgggaggaccgtgtaccacgcagaagaggtgcagtgtgatggcaggagcttccaccgctgctgctttctctgcatggtttgcaggaaaaatttagatagcacaacagtggcaattcacgatgaagagatctactgcaaatcctgctacggaaagaagtatgggccaaaaggctacggttatggccagggcgctggcacgcttaacatggaccgtggcgagaggctgggcatcaaaccagagagtgttcagcctcacaggcctacaacaaatccaaacacttctaaatttgctcagaaatatggaggtgctgagaagtgttccagatgtggggattctgtatatgctgccgagaagataattggagctggaaagccctggcacaaaaactgtttccgatgtgcaaagtgtgggaagagtcttgaatcaacaactctgactgaaaaagaaggtgaaatctattgtaaaggatgctatgcaaagaactttgggcccaagggatttggctatggccaaggagcaggggctcttgttcatgcccagtaagatgtaaaccctgaactaaacatcacacactgagaatctcttcataatctaggcacagataatcttttacactaaactactgtgaaattctaccagcattaagtactgtatatcgccctgtactt

SEQ ID NO: 218150 - DNA, 770 bp, Homo Sapiens
gccctttttttttttttttttttttttttccattggaaaaggattttatttcaccataaaaatgcaaactggaataaacaccatctttcctaacgcgaacgttacagctatttttaggtatttctgagcttcacttggagaagcaaacgattataaaacaagtttgcagcctgaaatctgtttgaaacattccaagtaaaaataatttagcaaaacagcttcttaaaaaaaccacacacactaacctttactagaaaccaaagcttttaaccaatcttttttatgcttaattccttgacgttgtaaaaagtgaatgtttttgaaggagcatcagaccattttgtaccactccccacataccgacaccttagaaagaacggcccgtttgagttttgatcttaaaggacttgtaccttcctcatccgtgactcaatgtcagcacgacgattcggcatcccacccaaactgcacttcctgatcagttaacattacaaacgggggggaaagaatcaccagggcaacgctttcttttcagtgccagtgtgactatggtggcccgtgcacctcctaggccgtgcacgcagggaggtcgccaagcagacacagaaatccccatgtgggggaatgcagcagctctgccatcctcacgactgtcggtctgtgcaattttcctgactgagagaggaccggccgcattaaagctatcggatcaagttttaaaggactacgtgtttgaaactgaagtggcaagtacgctgcggtgagtggag

SEQ ID NO: 218151 - DNA, 842 bp, Homo Sapiens
  misc_feature (794)..(794): n is a, c, g, or t
ttttttttttttttttttttttgatagacatatttattattagttaatatgtaaacttgtaaactgctaattcatatcctacttgtacaaaatcattttacaaaaactctttaaaaactaatagagaatgtattctctggtgggcatcactggaaggcatacctgggcaggtcctcccctgaaggctatcagcacctgcaaccagctcagctactgctgcctttgcagccgacactccaccctcctgctacctcttcattcccaagttcactgtgtcctgattcgtcgccttttctcccctcttttgtggacgccttctcacctgacaccaccacttcacagatgattgtacaggataaatgaataacagtattgtatcttcgtacctttctaccttggacgagaacaactctggttctctcagacattcagcagtcttatttcctgtggccttttatcccataatatattacttcaaatttaaataaatctccttcaaccagagtcctcaaatagcgttcattttatcctttgagtcatccttttatataaagtccttcaagtatccatattacaatatttaaccctcatgatcaaaatgactaagaaagctgtcttgttacaactgttttatactctacatcaccaggagctctgctaagaaatacaaaaaggaaaaatcagctcaacatgagctgtacaggttctaatgtgtgctactatttgagtctctagcaaaatattgcaacaagatcagtcttccacatcacaagatcaggtctgcacaacgaatnctgtagtgatttaagatggtcacaatctataagaacaccacatgtccc

SEQ ID NO: 218152 - DNA, 767 bp, Homo Sapiens
cagtctgccgcgcgtgtgcacattcaggttcccgagcacaaacatcaagataacgttctctgccctgtccagcgagaagagagagaagcaggaggcgtctgagtctccagtgaaggccgtacagccacacatctcgcccctgaccatcaacattccagacaccatggcccacctcatcagccctctgccctcccccacgggaaccatcagcgctgcaaactcctgcccctccagcccccggggagcggggtcttcagggtacaaggtgggccgagtgatgccatctgacctcaatttaatggctgacaactcacagcctgaaaatgaaaaggaagcttcaggtggagacagcccgaaggatgattcaaagccgccttactcctacgcgcagctgatagttcaggcgattacgatggctcccgacaaacagctcaccctgaacgggatttatacacacatcactaaaaattatccctactacaggactgcggacaagggctggcaggtaaatgccttcagtttgttgttaaatagaggctgatggataccgagaagaaagtggagcggctgctgtctggaacacaggcacaggataggaaggtagaaggtggggttggagcctctcgtgctgagaggaagaggattgggggcccgtgctgccatgctctgctcaccttcttttgtggagagatagagcgtgctctggaggacgtcaggcctgatgcttactgtgtggaattcagtgtctgcaaaatttggaatgggtg

SEQ ID NO: 218153 - DNA, 805 bp, Homo Sapiens
  misc_feature (714)..(714): n is a, c, g, or t
  misc_feature (778)..(778): n is a, c, g, or t
tttttttttttaggaaaaaaaaagagaaacctttatttacaaccatgggagtcccacaggagtacacaaaacacacaatgtgcacacacacaaaatgaaccttttaagtcaataccatgcgtgctcctggccgcgcgccacccctcagtgccctatccgcaccaccatcacagtgacgttgtcggccgagccccgctgcaccgccttgttggccagcctgttgcaggctgcttcgtagcgggcgtcggctgcggacttcccttcccgggtctggatcttttcatcctcgagacaggacaagatgaagttcacggcttcttctggggtaaagaccttgaagagcccatcacaggccaacaaaatgaacctgtcattgggggtcagctggcagcgtctgatgtcgggcacagaggtgacaccgcagcgcttgtactgcccgtccccaatggagcgtgacacctctagcacgcccaaaacacgcccatccctgacgtttcctccagccttctgtatcctcatccgctcttcatactgagttggattatgctctttgctgaggcttaaggctgcatgtttttgactctcctcattataacgacacaagattgcccgactatctccgaggttggcaatataaagaatgttgtctacagccagaacacacgtggcagtggacccatctttcaggcaggcttctggctggagcttgttaangactctcatcatatgcttgaagtgtcaaaagcatctctcacgtttctctcctgatactctcttnagaaattctgatagtttgagcaatctg

SEQ ID NO: 218154 - DNA, 685 bp, Homo Sapiens; identical to SEQ ID NO: 45656
  misc_feature (618)..(618): n is a, c, g, or t
  misc_feature (626)..(626): n is a, c, g, or t
  misc_feature (629)..(630): n is a, c, g, or t
  misc_feature (636)..(636): n is a, c, g, or t
  misc_feature (638)..(638): n is a, c, g, or t
  misc_feature (641)..(642): n is a, c, g, or t

SEQ ID NO: 218155 - DNA, 733 bp, Homo Sapiens
tttttttttttttttttttgaaataggaggacttttatttaattttttgctgacatactatgaggcaaaacaaaattgacaccatacaaaataactttataaaatatcattcacatcatattttatcagatttacagcattctgtgcatgttaggggttatgtaaggaggtgaaaaaacactatgccaaacttttagtattagtttatatacacacagtaagaaacaaaacaagtaactgttaggttttccatgaatttattgcaaaaatagtgcaaactacttcacctagtaagctgtaaaaacaaactagaaaggacccagctaagcttaaacacgacaatagatgctcagtttctcagcatttagctttcttcaccagttttatcttgacaatcaagaccactccccatctgttcagtttcgggtgagtgctgaggaatagagaaatgtgaagacgggctctctggagagaccagaggctcgggctgcctgatttcagcaacacatttaggatcatgctacttcctcaatcgcaatttttctgaggtctgtgttgggggaaaaaaaaaaaaggtgacatgatttttaaccttgagcttagaaataagttatccaacctcttgatgacatggagaaatgaattaagaaagcagcatgaacaggaaggattcagaacattattgtctgcttataacacagtgtctgcctctcaggtgtatttggctaagtaa

SEQ ID NO: 218156 - DNA, 755 bp, Homo Sapiens; identical to SEQ ID NO: 40249

SEQ ID NO: 218157 - DNA, 772 bp, Homo Sapiens
  misc_feature (700)..(700): n is a, c, g, or t
ttttttttgacaaagtcctctttttatttactgccgttgtaaatgatcacaaaacatattcattgtcaagtgaatgcacaggctttcaaaggtgattgtattctgcaaggtggggaatagccaactaccttctaaggtgaatgtgcagcctgccatttccaaccccaaaactcctctagattctcaacagggcagcttctgcttcatgcctctcttcggaaaggtcagccctgtgtagaaggcttaataccaacatgcagatccacctgagaatcactggaatgctctggacccagctggaatgcttccggaacccagtcaggcttccggaaatgagaatgtgtgcacacacttctttccgtatggtttcactctttccacaggtgaattacttacctgcccggtcatataaaatgtgggatcgctgtaggccctccttcacgtcattctctgtgatcagaactctactgggagaataggattgcccactcttcttacagaacatcttcctagagcttaacctagccagcaccgccagctgcagtccgttcaacccagctcgggcgtcaccgtcactgaggtaagccagggtgtctactgctttatcctctatgaacatggcgggctctgagctgctgttgctgctgtggctcagagggtcagtgggacggctagagtctaggacgtggattccagggangtgatcgctcgcattaaatagtcaccattgctctactggagctctcaagacaatcctcgacagcgctcagaa

SEQ ID NO: 218158 - DNA, 821 bp, Homo Sapiens; identical to SEQ ID NO: 46983
  misc_feature (757)..(757): n is a, c, g, or t

SEQ ID NO: 218159 - DNA, 696 bp, Homo Sapiens; identical to SEQ ID NO: 48641

SEQ ID NO: 218160 - DNA, 721 bp, Homo Sapiens
cttagacagtttcggtcggattcccgggatatggcgggcgtccctcccccagcctggctgccgccttgcagtttgatctcagactgctgtgctagcaatcagcgagactccgtgggcgtaggaccctccgagccagctccagtcagcccggtcaagcatgacagcaactcaaactcggcaaacttccaagacgtggaggacatgcctgacagatgtgccttggaagagtctgagagtccaggtgagccaaggcatcattcatggatagcaaaggtctgcccctgcaaggtgtcttaaatggaatctcatcagtaggagctgaatttggacaaattaagaaatccaaaagatgccatttgtttattactgtataaaagcattgttgttattggtcaagttattaggctgtagtggatttgctaatactttagccaacatgtattaaagtgattttaatacatgctgattacaatgcaatacatactgattgaaaatattcatattcatctaattttagaaaaatattgcctagatcattctctattcctgtttcttactttttctgttaatatttccaacagggaatgccagtccacagacacaaatttaatactgctttaaattttctcctatccttttagtccctgaattatataataaacaatgttaaaaccaatgtagtacacaatacttacttacaaatttaatactgctttcaggg

SEQ ID NO: 218161 - DNA, 697 bp, Homo Sapiens; identical to SEQ ID NO: 40234

SEQ ID NO: 218162 - DNA, 827 bp, Homo Sapiens; identical to SEQ ID NO: 52269

SEQ ID NO: 218163 - DNA, 810 bp, Homo Sapiens; identical to SEQ ID NO: 50245
  misc_feature (711)..(711): n is a, c, g, or t
  misc_feature (749)..(749): n is a, c, g, or t

SEQ ID NO: 218164 - DNA, 745 bp, Homo Sapiens
ttttttttttttttttgcattgtcataagctggggttttatttcaaactcaattatacaatgtagcaatagtaaatattaaaatgtaatgctaactcaaaacttgtagaatgccttcactgaattttggtataaagagtaaacaaaacttattctgcaaaaggattaggaacctttttatgcaaaaatgagtattttattttgtcagcactaaaagaaaaaaaaaaacaaaaccactgtatttctacattgaggtgaaaacaatgtttaaactttcttatcaatcaaatacattccaaaagaaagtgtgttctatgaaggttccaaaacacactcaaaacacaatagtacaggaatctaatactgaaaatgactgttctgacagggtgtttaacaaacataacttttaaattattaaaccagtgaagcaatcccttcctaataagtgtgtcaagagagtgaaactgggtttgttccattaataccctaacaatttcatcgtaatactttttactgctatgacagttttaaataaattttgctgtacttaaaataggttttgaaagtggaaaagtgtacaaagtttcagataaaaagattaataaatgcaatttaaataaaatttcccctcttctctcatatcaacataatcaattttagcagaaacagattgagctttaaaccctactcccaaatgaaacttcagttttaatcttatcagacatactggaaagatactatgattg

SEQ ID NO: 218165 - DNA, 865 bp, Homo Sapiens; identical to SEQ ID NO: 54669

SEQ ID NO: 218166 - DNA, 735 bp, Homo Sapiens; identical to SEQ ID NO: 45883
  misc_feature (733)..(733): n is a, c, g, or t

SEQ ID NO: 218167 - DNA, 832 bp, Homo Sapiens; identical to SEQ ID NO: 50412

SEQ ID NO: 218168 - DNA, 841 bp, Homo Sapiens
  misc_feature (730)..(730): n is a, c, g, or t
  misc_feature (758)..(758): n is a, c, g, or t
ttcaattttaatacatttattaaggcggcatgttcaaagtcttcaatggacagcaacaaaacagaaagccaaaaaatgactagggcttctaataagtgttttttctttcttttttgcttcttcttctcctctttctttttaaaggatttgattttcagtgcacaggttcaagccatagatttaaattggtaatagaggcagaattggacagtctaagatttgggccaagcccaagctcttgaaagtggagaaataaagtgcctacagaaacccccaactccaggaatgagtaacacggagtttctttaataagctaccagtctccaggtcaataactaagttatcaacaattcatttgtttatacacttttgtttcaaacacccacatttcaaccccctcccccataaatccctccacattttcagtgtggttgattaatctcccagctgttgatgggttcaggcaaaacagacctaaaagatagagaaaaacaaaaataaaacaaaacagtgattactatctggaaaatgcaccctagaaaatgttctttccaatcctctggttcagtcactctaggatttttttttttttttcagggtcagaaaaatcaatatttcattcttaaacctgtttacattgctaataatagatcgttaatgcttcgaagtcaggttagcaagttgagatttaaaatggtgtgtttctacacctaggttataaattacgcangtctagagaagagaaagcactttaatgnaatatcataatgtgatcaggtggtcatgggtgtgctttccccctcctgtagtctccatgtatttccttcgactcctcgagcta

SEQ ID NO: 218169 - DNA, 803 bp, Homo Sapiens
cttttcggtgctgacacctgcctcacatgaaacaaaattttagatagaacttccaaaaatgttttaagcgatacagggacttatttgaaaggataaaactcctttgcatatatgagctatatgatacgtttgttttataaaaagtcttattcctttataatcactttgaagtacagaattcaaaattaggatatttgggtgttgccctagaagagcttacaatttagtttatgttctttgcacaatgattcataataaaatgactctccttgaagaaatgttgttcttagcttatttctgtgaagaagccaaactccaataacaaccaaaaagttctaaacatctcacaaatcttccagttatttttcagtttaaatgttggtggacagataatatgttaaaactgcacatctgtaagtcatgcactgctcactgaccctctgaacttaactgcctcaaaaaagggactgttggccaggcaccgtggctcatgcctgcaatctcagcactttgggagggtgaggcaggtgggtaacttcagcccagcagttcgacaccagcatgggccatacggtgaaaccccaactcaacaaaaaattagctgggcatggtggcgcccacctgtggttccagctacttgggaagctgaggtagggggatcaattgagcctggagtagctgatttgccactgcctccagctgggcagcaaacaggccctgctggacgggtggggcgcttccccggcgcagtagacaaaaatttaatatatatgtgtttttttttgttaaaacggctctggttc

SEQ ID NO: 218170 - DNA, 725 bp, Homo Sapiens; identical to SEQ ID NO: 50227

SEQ ID NO: 218171 - DNA, 762 bp, Homo Sapiens
  misc_feature (665)..(665): n is a, c, g, or t
tttcggtacagctccacatttgttagacatcagagagttcacaccggagaaaggccgtatgagtgcagggaatgtgggaaattctttatggacagctccacactcattaaacatcagagagttcacaccggagaaagaccttataagtgcaatgattgtgggaaattttttaggtatatctccacactcattagacatcagagaattcacactggagaaaggccttatgagtgcagtgtatgtggggaattgtttaggtacaactccagccttgttaaacattggagaaatcacactggagaaaggccttataaatgcagtgaatgtgggaaatcatttaggtaccactgcaggctcattagacaccagagagtccacacgggagaaaggccttatgagtgcagcgaatgcgggaaattctttcgttacaactccaacctcattaaacattggagaaatcacactggagaaaggccttacgagtgcagagagtgtgggaaagcctttagccacaagcatatacttgttgagcaccagaaaatccacagtggagaaagaccttatgagtgcagcgaatgccagaaggcctttattagaaagtctcacctggttcatcaccagaaaatccacagtgaagagaggcttgtgtgctccatgaatgtggngaattctttagctaaaactccaacctcattaaatttcagagatttcccatggaaaaagttaccattgcttttgaattgggtattatgtttataattt

SEQ ID NO: 218172 - DNA, 726 bp, Homo Sapiens
  misc_feature (666)..(666): n is a, c, g, or t
tcaattctggtggtggatggcggggacttcgtgggcactgctgcccatctggtacagccccgcggccccctgcgctggctcgatcctggggcctttgggactctgggagttggtgcaggatttgcacttggggccaagctgtgccggccagatgctgaggtctggtgcctgtttggggacggagcttttggctacagcctcatcgaatttgatacattcgtcagacacaagatcccagtgatggccttggtagggaatgatgctggctggacacagatttctcgggagcaggtgccctctctgggcagcaacgtggcctgtggcctggcctacactgattatcacaaggcagccatgggtctgggggcccggggcttgctgctctcacgggagaacgaggatcaggtggtcaaggtgctgcacgatgcccagcagcagtgccgagacggccacccggttgtggtcaacatcctcattgggaggacggacttccgcgatggctccattgctgtatagggccttgtgggtcaggacgcttggctgccttcctgcccctggactgtgtccagctggtttggagtctcatcattgcttgccctgggcctatcccatgaggcccagtgactccacaacctccctgaggaggggatggaggggtcaaatctnaaagaggctctcttgtgagctcttggaccctcctcttcacggacccaactgtgccgtttg

SEQ ID NO: 218173 - DNA, 744 bp, Homo Sapiens; identical to SEQ ID NO: 50631

SEQ ID NO: 218174 - DNA, 702 bp, Homo Sapiens; identical to SEQ ID NO: 47623

SEQ ID NO: 218175 - DNA, 742 bp, Homo Sapiens
agcgggaacgcacacaagtggtgcaggaagatccaggaggtttggaggcagcgataccagagccacccggacgccgctgtgcagtgacgtggcctgcggccgggctgcccttcgctgccaggacacctgccccagcgcggcttggccgccatccgggacgcttccagaccacctgccagccatcacaaggggaacgcagaggcggaaaccttgcagcatttttatttaaaagaaaagaagaaaaaaaacacccaaccacacaaagaacaaaaccagtaacaaacacaaaggaattcagggtcgctttgcttgctctctgtgctccgtggaggcctccgtgtgccctcgttgccgtggggacccagctccatgcacgtcaacccagtcccgcccagactagtggacagacctggtgtcaccagtttttcctagcatcagtccgaaccatgcgcccgccctgccccaactgtgtgctggtcctgctgtggccgaggggaccgggtgtgtttggctctttatgcccctcccgctgtggtcctggaactcttcaccagggagggagccctgcgggggccgcagctttgtggagggagccgccgtgcttctgtcacctgctccctttcttgcgtctccctgtgatgggcccttaggcctggctgggcccattacatatccctgtggtggctctggtggcagctttctgtggcccctgctgtgttggcaggcaggtttgcgtggtgag

SEQ ID NO: 218176 - DNA, 762 bp, Homo Sapiens; identical to SEQ ID NO: 40352

SEQ ID NO: 218177 - DNA, 745 bp, Homo Sapiens
ttttttttttttttttttttttttccatcctctgtcaaaggttttactgacaactttccatacagttggtcaaaaaataaaaaaatacagaaccacagcagacagtatcttgtacactagaaatcaacataaccggattcccttctcatcgtttaaaaaaaaaaatcccccaaaatctaagaacttagttttggtggtggacaggactttgatccccacccaaatgaaccaaaataacccaggagataattcaaaccaaagtggtagggtagagaggggatcagattttaaaataactgcttttgtgacacaaacatgacgctgggaaagacaggcttgggctaggcagtgtctctgacgatgactatcaccatgtgttcttcttctagcttgcccaatgtccttagtgctgactggaggtactgctgggaaaagtcgcagggtgggaaggcgtagagcatgcctgtgccgtctctgcccttggacccccccactggcaagctgatcacccctgcggcctgcttctgtttcaagtaggagaccaggttcctgagaagccgcctctgcagaccgggctctactgtgggcatcccctcagtgccaagcccactgggggttgcctgggtggctaagaggaccgcatagccgttggggctcccctgcttgatgcgtcgtgtgactcgtcagcttgggctggtccagtcgaagcgctgggcgtcttcactgggcacttgctcccgagtgg

SEQ ID NO: 218178 - DNA, 775 bp, Homo Sapiens
gattgtgacttgacagtttcggtccggattccgggatttgacacctttcatcatgctcttaacactgatgttttcatgggttccttccctgtaatgaaactgagtgtagataatcaatttccataaagaaatgtacagttaaattaagaatattaaatcttccacacatgggctcaaataggaagtattttgtttagtaaaatgaaaattacttttaaaaaatatctgcagtgtttttgaaatgcaaggcaccaatagagagcagacattccagctgagtgattgtctggaaaaaaaaaaaaaatggaaccggtcagtcctctgtccttgttaattagaatacttccttcttcgtgtctatgcaacatcttccagataatccgcaacatcactgagctgggatacagtcagatcttgtgtgaggtcatcaagcttatcactggtattgatgtcatctatttccacagaaaggtcttcttctatctcttcaccaatacttatctcacttttctctgagcgatggctggtactattaaaatcatcaacatagtcatcatcttctccagttcctaatccaagtgatccaattttatcactgatcaatttcagatctttcaaaactgtatttccccttttactctcagagtcttttaaagaaggggctcccgccagggagctgagtccactttttaaggggggtgcatccgagagcgaggccagacttcctgcttgcttcctaggttccttcctcaaaccgtaagttttctctggctta

SEQ ID NO: 218179 - DNA, 809 bp, Homo Sapiens
ttttaatttataaaatatcctttatttattctaaggaacagtcaagcagtagtctttaaaaaaaaaaaaaagacacatttttttgaaagatattcttagtgttgtgacctggcattgggcccctgtgagcgggacggtggctgagaccgcctgctgtggctttgcgagttctctgcactcactggcaggggtttggtgggaaacggggaagctttggcatggttctgtccagttgcttataatcaagaataatgagttttgaggtttacaaagagcagaagtaacatttatacggctggcatttgacaaaagattgctgataatatactcattccaggaagtgtaaaaatgctttaaaggaatgataatttgtacttactgtttatggggactagatatattagaattatagcatcattatggggacatagtgtttccctataaattcagaaattctctggttgatgtaaaatcatacttcctggttttacttaattagtaaagaaataaataaattagagtaacatttagtcaggtagagttactcctttttccccttctttattaataaattttatttttagcacaatcattttacccaaaagagagtttgagaatgttcgagaatctctaccacttcgtaaccatgctggctgttatatcagaaaaatccttaaactaccacgcagctagctgttttcacagacttcctgctattaaccaacctttctcttccctcgatgggacctcaaagcccaaaccgatttccacaactataggttgtgctactgaaaacttctgttttcaga

SEQ ID NO: 218180 - DNA, 769 bp, Homo Sapiens; identical to SEQ ID NO: 40344

SEQ ID NO: 218181 - DNA, 755 bp, Homo Sapiens
tttttttttttttttttttttttttgagaaatatcaaaaggtttattgaaacatactcagctcagacgtactggcttatgaagcggtcagtcctcccccggcccccaaacactaacctttttcatttttctttaaaggttaaaggcttatgggtagttttatagaaaaagcaatgtagtgattagagtatctgcagaaggacccaccctcatttatacattccatgccgtcaggttaaaactctgctttgaatcgatgctagaggttatgctggccaaacagtgcagagaacatgggggctttgaatggccgagatgttcgaaatgctaaataacaaaggaatgacttgctcaggacagatggaaaccatgacagaaacaatgggcttggaaaagggctgttttcatggaacctgcagaaaaaccaaaacaaaatatcccccacaccctccaaaagcaacaagaaaccctcatgtgatccattccatccaggaattttcaccatagcaacggaaaggacccgaggtgtcactgcttgtgaggcagcgagaggtcatctctgcatcctagtgggaacccctgaagccctgctaggtgacatcatcgcggaaaacctgccgtggtgcctgccttccacctgcctcccggaggggcttcagctggagacccattggagctcttgaatgaataagggataaaattggagagattggagatcaccctagtgaggacaggcgaatgatcaggagaaggatg

SEQ ID NO: 218182 - DNA, 727 bp, Homo Sapiens
ttttttttttttttttttttgccggagaggaggggcttttcatccccttttgttaaaaacagactagcaccactgtgacgcgtgccacgagacaccaagacggcccagtcacagaggaaaaacccgaacacgacacagaactgaggagagtccaggcctgggctggtgggggccacacccgcgggccctggttgctgggaggcatggggctcaggcctgggcgcctcgggccggggtctccgggcctcacttggccggccgcgtgatgaagcgcgtggagaagtcgaacaggtcccgattgatcttgcgcaggttgcgcacctcgtcctccagctccgtcacacggacgcgcagctggtcctggccgccgagcacgctcttctccatggtgctgcacaggacggcctgcagctgctccgtgcggtccaggtagctgggctccgagccctgctggtggaggcccaggcgcagagtgaggcccccgtggcgcggctcgtccccgtgctcggcgcccagcaggtgcttgttgaagtggggcagcggcaggctgggcctgaagtctgagctcagcatgctgacgggcgccagcaggatggcggcgttggtgactgggcctttgagggccaccgtccggatgcactgcttgctctgcacgtcccagaggcgcacggtctcgtcgtgggagcctgagagcagcacgctgccgtcagtggacactgacaggcaa

SEQ ID NO: 218183 - DNA, 745 bp, Homo Sapiens
ttgggtatagtggacagaaacaggactttaatcgcacactttgggtggtggtggagggcaggtgatttccgtccaatccccccaggtcagaccccaccagcaggccgtggggcctcctcccaggcctgggttatcctgtgatgtctgtccagctctgggccctggaatctgccctggaattagcggaaaacaaggcccagtggtggcgaatctatcaccaagagccggccacccagccggggtaatatttgaggaagatcttcttggccaggtccacagtgtctcctcgcggctggctggggtacctctgcttgctgagaacgaaggcctgctccagttggaagacatttttgtcaaactggtgctgttggaaagggatgccctgggccacactgtcaaccagcgcctccaggaaaagccgccagcgaggggtgtagtagttggccaccaaccccgccagctgcttgttggcatagtccaggatgttgccttctggcccccacaaggtcagctggtagcggctgttctgctcgtagaaatcggcctcggcctcactgactgccgctgctcgggcctgctctagccagctgcccagcaagaagcggctgtcactagccagcacctcgtccagtgccggcagcagctcataggccaggacgcctccagccctcaacagggaggccagctccttgctcagttagcgcttcttgctcctcatagataagctgacagctctgcattgctg

SEQ ID NO: 218184 - DNA, 811 bp, Homo Sapiens
catattggaaagacttgttcttccacggtgactacagtacatgctgaagcgtgccgtttcagccctcatttaattcaatttgtaagtagcgcagcagcctctgtgggggaggataggctgaaaaaaaaaagtgggctcgtatttatctacaggactccatatagtcatatataggcatataaatctattctttttctttgtttttttctttcttcctttctttcaaaggtttgcattaacttttcaaagtagttcctataggggcattgaggagcttcctcattctgggaaaactgagaaaacccatattctcctaatacaacccgtaatagcatttttgcctgcctcgaggcagagtttcccgtgagcaataaactcagcttttttgtggggcacagtactggatttgacagtgattccccacgtgtgttcatctgcacccaccgagccaggtagaggccagccctccgtggtgcacacagcacgcgcctcattccatctcaatttagtctttaaaccctcgagaaatcacagtctccggatcccacatatatgaggccaacaggtccactatgattctccattcctcccctagtctttatttcattgatagaatgtgaatttggagactcgcaatttcttgtggtaaacaggagatatgattttaattgtaggtgtggtgataatttatatttgatattagtttgggtcgtctatcattggtgaatatgtttgagaagtatattattagtttattttatatatgattaatatgtatttttattattatatatagattgaatttttatag

SEQ ID NO: 218185 - DNA, 779 bp, Homo Sapiens
tttttttaaattatccaaaatgatttctttattgagattaactacatagatttcacagtactatggaatacttatatttagctaaagtcacaaacacatttcaacattcaaaatgatgagcatcattaccattctaatctacaaagctcatgaataaagaaaaatacaaaaacctcaagttttacaaaaaaaaaaaacttttaagtctacatacattaacaataaaaccatttcttccagataacaggtaaaagtataaaggcataccactgacttttttttttctagatagccaggaatgaacgaatgtttaatatctacgacgcttattagggccttcaaagttgcccccttgacttcctctaccaaagccaccaggaccaccactcacaggacctacaccactcattggtgcttgaggggtttcagaacctgttctactccccataggtgaacccatctgagatggtggtccttgaggaaatctgtcattgtgcactgctccattatctggcatcattggagttcccatatttgcggctccttctggtcccatggcaggaccaggacccattggtgggccaggtatagttgctctgttgttcatattcatacccatcattggaggaggaccttggttaccagcaggggctgggctaaacgcatctcccatgtttattgctccacggggaaccatatcacccatctcatttcctgtctctatttccatggatttggctaaagccctctgctgcgctcagttctctgtcttgtgtgga

SEQ ID NO: 218186 - DNA, 764 bp, Homo Sapiens
  misc_feature (735)..(735): n is a, c, g, or t
gcaaaagagctttatttacacactgacaaggctcacggggtgtcagctgaagaagtaggtggaacgcttcacctgctccaggtcgaaggcccctggcttgggcaccgcctgcagtgtctccttcagctggctggcctccaagatcttctggggctcagagcagaaccgcttgaccaggaatctggacaggtcctgcaggatgggctcgctgtgcaagcggacaaactgctcccggcacacctggttcatgacggagacatcagctgcgtgagtccagtaacagtcgtgcacagagacgaaggtcaggcccttcctgtagcagtgcagggcggtgagcatcatgtgggaggagtccagcgagtggatgaagttgggcgggaagccgttcttctgcttacgtgtgttgggctttcggctgatgtctccgttgtgggtgtaggtgatgctctgaattccacctcctatttgcttgaccttggagtccaggcgatacggctggatgacggggacgcccaggggtgtgacccactccaccacagagcccatgtgggagatgaggcgggcactctcggtcagccagtgctggatggcccgggtccccgagaacatctcctgtagactcttgaagacctggcgtacgagatagtgagaggcctcccacacgaactcctggggaaagtcgctcagctcccggaggcgcttctcaatctgcaggcgcccgccatagcgcgtgancccgtacaccaccgtcatcaccgtctgct

SEQ ID NO: 218187 - DNA, 812 bp, Homo Sapiens
  misc_feature (805)..(805): n is a, c, g, or t
cctttttttttttttttttttttttgacgaatacagataaatttattagttaaatactgattttccagccatttcaccttaagacaatgttaacaggtttgtgggttagggagggtatacgagggggcctttggaagaaaacaatgtaaatgatgattaaaacagaatcttggttcaaaggtattctctgctacagccagtaggattttggagtgaggggtctgggcgtgtggggaggcgtagtaatgccacagtcagctacagctctgctgagaaagaggaaggagtctccttgagctccagcatcaggggcagaaacagcaatgtgcagaggagaacgcggcagatcccggagcagctcagagtcggaggctccctccaggcccccctgccgtgtcttagcagtcgtcttctttccaggaattctgttgtgttgtgtttgtttgcttcgaattcgtgttgcagaatctctggctttttgcctcctggacaaaagacttctgccggggcgaggctgcaggtcctgagggactctggctgccatctgaccaagggctaggaggagcagacagacagcaggtgggccagcccttgggacactcctgccccctgaccaggactctgtccacttacactctccccagaaggactcgaggctgggctgagtgcttgccgactggcttgacagcagacgttttgtcttctcaaaccctctatgtgtacacgtgacgaagtctgcatgaactcagggtgcgttggcaacaccactctgttgcagggaaactgtcactcggcaactatcccnagcgaag

SEQ ID NO: 218188 - DNA, 742 bp, Homo Sapiens
tgctgcagcccgtgccgccgccgcctcctgggaagagaggaagcgggagaggagcccacgtcgcctgtcacccaatatctccagccgcgcagtcccgaagagtgtaagatgttcgcctgcgccaagctcgcctgcaccccctctctgatccgagctggatccagagttgcatacagaccaatttctgcatcagtgttatctcgaccagaggctagtaggactggagagggctctacggtatttaatggggcccagaatggtgtgtctcagctaatccaaagggagtttcagaccagtgcaatcagcagagacattgatactgctgccaaatttattggtgcaggtgctgcaacagtaggagtggctggttctggtgctggtattggaacagtctttggcagccttatcattggttatgccagaaacccttcgctgaagcagcagctgttctcatatgctatcctgggatttgccttgtctgaagctatgggtctcttttgtttgatggttgctttcttgattttgtttgccatgtaacaaattactgcttgacatgttggcattcatattaattacggatgtaattctgtgtatcttactgtgactccgaaaactgtagtattggtgtcatgggaatgtacgttatttcaaagtcatttcattaagatgaaaatttaaaaaaaaaaaaaaaaaaaaaggcggccgcttattaccccgaggatgtccctttgtgatctattat

SEQ ID NO: 218189 - DNA, 842 bp, Homo Sapiens; identical to SEQ ID NO: 45005
  misc_feature (772)..(772): n is a, c, g, or t
  misc_feature (779)..(779): n is a, c, g, or t

SEQ ID NO: 218190 - DNA, 428 bp, Homo Sapiens
tttttttttcaaaacaattaaattgaactggattaaataatattaagcaggcctctcactagcaaagttttgaagtcttacaacgcacaacatgatgtatttccctgccatgaggaactggggcggaagggagcctcaactgggttccaaggtcaaagtcaaaactgattgcaagacatgtaagatcctacagactctggccccgcctagttgtcaacaccatctgccattcatcagtggttatcactcgccccttacaaaccttacatgtcattcatttagaacacaatctgtagttcttcaaagagccctactgttccctgactccacttctttatatagaatattccttctgccaagaatgcccttctcttagtctggctaaagagctcctacttgctcttccaggaccagctcaagctactaag

SEQ ID NO: 218191 - DNA, 497 bp, Homo Sapiens; identical to SEQ ID NO: 62041

SEQ ID NO: 218192 - DNA, 614 bp, Homo Sapiens; identical to SEQ ID NO: 61451

SEQ ID NO: 218193 - DNA, 239 bp, Homo Sapiens
atattcatatgtgcaaagtagtttcaatgtcttgaataaacatacttagtttacaaaaaaaatttatcaaaattctgatttagattacattttagcagattaatccctttttatatgtattaaaataataaacaataatattccttagtgtctggcactttcagtaattatttctgctttcttcataaaacaggatacaaacatatgacttatttaaaatcataaaactttattattgt

SEQ ID NO: 218194 - DNA, 494 bp, Homo Sapiens
  misc_feature (484)..(484): n is a, c, g, or t
tgctttctagccaagtaaattgggcttataggaagatctttagtttccaaaactaggtggcagcaatggtttatgagaaattatcaaaggcagttaagagcagtgataaaacactacacatatatatatacattatatacacgcatatatatataatatatatatgcagcaaatatcttttactccttccgtttttttctactgagttaagaaattcattcagaaatactttaagtttcaaattccttttggcttacgcttatgtcacttacacttttacaaagttaaatctttccattcaacttcttcatcaaactagcaggattttaaaaagcttcccccacctggtttattttaaagggcatttcccttgtgtatgtttcgtcaaacggttcattccactttcctttgaagtagatggcattgacaagaaccagcctggtttctgcatcaattgagctacccggcaacaactcttcaattntacctttcaa

SEQ ID NO: 218195 - DNA, 449 bp, Homo Sapiens
tgagacagagtctcactctgttgcccaggctagagtagagtgatgtgatctcggctcactgcaacctccatctcccgggttcaaataattctcctgcctcagcctcctgagtagctgggattacaggtgcctgccaccatgctcacctaatttttgtatttttagtagagacgaggttttgccatgttgaccaggctggtctggaaatcctaacctcgagtgatctgcccgccttggcctccccaagtgctgggattataggtgtgagccagtgtgcccagccagtaactgcttttcaatatgagatgaacatctaaatgttatttctaggctcatttacataaatatcaagccttttctctagaactgagttgatgctgcagagaagagccagttctttcctctgcctcccctcggagtggagctaggagcagctggagactggcagg

SEQ ID NO: 218196 - DNA, 514 bp, Homo Sapiens
aaataaagtgtattgtgtatattaaggtacacaatatgacgttatgggatacatatagatagtaaaatagttactatgaaaaagcaaattaacatatccattatctcacataattacccattttgctgtttttgggacaagagcggctaaaatttactcattgagcaggaatcccaacatggtgcaattttattacctctagtcctcattttggataagcctacatgtgcaggtgaagagagacagggatacagagcatccacagggctcactctgtgccaggcccatatcaacccttcaacaggctgaggatctacagcacctcacggggtaggcgtaagcagtgctattttgcagttgagaaagccacctttagagaaatgaagtaacctccaaaggatgctcggctaagaagtgaggagccaggagagtctaatgccaaggattgtcttcctcctacttcaccaccctgccctattcactcttcacccattccagtaatcaccactggagt

SEQ ID NO: 218197 - DNA, 1000 bp, Homo Sapiens
ggattttggctctgtagatacctctggacactcaagagcttacagaactggctcatacttcctagtaagagcaagcacttccctcattacagaaagacctcttccataattgttctcagtttttctcctggctgccaagccatggtaactggggttaacatctcagcataatctgcctaggaactgctggccctgataagaaaggaaagattacacaccgaaggaattgaaataagttaccatgactatcaggagccagagaagtatacttaggattggattttaagggtgttcaattaagggggctggaatttaagacaacataagcaagacttcatggacttggggtacttttttgggacagatttaacctcagcaagtagtcccgaggttagcttttcaaagcctggaaaaggcgatggctttgaaaaagtggaaatgaattcacaccatggcagcttttaacttgaggagaagatagctatttattttggcatatttatgtggttactgctcacttactagtcgcaattgttttgtaaccactttttatttattttttgagatagtctcattctgttttctagactgtgctacagcctgggcgacacagtgagactccgtctcaaaaaaaagaaaaaaaaaaaaatatcatattgtattggccatcccttgtttcatattcgttaataaactttgctactttgctttctaatttcggtgaagaacaagcacaagattaaggagtaagactatgtgaaactgggttataaattgaaaggctgttggctgttgtatcttgtaaacaattcaacgcaatgccaagtgaaaatgaagttgttagtccctctatctagaattctttcccaaatagctgcatatctttttcctctgcttcatttaagtctgtgctgaaatgttatctactcagagaagacattctggatcatttcatattaaatagtaacttttatcactccaaaaaaaaaaaaaaaaaaaa

SEQ ID NO: 218198 - DNA, 1000 bp, Homo Sapiens
agagcttagtacgataatggggaaaataatagtaacattgattataaaggcaacaaacttaatgattaagagtgaaagtcctggaatcagacttcttggattttaatcctgttaccaacacttaactaggtgtgtaactttgagtcagttactcagttaatgtcttattttcctcatttgttaaatgggtataatagtatgtgcctcaggttaaatgggcttaatgtgtaagtgcctagactagtacttggagtataggaaatgcttaatgagattcaatgtatgttatttgttatgaagctgtgaaacactgtgtatatgattttaaaatgtgctatttaaattcatcatttacagtttaacttgccattttaaaaagcaacatttgattactgattgaaaaaattttttggtctcatttgtgcagagcttatatttttctccttgcctaagctgttcttcatttgtttgtataaatattggcatgtttatttaccttggactagtccatgtcacctttcactaatcaaagctgttatttctgggttattaatcatcccacccaattgggtggcagcagtaaaccctgagggcttgccatctctcccactttataagttattactgtcattattgtttaaataattaaggagaggtttttttttgccaaattctttgctgtttggaaataaggaatggaacaagtaataaatatgctgaaaatatatgttttcttagttcactttaagaaattgatttatttaggaaatggtgtttgttttaaattacacttgatttttttgaaaaatttgtatgggcatatttcttaaaacgttaggtctatagtataaaaagaattaaaacaccaaagatttctattgatttatattctttggttattcttttatatttcttgactggtattctgtatggttcccaaaaccagtcaagaactgtaaaactcttactctacatacttgccagcaaaaaaaaaaaaaaa

SEQ ID NO: 218199 - DNA, 498 bp, Homo Sapiens; identical to SEQ ID NO: 47043

SEQ ID NO: 218200 - DNA, 500 bp, Homo Sapiens
aaagtatataacatgtacgtacaatttaaagaataattttaaagtgaatactacgtaactccatccaagtcaagaaattgccagcttctcggaagcccactgtgtctccttcccctacctgcaacctcttccaggctcccttttccagccttcccctttttcccttttattttcatgccttgatttgacttgtgtggtgggaacatgtgaactatgaaacttaaacctgctgcccacccagagcagctgtgaccaagggctgcctcaaggggttgtccacgcaggttgggctcctctctgctgctggacccaagactctgaaccttccaagggacaggcagttcttctaagaagggctcccctgtgtgtgagcaagaccacagctctccttctatctacagatgcatgagggttggaagagtctgggctgtttttagaccttctggtcagctgtatttgtgtaacaacttttgtaataaatagaaaaaccctctgcaaaa

SEQ ID NO: 218201 - DNA, 515 bp, Homo Sapiens; identical to SEQ ID NO: 51231

SEQ ID NO: 218202 - DNA, 768 bp, Homo Sapiens; identical to SEQ ID NO: 42225

SEQ ID NO: 218203 - DNA, 849 bp, Homo Sapiens; identical to SEQ ID NO: 47216

SEQ ID NO: 218204 - DNA, 833 bp, Homo Sapiens; identical to SEQ ID NO: 51446

SEQ ID NO: 218205 - DNA, 827 bp, Homo Sapiens; identical to SEQ ID NO: 41331
  misc_feature (645)..(645): n is a, c, g, or t

SEQ ID NO: 218206 - DNA, 805 bp, Homo Sapiens; identical to SEQ ID NO: 41063
  misc_feature (781)..(781): n is a, c, g, or t

SEQ ID NO: 218207 - DNA, 755 bp, Homo Sapiens; identical to SEQ ID NO: 43046

SEQ ID NO: 218208 - DNA, 855 bp, Homo Sapiens; identical to SEQ ID NO: 52258

SEQ ID NO: 218209 - DNA, 801 bp, Homo Sapiens; identical to SEQ ID NO: 54446

SEQ ID NO: 218210 - DNA, 666 bp, Homo Sapiens
tttttttttttttttttttttttttttttgggttggcatagtttattacaattagtgtgcgcataaaaccatgtaaactctacaaagtaaaccacttcccctccacactaaccagcagctagtctgccatgaccttccagcacccccattattttaacatatatacatttcacaggatgtaataaccacacaaatagggttataatacattcttcagggaaaaaaatttttggtccatattttctattaaaaaaacacacacacttccctctttggcaaaagaggttaaatctcccatagttaactcacaaaagaaactcaaataaaaactactgagcatgaggtacagctgatgtctggactgttctggaattacagacgcctccttgaggggaaaatcatttcttataaaatgagatcagtttccaacagtttcatgtcagtagaaaagctcgatttagacttggtcagaatcacttttgcatgaacatgttccaaataactttgtttttcagaggacagcggaagtcacgaaaatgtgctacttctgaagaaagtcatgaaaattgtggcgtctgacctcagcaatatttttaatctgaggtacgaaaacatctgacacagccattcacactgtaattcctgtgccaccttcatggtcaccgg

SEQ ID NO: 218211 - DNA, 797 bp, Homo Sapiens; identical to SEQ ID NO: 49668

SEQ ID NO: 218212 - DNA, 768 bp, Homo Sapiens
ttttttttttttttttttttttttaaaagaaaagtacccttttattgagaggtaagacaagtatatttacaatattcaattgttagataatataatctgacagtgggactttttaaagcagcagtatttcaggaattacaatttataaggggaaaagaaaaacattccaaatatgtttctgttacagaaaatacacttgaacaatgacagaaacacttaaggctatgtagtattagaccttttcctccatctctataaagtacatttttgttacagacagaaggctgattttggaaagaaagaaacaataggatgtatagtgctttctatcagcagactagtatgtttaaaaatagtctcatcaagggttctgaataagaaatataaatgttgccaggcagtcccaaactcacatttgatattaactgcagactcatttaaaactgaaaactgctccagcctctctcaatctttactaaggactgggagattatcaaaccctttcaagtctaataatgcttttgaattaagattattgaaaaaaggaatctctgttacagtgcaaagaacattttgatagaaattcatgtctacaaaggagttaaatacagatgtcccttacattagcagatactattcttgctctaaaaaggtagaattatcaagacattgtaaataatatgggtcaaaaatatgtgtaacagatttctacagggcaccttatataaagtcaatcctcaaagtatgtatttgacactctccaagtga

SEQ ID NO: 218213 - DNA, 759 bp, Homo Sapiens
tttttttttttttttttttttttttcttccgacgaggtatttattaagttctaaaaccttgaataactgctattttaaaaattcacactaaaagaaaactagaaatgttaacatcttttacagagggcagtaagtggccttttttttttttttaaattaaaattgcctaggaaaaaggtgagctaatctctttggaagtgtcatcagctggtgaacttcatcttggtctccactttatgtctttcactccatgaaaatgtcttttcaaagcagtgttatccgcccatggtgagtttaaataggcatcatcatcattttcttccaatctcttgagctcctcttgtcttctgtgatagtacagcatcagctgcttctgctcctcactgctaataataggctctcgggctggagctccctgtcccctttgctgaatcttggcgataattttggttttttcattcttccccacgtagtctgaaagcttcttcgttcttctcagctccttggctgcccaccacagctgcgcctctgcctctttaatgacgttgagccctgcctgtgttcccgacaagtcttccttattttcaaactccatgcggatgggatcatacggtggcaaccccatggggtaaacaatcatcaccgcgcctcgaagctggtccaaggcatctttcaccatctccatggtaacacagacaccggcttccacttgtttcttaaatattattgctttggcttcttctatagtcttctttaaca

SEQ ID NO: 218214 - DNA, 879 bp, Homo Sapiens; identical to SEQ ID NO: 54399

SEQ ID NO: 218215 - DNA, 719 bp, Homo Sapiens; identical to SEQ ID NO: 50575

SEQ ID NO: 218216 - DNA, 779 bp, Homo Sapiens
tttttttttttttttttttttttttacaaagcagaggggtttattataggaacattctcaaaccgcaacggaaaagatgtccgtacaggtggatggggatggagatccacctcggagtacacagacttcagggggcctcctgcctggcacgttccttctctcccgtatcacctaaaaccctgagacccccaccctctgcaggagagacccacaaagaagcctcctccctgtggcctggctcccatcagggacagtcctgtttttagagcaagaacagtctgtacttcagacaggatcccaacccccacccaaattcaatgtcgaccgtctgagcagccagcttcattggctgcaaacgcctctctcaggtgagtcaaaggagacacgacggggaaccagggggccctaggtgaggatgtcatgggcctggtgctccaccagcatctccatgctcttcacatccgtgcaccagaactccaggcggtccttcattcccttgatctgttgcaaatccaacactcggggctgcacccaggtcatgtggactcgtttgtccacctcgtctatactgcctttcaccagccccaccgaaagggccttcatcaccagaagctccacctcattcactgtgattttagcacttttggcaatttcttcaaaagtgagttgtctgtgattggcaggtcgtgtgaaagtcatctccatgaggcacaacaactgaattttcctcagaagctgggcttcattagctgctaaatcaggctgctggccccaggcag

SEQ ID NO: 218217 - DNA, 631 bp, Homo Sapiens
ttttttttttttttttttttttttttttgcaataagtggtctttattgatgtttcacattcagttattatcaattcttcagttaattgtacaagtatgataaattattttctatttgctgtgggaatttaaatgtaaaataaataccaaatacatgtgtggtttaatgaacactcaatgaagcatctcttctgaggtattcctttcagtctggttttatcccagatctttttacttcccctaggaatagtctattaaaccacacaatggatctgtgaacttgtagatcaagttcactgtaaatctgtgaacttgtgttttaattacattagacatattttttgatctcatcatacaacaccaatacaaaagcaccgcccatgcctctcagcacattggaccaggcacctttgaagaaggccttggctccttcgtcttttgcaatcttcctccagcagtcaactgtccccgtgtacataatatcggcccctttccggccggactgcatcatcattctacgacgaacagtgtcaaaggggtaggacaccagccctgcgactgccgtcacactctgggcaatcatccagctcacaaaaatgtgcacgttcttggggtcaggcagcatccccttg

SEQ ID NO: 218218 - DNA, 821 bp, Homo Sapiens
tttttttttttttttttttttttagatttcctttgtggcaccataatagaatgttccaggttcatctcatatttctccatcccaggagccattattactctacttttgagtatgtcctcaaaactggtctaacaagtcatttcagaaaataatttcacttcaacaatacactgtttgttgattcaacacaaactgcatgggctgcttagatcaatttacacttggttcatcgccatctttggctgtttcaaacatacactgctaaaaaaaaaaaaagattgtcattaagaatattacaatagaaatggaagttttgaggaggaagaaaatcccccaaaatgtaagcaatggtaataatgcatttaaagtatagtctcacaaagtctcacttaagagagcagcacacccaggacacacatattgatctgctgacaccacttctttactatacttcatatagatgtcctcacatcttgatttacatggttataactgcttaaaaactggcaaagagaaaacctaaaataatgctttataccagtttgagtcagaaccagactgttccagactagttggaaaacgacccaggaactcacctgcattaaatgctgaatttaactgagctaaaaatgtctaggccatcccttcttagaattcccatgactcattctagtcaaaagctataagaacatattccttaatagttcagcaaactttagggaaaactagctcattgtcttgggttctaaagtccttttgtttgattatttttattataatgaaattaaacttatgactattacagtatgctcagcttaaaa

SEQ ID NO: 218219 - DNA, 588 bp, Homo Sapiens
tttttttttttttttttttttttttttaaatttgcttccaaagtttatttctcggaacaccataagatttgtataaagtatggtaggttgtttatcaaatcattttgtttgcaagaactcaccattagcagctgatatggccagatatacagatgtaatggcatcacaacaaccaaaaatagggctaatgagatggtgaccgtttctctctgctatgctcctgtctcagttcttgtagccttcaactcggtacgttaatatttgatgaagttggattctttcaaactagtgatgtctccataatggtaagtgttactattcacagaataattacaatacttctcatttcctcaactgatttttctagggattatggattcaaaaaacatacatttcctaagaaatactgggagggaattcccacatggaaacactggtctgtgtcctagccctagcctctgcagcatcattctgggatgacagtttgtaatagtgaccaaaacatgtaagttggagttaaggcagatcctagagatcagtgaactcctgcagatctgtggtgagtagtaaacaatatatatatatata

SEQ ID NO: 218220 - DNA, 807 bp, Homo Sapiens
cgactcctgtgaggtatggtgctgggtgcagatgcagtgtggctctggatagcaccttatggacagttgtgtccccaaggaaggatgagaatagctactgaagtcctaaagagcaagcctaactcaagccattggcacacaggcattagacagaaagctggaagttgaaatggtggagtccaacttgcctggaccagcttaatggttctgctcctggtaacgtttttatccatggatgacttgcttgggtaaggacatgaagacagttcctgtcataccttttaaaggtacatgttttattgatgttaacgttaattgattgagctactgttagtgatgattttaaaattaaagcagatgggaatctctctgagaaagaaaatggagattaatcttaaactgaaacagtagttgggaaatcttttagaaatccacctattactacctattggtaaaggagattaaatttctacaggtatggagagtcggcttgactacactgtgtggagcaagttttaaagaagcaaaggtatagcagttccaagtattttttttttttttttagacaagagtctagctcttgcccagaatggagtgcagcggcactatcagttcactgcaacctctgcctcccaggttcaaggaattctcctgcctcagcctcttgagtagctgggattacaggcatgtgacaccatgcctggctaattttgtacagctatgttgtccaggctggtctcgaactcttgacctcaagtgatactgcccgcactgacctcccaaagtgctgggattacaggcgtgagc

SEQ ID NO: 218221 - DNA, 581 bp, Homo Sapiens
ttttttttttttttttttttttttttttttggagacaaggtcttcctcagtcacccaggctggagtgcaatggtgcaatctcagctcactgcagcttcaatttttataggagtgcaccaccatgcctggctaccttttttcttttttgtagagatgggatctcactgtattgccaggctggtcttaaactcctatcctcaagcaatcctccagccttggcatcccaaagcgctggcattataggcatgaaccactgtgcccagcacacttctttaacctttctgaaaatttgccaaagtattagcctcattttccagaaaagaaaaccaggcttaaaaaggcagaaacttgccctagggcacacagctcttaatggcagaactgaaaatctttctgaggctaatacccaagcttttcctaccaccaggcaaaatcccacaacagaatgtcttgccaaatgtttagagacagtttctgatcagagaaccagagagagcttccaggaaaacggggcatcaaagctgaactttaaagaagctcagttctttccattcggtatccactctcatctgctgggattc

SEQ ID NO: 218222 - DNA, 814 bp, Homo Sapiens
cactgaatgtattaaccctcaggattttagtaaacccatccaggaagtgctcattgagatgaccgatggaggagtggactattcctttgaatgtattggtaatgtgaaggtcatgagagcagcacttgaggcatgtcacaagggctggggcgtcagcgtcgtggttggagtagctgcttcaggtgaagaaattgccactcgtccattccagctggtaacaggtcgcacatggaaaggcactgcctttggaggatggaagagtgtagaaagtgtcccaaagttggtgtctgaatatatgtccaaaaagataaaagttgatgaatttgtgactcacaatctgtcttttgatgaaatcaacaaagcctttgaactgatgcattctggaaagagcattcgaactgttgtaaagatttaattcaaaagagaaaaataatgtccatcctgtcgtgatgtgataggagcagcttaacaggcagggagaagcgcctccaacctcacagcctcgtagagcttcacagctactccagaaaatagggttatgtgtgtcattcatgaatctctataatcaaggacaaggataattcagtcatgaacctgttttctggatgctcctccacataaataattgctagtttattaaggaatattttaacataataaaagtaatttctacatttgtgtggaaattgtcttgttttatgctgtcatcattgtcacggtttgtctgcccattatcttcattctgcaagggaaagggaaaggaagcagggcagtggtgggtgtctgaaacctcagaaacataacgttgaacttt

SEQ ID NO: 218223 - DNA, 632 bp, Homo Sapiens
ttttttttttttttttttttttttttgtaaaagggctatcaaaaagatttatttgctttaaaatgcattcatttccagaagcattgttaataaaacattacagtttcatccttcgtaataaagtattgaaaatcaattgtggtacagtagcaaacattgcaggtattaagtgcaatgagctcatgatgccgttataaatatgaaacccatgtatgacaataaattaaaaatgaaaaagacaggaccatttaattctgctgtctggttatctccttgcaatgcttcaaattatgttgtgctcattcaacacaaaattatgtgtctcaaattgcatgatgtgtttttgctgatatatccctagagctaaaaaaatagtaccttaccacaaaaatatttttatggcacaaaatttaagttgttccatagtggttcacataggtgtaaaaagaaataggcacaaaaaataaaattcctgtaaactataaaaaagtaaatttcaaagcatacattatagaacctagttgtcaatatgcaatgtattaaaatacagaacatgtaatggaaagatgtttagaacacgtgagtaaattgaacaagttactttaaaaaactcatatggcaaagcattattg

SEQ ID NO: 218224 - DNA, 603 bp, Homo Sapiens
ttttttttttttttttttttttttttttccaaaataggggatttattataaaaactatacaaacttttttatcactcacaaatgatgaaaaattttaaacaattagtatcctccctccaaaatagtgtgttctgtctttacagtcttcactggcagtgcattcagatggtatagaaaataacaaacattccatataactttgtccctacagtaaataattttttaaaacttttcatcaagtttcagtgttactgaagttaattatagacagtaaggattacagaataagcagtaaacggtcacctgcactgtatttttcaaagcaaaaattgttttatattttctatgttgttttatcctgccccaaacacttaaagcaaaagttaaagatttttccagttacctgaaacttcaaaaatctattgtactttgaaaaaactttaaaaagcagcatcatttaaatagtggttaactcataaacgtgtatgcaacaacattccacaaccctaataccactcaggcctgcagagtcaccagctcacaataattcagtgctctgaaagctggggggaaagcccctgagtagtaagtatgcaacccagg

SEQ ID NO: 218225 - DNA, 869 bp, Homo Sapiens; identical to SEQ ID NO: 49545
  misc_feature (825)..(825): n is a, c, g, or t

SEQ ID NO: 218226 - DNA, 800 bp, Homo Sapiens; identical to SEQ ID NO: 43999

SEQ ID NO: 218227 - DNA, 722 bp, Homo Sapiens
ttgccattggcatctccctggcaatatggctgctgattctgctggtcaccatccctttgtatgtcgtgaagcagaccatcttcattcctgccctgaacatcacgacctgtcatgatgttttgcctgagcagctcttggtgggagacatgttcaattacttcctctctctggccattggggtctttctgttcccagccttcctcacagcctctgcctatgtgctgatgatcagaatgctgcgatcttctgccatggatgaaaactcagagaagaaaaggaagagggccatcaaactcattgtcactgtcctggccatgtacctgatctgcttcactcctagtaaccttctgcttgtggtgcattattttctgattaagagccagggccagagccatgtctatgccctgtacattgtagccctctgcctctctacccttaacagctgcatcgacccctttgtctattactttgtttcacatgatttcagggatcatgcaaagaacgctctcctttgccgaagtgtccgcactgtaaagcagatgcaagtatccctcacctcaaagaaacactccaggaaatccagctcttactcttcaagttcaaccactgttaagacctcctattgagttttccaggtcctcagatgggaattgcacagtaggatgtggaacctgtttaatgttatgaggacgtgtctgttatttcctaatcaaaaaggtctc

SEQ ID NO: 218228 - DNA, 742 bp, Homo Sapiens
cttgttttgatggaaaaaggagatgatattaacataaaacaagtgttactgaacatgagaaaataccgaatgggtcttattcagaccccagatcaactgagattctcatacatggctataatagaaggagcaaaatgtataaagggagattctagtatacagaaacgatggaaagaactttctaaggaagacttatctcctgcctttgatcattcaccaaacaaaataatgactgaaaaatacaatgggaacagaataggtctagaagaagaaaaactgacaggtgaccgatgtacaggactttcctctaaaatgcaagatacaatggaggagaacagtgagagtgctctacggaaacgtattcgagaggacagaaaggccaccacagctcagaaggtgcagcagatgaaacagaggctaaatgagaatgaacgaaaaagaaaaaggtggttatattggcaacctattctcactaagatggggtttatgtcagtcattttggttggcgcttttgttggctggacactgttttttcagcaaaatgccctataaacaattaattttgcccagcaagcttctgcactagtaactgacagtgctacattaatcataggggtttgtctgcagcaaacgcctcatatcccaaaaacggtgcagtagaatagacatcaaccagataagtgatatttacagtcacaagcccaacatctcaggactcttgactgcaggttcctctgaaccc

SEQ ID NO: 218229 - DNA, 747 bp, Homo Sapiens
atctcgggttctgtgtactccaaaacccagcagtcctttgagaaacaaggttttcattccggtactcctgctgcttccttcaacttgccttcagccctaggaagtgggggccccatcaatccggccacagctgctgcctacccacctgccccctttatgcacattctgaccccccatcagcagccgcattctcagatccttcaccatcacctgcagcaggatggccaggacatcctcaatttcgtcgatgaccagcttggtgaataagtattactgtaccaactgggcctcctctagcaggcccctgaaggcagtggaataaaatgaaatcttcgccctttaagaactcctgaccttaatgtggtagtagtatcttgtccttgaggggatttccttcccctcacccctaagactttcacaacctggtgactggaaagaaccaccacaaatcttcatttcctccagaaactgctacatctacagccgatttcaggcagtaaagggagagggatagaggagattgggtggaaaatggagaggatcaagaaggagctgagaccatttcaaagaaaaaaaatgctttatagagttttaagtatgacttagatgggtccaggcaaataaactaaaaagaagtgaaggcaacatgtatcgtctggcagaactaaatcttggagtggggtgagggatgaaagactacatattgggtacagtgtacactgctcgggtgatgggtgcgctaaagtc

SEQ ID NO: 218230 - DNA, 591 bp, Homo Sapiens; identical to SEQ ID NO: 41237

SEQ ID NO: 218231 - DNA, 752 bp, Homo Sapiens; identical to SEQ ID NO: 40939

SEQ ID NO: 218232 - DNA, 742 bp, Homo Sapiens
cttttttttttttttttttttttttttttgaacctgaatgcagagaataaatactttattaactgattacagttgaaagtcacaaacaaaaaagggggtatattaaggcaaagccatatatatatatatatatgtatagacaaatccaaagattgttacttctttacattttaataacctctgcatttttcttttacacatttaggcagtgtgctttcttttctcctcagttaaagcaacaccttggccaatatttctaaatcatattttgatgacaacttacaggatcagtgattgagacaatgactagtgtatcaaacgctatctgatagttttcttagcatattccgtgtgtggtggtacatttattgtggtgtgcaaaatctgacaactgacgatttttctctgtcagcaaaactaacaaatttttaaaaatgattttaatagttataactaaaataagcttagacttccaagtcagtcaaatgcccaaactgcatgttttctgccgttccccaaatccttttacatgttttaaatagcctttagaatatgatcgatcacatggctgtatttcagatctaaaagttttgagattttcaaaatcaaaaattactttcttatgcaaaatggcaatgcaaacagcaatcctacataatgtagaataatttttcttctgtacggctccttctaaaaaatgggtaaccacacacacacacacacacacacacgacataaattt

SEQ ID NO: 218233 - DNA, 841 bp, Homo Sapiens; identical to SEQ ID NO: 44877

SEQ ID NO: 218234 - DNA, 881 bp, Homo Sapiens
  misc_feature (820)..(820): n is a, c, g, or t
tttaattttaaattttattaaagtacagagttaacaagttttgagttttttatataggaaaagcctagtcaattcagatgctttctagaaaaattaacattaaaaaacaaatagaaatccatgactaaagggggaaaataactttcaaaagttaccaaaattcgaatcatatcagagaccattataaatttcaaacagtagatttaccacacatattgcattttcaaattctaatgtagcaaaacgtaaccacataatttggctacagctaatcgtttcagaaaagtttaaaaaattagcaaagttatatctataaaacttttgtagttttctttttgcaaagtaaaaaggcttaaatctttaataaaggaaaacaaaacaatcctcttaaatttcttataaatagctctccagacatatattacaaatctgctgtaagctttctttacctgagagaacttcccaggatcctttatcccaaaggattaccttaaagagttcttccatcattttactcatgtgaatatgattaaactcctatagaagtggattgggacatatgcattcttaatctgccctccccatttgtttctttctgaaaggattttgcttaaggaaaaaaaaagctctttggtaaaggccaaatatttcaacctttcaaaatgactgcctctgtgaaagagttgttgagaaagaagaaaagagagagagagagaaaggtctaaacatctgtgtgaacagctctccagtactgtgaagtcaaaggcccaacattacagagcgcacctctgcctgaaatacaaaactaagttaactagcnagttacaggaaatagccttcagtaaattccacaagccaagtggctactgcattgtccctga

SEQ ID NO: 218235 - DNA, 804 bp, Homo Sapiens; identical to SEQ ID NO: 41527

SEQ ID NO: 218236 - DNA, 825 bp, Homo Sapiens; identical to SEQ ID NO: 51833

SEQ ID NO: 218237 - DNA, 832 bp, Homo Sapiens; identical to SEQ ID NO: 50925
  misc_feature (706)..(706): n is a, c, g, or t
  misc_feature (795)..(795): n is a, c, g, or t

SEQ ID NO: 218238 - DNA, 747 bp, Homo Sapiens
agcttactgcagcatcaaactcctgggctcaagtgttcctcctgcctcagcctcccaagtagctggaacctcagccccatgccaccacactcagctaattttaaattttactaatttcatttaatttttgtggagatgggggtcttgctgtgttgtttaggctggtcctgaactcctggcctcaagcgatccttctgccttggcctctcagtaaattatatagaagagcacttctgtataatttactcagtttcttcatcacatatttccaactgttgccctaaataggtttaaaaatgtgatcatgttattagaaaatcctttccattgaatttcagggatgctgaatttcagggagctaaattgttgacccttgcctgtagttgttattggttcagaagtaaattttattgatgctacaagtaaaaaattagatctgacttagtaaactcaaaagttttacaaaactgtattttactatgtagatgtatttctttaaaataggtatggatggatatttttatgaataaataatattgcattatagatggaatgaaactttgcatttaatttgccccataagtaggctttttgtagaatgaattactctcttaaattgtccaatctaaatttttattagctacattaacttaaagcatattctctctcttttctcttcacactttcttcctccttcccagggtcttcctctccctctttcatcacctacattgttccccttccctt

SEQ ID NO: 218239 - DNA, 851 bp, Homo Sapiens; identical to SEQ ID NO: 50043
  misc_feature (727)..(727): n is a, c, g, or t

SEQ ID NO: 218240 - DNA, 809 bp, Homo Sapiens
ttttttttttttttttttttacattttatcaggtattttaatgtagagatgatttaaaatatacaggagaatatgcataggttacatataaatactatgccattttatgtaagggacttgaacatctgcagattgtggtgttcacagctaaacagactgctctgtgcagggagaggccctacagtgaagggaaaagtagacacttgattgtggactaatttgttcagtatttcccaaaaacttacagctaacaataatattaaacaggttttattagcatcttatacatctgacactctctcctaagcatccagtttattttctagtcacgggttacttactaaaagtctgtgtaacatgagctcacatcagattagaaaacatcaagtgggtagtatttttgactgaattaacatacaaaagaaattgcctatatcatgtatatgggctccaagggtagttcatacttcagcctcttcattcttttctgcttttgtcacctgttacagaaaatgatctataaaatcctcataaataagacatgagttttgcctgtaatgagtaggatgaaaaaaggccagtgccgcatgctatgaaacaatagcaactttacaggggaatccaaggtttgtgtgcacaaaaattataagcggcattttctgctatgctggaaaaactgaagtataaaacacaaatgaactaagcctttcaaggatgaggtatcaccaacactggtagctgtttaatatattcatcttacaactggatgctaaaaatgcaatcactgtaattaataaagttgaggaaaa

SEQ ID NO: 218241 - DNA, 806 bp, Homo Sapiens; identical to SEQ ID NO: 43881

SEQ ID NO: 218242 - DNA, 776 bp, Homo Sapiens; identical to SEQ ID NO: 47006
  misc_feature (648)..(648): n is a, c, g, or t

SEQ ID NO: 218243 - DNA, 736 bp, Homo Sapiens
tttttttacattgagaaaattaatttattcccatgatgggggctgaaggagggcccagagctagagcctggtctcctgcccccttgcctcttcttccagatgaagagaggcttagctgaggcctgaacaggcctgggatggctcttgggcttgagggcctgttctggcaggatggcaagcagacactggacagggtcacttgggcggccgatatgccagcttccgactcttcaggactgaccacttgtgccgctttatggtgtagaccaggggcaccagcagagccatcatcatcaacatcttgagccccatgcgttttcgatggtcgtgctctggctcagatgcccagcgcaggaaggtgcacacatccttggctatctgggacatggtagctggggtgccatcgtcaaactctaagacatctgtgtagatgggaggggccatggcaatggcctggccaggaaagtaggggttgaagtagagaccttcccgcagtgacaccccggtgggtggctcgcagtagcccgtgagcagggagaagacgtagtcctcaccaccatgcctagctcgcacgatgtagctgaggtcagggggcaatgctccgttgttggcagctcgagcagcctcactgttggggtatggttttgggaaatagtcgaacagcttccctggccgcatgaacatctccccattctcattggggccgtcttgaacctccacctccgcagccagctcc

SEQ ID NO: 218244 - DNA, 762 bp, Homo Sapiens; identical to SEQ ID NO: 55685

SEQ ID NO: 218245 - DNA, 763 bp, Homo Sapiens; identical to SEQ ID NO: 51116

SEQ ID NO: 218246 - DNA, 842 bp, Homo Sapiens; identical to SEQ ID NO: 44365

SEQ ID NO: 218247 - DNA, 821 bp, Homo Sapiens; identical to SEQ ID NO: 54040

SEQ ID NO: 218248 - DNA, 781 bp, Homo Sapiens; identical to SEQ ID NO: 52584

SEQ ID NO: 218249 - DNA, 712 bp, Homo Sapiens
ttttttttttttttttttttttgcatttaaaaacttcttttattcaagacttttattcagaacttttatcacaaatgtgtcaaaagcacttcaaccctgtttgggggttcatgggggaagatgggggggcggtcagaaccaaagaagagccaggagcaggagaagaagtcatttaagtttttattaaatatactctcttggcacaaatctttaaaatatataaacattagatataaacagtgtcttcatggcatcaaaatataactccagaccaagaccagtgaccagcagggaggcgagtgaccgcagagcctgagggcctggctgtgtgcaggggtgggggacagcactgtccccaactcctgccgggtcccactcagctaggagccatctccggggagacacactggggtcagcagggactgggggaccctcccacctaccccttgtctctcctgcctagcctgtggccccaaatccactcatttggtctcacccacctggggcagacccccaattcctactgctgttgcatgcttgtgggagttgggtgccctcccatctccctgtgagggttgccctgcctctcctgccaagtttaagtgctgggtaagggatacccacacagtgggacagcccctcacagccatcacaggctgcctgggcctctggggacaagatcagggatggctggtggccacatgcaaggaag

SEQ ID NO: 218250 - DNA, 736 bp, Homo Sapiens
tttttttttttttttttttgcatttgccattcttccttaacaagaacatggtaactgcaggtatataacaggaaggagaccagtgggggctagttccaaagacatgagcctaataaggaatggaaaagccatttcttctccaggaaggtaactgccatttttaacatttttatctcatttccccaacctccctgctatggaccatgttcagatcttcatgagcctgggctcttccaccagcttctcagcattgctctccaaggtgtggtccctggatcagcagcatcaacatccccttggtgcttactggagatgcagaatctcaggcctcgtgtcccaggcctcctcaatcagagtctgcacttcagccagactccccagtgattcctgcacccaatagagactgggagtcctgagagttgtcctggtgctgtggagtccaaagttcctgaggctcactgcataacagccaatgattcacgagacaaaaagttagagcaagaaaagcatctttatttggagagccagcaagtcaggaagatactggacccatgtcctaacgaaccatctttaaaggcatgaatctcaagcttctttgtacattgaaggggtacactgaaggggaacaaggaggagactgaggtgaggggggtggctggtgaccacagacacttgggcatcagcaggggcccaaggagattgcaaaactttgtccttgctcaggtcacagcgctcc

SEQ ID NO: 218251 - DNA, 830 bp, Homo Sapiens; identical to SEQ ID NO: 48733

SEQ ID NO: 218252 - DNA, 826 bp, Homo Sapiens; identical to SEQ ID NO: 41244

SEQ ID NO: 218253 - DNA, 691 bp, Homo Sapiens
cccgggataaatttgctgctatttatttgtatgtttttctactgtagtatgctattgatttctgaagttataatcataatttttattttagtaatccaagctaaatgggcaaccagaagtaatatctgctagggtgcaatccatcagcattggttcagtgcatatacataagtaaaccagtttaaaaaaattttactaagcaaaaggtagtagcaatattgctagttaaagattaccattttaggggaaagttcaaaggtttaacttcctgaaaccttttaaacttttcagtgcaagaatgaaaatgtttgaaagccttgttaagctcataaaagtttcatttaaacactgtagagtttcctacctttgttgtgtaaaggatatagaaaatatttttctatggacagaaggttgaaactgttaacttctttaatttcattgtttaaaggagataaaatgttatttgtgtgtctttcatgctgtaaagaaaatgaatgtatctttcaaatgtcattagaattatggcttgattctaaggatactctatttgttttaaagtctacacgggattgaaaagaaagggaagagtattacacttcattgtacaaaatgtaattttagaagaaaaactaattttcattataaacaagagcaatcattgaagcattttcagatataatgtacattcttt

SEQ ID NO: 218254 - DNA, 750 bp, Homo Sapiens
aatgagaaaaattagtctatcattttaagagccaatatggcaaacactttcaaatactgtatattaggaaactgttttggtattcttgatggaaaaaaatgcagcggaaatgtcattatgaacagatgttaaataggaaattattacttgttaacttcttacagcagtagtaccttctttaaaaaaaaaaaagaatctgcggtatttttttaaaaaaaaagtttactgctgtagtgtgaaatattgtctggaaagggatggtttaaatattaccatgatgtagttgaaatataaaataggatttggaaccttattgtgataaatatttatatatgatgtatgtttgtctcccctctccaaagtaaggaacccagctgggcgtggtggctcactcctgtaatcccagcattttgggaggccgaggtgggtggaccgcttgagtccacgagtttaagaccagcctgggcaacatggtgaagccccatctctacaaaaaatacaaaaaaattagccgggtatgatggtgtgtgcctctagtcccagctacttgggaggctgaggtcagaggatggcttgagcccaagaggcagaggttgcagggtcaagatcgcaccacttgcactgcagcctgagagagagagagccagaccttgtctcaaaaaataaaaaataaaaaaataaaaacaaaataaggaatccttttaaagcatgttgagaaagtattttttggtatgaatgggtgacgggcct

SEQ ID NO: 218255 - DNA, 884 bp, Homo Sapiens; identical to SEQ ID NO: 40618
  misc_feature (798)..(798): n is a, c, g, or t

SEQ ID NO: 218256 - DNA, 769 bp, Homo Sapiens
cccttttttttttttttttttttttttttgggtcaccttaaaaaaaaagagagtattttattcaatttaacatataagcaaacatatgttcatttattttccttttgttgctactctcctgaactctctcactcatttgtttcagtggacaggaaacgcaccatatccccctgcctggatgggtgtttttggagaagcacaagcatatagactaaaatcctctgtttggaaaccagcccgattcaaggagggttctgatgcactgcggtgaatttttggcaatgagcgggccagcagctcaatagaggcgagaatttggggaaagagtggtctctcatctcttttctttttgaggcactctgccattaatctcttcatggcttttggacagttactccgtaccttactgagatctggagacaggtatcctcgtcccaccataaaaattatctggtccctgttgttgatgtttgaataaggtaactgtccagtcatcaattcatacagaacaattccaaatgcatatacatctgactgaaagctgtatggatttttatcttgcattctgatgacttctggtgccatccacaaaatggatccagacaactgttcaaactgatgggacccactccatcgagatttcactgtagctagaccaaaatcacctatttttactgtgaggtcttcatgaagaaatatattattactcttgaggtctctgtggatgattgacttggcgtgtaagtaatccatgccctgtgcagtctgt

SEQ ID NO: 218257 - DNA, 717 bp, Homo Sapiens; identical to SEQ ID NO: 46112

SEQ ID NO: 218258 - DNA, 823 bp, Homo Sapiens
ccgggatccatggcgattgtggtatttcatcaagcagacattggggaatatgtgcggcatgaagagacgttgacttaaaacgaagccattccaaggacagacggctgtatggaaaggccgagctttgtttcctgtgtttgtgtggactccaccatcatgttgaattttgtcaacactctgacctcttcagggacttcttatttactgtactctctatcactgacaaatgcaggctggattcttattatatacagagatggctcaaaaatggggtttcagatctttgtgacgaaatagaatactgtttcatatttgaatcagagggcttcttgttctgagaaataggttcaaaatcattggaactaggaacaagaatagcttattgttatctgtgataacactgttttctaaacacaaggattttcttttttattaatatgcaacatagacattgccataacagaataataaaccacatgtggggttttaaaaatgaaatttggctaataggagcaattcagctatttttctatacagtaattggtgtgtggtatagaagaaaaacgggttcaaaccccacttctgccacctaccagctatatggccttgaatgagtcattcagctttaataaggttcattttcttctgtttaaaaagacacaaaacttgaaaatcagctttggccatctacctgagaattagaaagtctgatttttggaattagaaatcatgattgtaggctgggcacagtggctcgcgcctgtaatcccagcactttgggaggccaaggcggacggatcacttgaggttaggagtttgagac

SEQ ID NO: 218259 - DNA, 779 bp, Homo Sapiens; identical to SEQ ID NO: 54657

SEQ ID NO: 218260 - DNA, 797 bp, Homo Sapiens; identical to SEQ ID NO: 40324

SEQ ID NO: 218261 - DNA, 851 bp, Homo Sapiens; identical to SEQ ID NO: 40637

SEQ ID NO: 218262 - DNA, 883 bp, Homo Sapiens; identical to SEQ ID NO: 40826
  misc_feature (798)..(798): n is a, c, g, or t

SEQ ID NO: 218263 - DNA, 446 bp, Homo Sapiens
tttttttttttaagtactctccaaagagtaaaaaaaaaaggaacgaatatctcaggctacggttattgtttcctcttttcaagaatgtttcagcaaggcccagaaactgaagtgcctccatcgtagggttcctggcatcctgattagtcacaccttgaaacagtcataatcagaatttagtgagcgttttctaggctccagacactgtctttagaattttgtgtaatactcccaaagattctataaaacaaatactgctcgccatttttaagcattaagaaccgaagttcagagtggttaagaaacgcacccaggggcacatggcatggagagtaaatggcagaatcagaatgtggacacaaatttgtttgggtctgaatcctgtgttcttttcattgtatcgagtgtctggcctccttggggagggaggagaactgggctccatt

SEQ ID NO: 218264 - DNA, 509 bp, Homo Sapiens; identical to SEQ ID NO: 59941

SEQ ID NO: 218265 - DNA, 451 bp, Homo Sapiens
  misc_feature (447)..(447): n is a, c, g, or t
tttaacacggtttggggagagctttataacttctgaagcatttcttggcttctacaatattttcatggtcatcatttcatttcataattctcacagcaacacccatcaggcagatggggaaactgagtcacgtggcagtgcagtgtcttgcccagtgtcctataatcagtgccagggcccagggatacctccacctgggactgggcagggccctgggacacaccgaaagcacagaggagcagaatgcctgtcttctccatgagcttctggcacagcagcttgcatctgcacgtgttaaacagaacctgctgggcctgagttctcagggagcaggcaaaacaggtgaaccaggacacacatcccagcatgcactgagtcaggcctagggcttggtcattgttgcggacaggcaacaggatgttgtcattcatgtttggggaggtgtcnatct

SEQ ID NO: 218266 - DNA, 497 bp, Homo Sapiens
catttccaggctgtttggcacacagagacatcaaaaaacagacagccaatacatttagaacaagcctttctccgagggcggcccatggatggactggcctcccagacctcccaggtggctcatcagtggggggattgcggggcagcgaccccatcaccgcacccctcagcagtgcctgggctcacctttccacccacctccccacacagccagaggcaggccctcagccgcaatcagtaacattcagtgaggacatgtgtttatcatgtgttgtgggtgggtgcagtgagttctctattcaggtaggagtggaagctggctcagggctcatccagtccaatgtcccacaggtatagaagtgccctgataaaatctcagagctggctgtccagtcaagatttgcatacctccagaaatggggctcttactacccctcacagtagcccattctactgttgggcacctccaatggtcagcattttctttccggcagcctc

SEQ ID NO: 218267 - DNA, 554 bp, Homo Sapiens
tttttttttgacctttcctttttttgaccctctaggcagcctagtttatggcaggaacatcatcagtgaggtcccagagaaaggaaaatgattgattacagagatagctattatttccagccactatatccaagagcgtatcagatcactcaaagcacattttatcaacactccccctgtgacaatctagtctttactggagttaattaaagcaattaattcccttccctttcaaagcagtgtgattacataaatagataatttcccaatccaaacccataaagcaagtgatttctctgcatgttcctcagtgtgcaaagcacctaactgaaccaaattgtcctttttctaaatttgaccttcatgaaattctccagcaactttttctgctctgtcttcctatctggttggatggcagaaccacatctccacatggacacaggactgcaagattaataaagcatttcccgcagcaaagatagataatgcctaaactgtaatcacaacgacaggagtagagtgaggaggaaaggagaatggcggtgcctgctctg

SEQ ID NO: 218268 - DNA, 346 bp, Homo Sapiens
gtttgcctagaattgtatttgattgtaatcaaatcatgtgtcacatctttttttcaatttgtgtgattattttgtggcccaatacatgattttttttgcgaatatttcatggacttaaatagataagtcctctctctacacataattaaatggagtgtgtgctttgcattattcagttcctttattcccatccttgcttttgtctgcagatttgtcctattccagaatgggtatactgaaacttgggtaagggtgaggccagcgttctgggtggcccaggctactatcccacccgtgccacagaatccacacagaggcccagcggcggcactgggtggtggggaag

SEQ ID NO: 218269 - DNA, 503 bp, Homo Sapiens
gcggccgcggcggtccagccaggggctcctaccccggggagctccctccgaggggatgttagacacaggtctgtctacacattatttcgggttctggaggcgcctcgacatacgggaatgacacatccagaaatgcaggtgttccgatctgccggatgagtcagaagcagcggaacgaatcgtattcactctcgcctcatggtcctcccttcacagacattagttgcggcttcttcctaacgctttctctgactcagtctatagaaagaaaaaccagattcatgtttttggggaaaaagaaaatgcaagagaaaaggatggagggaagaaggtgaagctgaatctagcagcacttttactctacctctttctgccggagtccgaggttctggaaaacaaggcgtctgctttgctaggtgtattggtttatttattttgtttattttttttaaacctttcctcttggttaggcgagaggtaccccgaaatttttcagagtcttg

SEQ ID NO: 218270 - DNA, 524 bp, Homo Sapiens
gctgaccagttcatttaatctttacaacaaatctgggaggtgagccgcatttcaccagtgacggtaatggaggccctgtgtagctcagaaacttgccaaaagcaagcacaaggacccacacctattgccacaactagagggagctacaatttctagggactactggagtttaaaacagaatcgaggccctgtccgaacccgcggaagaatcactgataagtcagtctcctctgttcatgtttcataggtgaaacgtggataatcacatgcacccactgaggcccgttaagaaaagccgatgagagacaggagaaaatccaagtgccttgaacatcttgaaggccccttttgctcaacacccagtccctggatgtggctggggttcggagttagaaagcattcactaagcacttactctgggccaagaacatgcactgcctcattaactcttctctagagcccacaaagccagttactgtgctaaaaagtatttcacttgacagttcttttcaatgaaataataa

SEQ ID NO: 218271 - DNA, 500 bp, Homo Sapiens
ttcccctctgtaaagtcactttcttctgatggccagtgtcactatgatgtcagtgaggtctggggatgaggacagtgtgtcctgaaattcacaggactgactcctcaccccagtgcacgaggattcctgtggcatcaggtgctgctgtacctggtgtaggagcctaatcattgaaccattgtgttactcacattccatgtcacagaacatatcagcctcaagaaggatttggtggaggtggatttaccactggttttacaaaggaccgtgtaaagtcattgaagttgtgaaagtctattttttttcctgtaaatctattttttacagaatataagaaacatcaatgacctgatctgtccttcctcctccttcccgcttcccccaaaatcacattccagtttttattgtctttgtgtccaaagtaaactaggtgacttatttgtataaaatgttattttgccacatgagacagtaataaaagaaagattttcacagtaaaa

SEQ ID NO: 218272 - DNA, 420 bp, Homo Sapiens
cactccagagactgctgaaaagctggcccgtgacctgaaggctgtcaagtatgtggagtgttctgcacttacacagaaaggcctaaagaatgtatttgacgaagcaatattggctgccctggagcctccagaaccgaagaagagccgcaggtgtgtgctgctatgaacatctctccagagccctttctgcacagctggtgtcggcatcatactaaaagcaatgtttaaatcaaactaaagattaaaaattaaaattcgtttttgcaataatgacaaatgccctgcacctacccacatgcactcgtgtgagacaaggcccataggtatggccccccccttccccctcccagtactagttaattttgagtaattgtattgtcagaaaagtgattagtactatttttttttgttgtttcaaaa

SEQ ID NO: 218273 - DNA, 577 bp, Homo Sapiens
agaacctgtagcaacatggcagaatatccaggctgctggcacccaaaaagcctgcactgcccaaagtcttggaaacttgctggatatgatgtaccgggagccagcacgatggtcctacacattccagacattttcctttttgagccgcctgaaagtacagctggagcccttccctgagaaactcttacaggccaggaagccagtacagatctttgagaggtctgtgtacagtgacaggctccactttgaggctctgatgaacattccagtgctggtgttggatgtcaatgatgatttttctgaggaagtaaccaaacaagaagacctcatgagagaggtaaacacctttgtaaagaatctgtaaccaataccatgaagttcaggctgtgatctgggctccctgactttctgaagctagaaaaatgttgtgtctcccaaccacctttccatccccagcccctctcatccctggagcactctgccgctcaagagctggtttgttaattattgttagactttgccattgttttcttttgtacctgaagcattttgaaaataaagtttacttaagttaaaa

SEQ ID NO: 218274 - DNA, 551 bp, Homo Sapiens
aaaactcgaggtccagcagcgcgatggcagctcagcggctgggcaagcgcgtgctgagcaagctgcagtctccatcgcgggcccgcgggccagggggcagtcccggggggctgcagaagcggcacgcgcgcgtcaccgtcaagtatgaccggcgggagctgcagcggcggctggacgtggagaagtggatcgacgggcgcctggaggagctgtaccgcggcatggaggcagacatgcccgatgagatcaacattgatgaattgttggagttagagagtgaagaggagagaagccggaaaatccagggactcctgaagtcatgtgggaaacctgtcgaggacttcatccaggagctgctggcaaagcttcaaggcctccacaggcagcccggcctccgccagccaagcccctcccacgacggcagcctcagccccctccaggaccgggcccggactgctcacccctgaccctcttgcactctccctgccccccggacgccgcccagcttgcttgtgtataagttgtatttaatggttctgtaacaataaaaa

SEQ ID NO: 218275 - DNA, 489 bp, Homo Sapiens; identical to SEQ ID NO: 45930

SEQ ID NO: 218276 - DNA, 443 bp, Homo Sapiens; identical to SEQ ID NO: 52673

SEQ ID NO: 218277 - DNA, 500 bp, Homo Sapiens
gtggggcctttgtgagctagaggctgggagtgtctattccgggttttgttcttggaggactatgaaagtgaaggacaagacatgagcgatggagataagaaaagcccagcttgatgtgaatggacatcttgaccctccctggaatgacgccagctctgggggcagagggaggaggagaggggaaggggctcctcacagcctagtctccccatcttaagatagcatctttcacagagtcacctcctctgcccagagctgtcctcaaagcatccagtgaacactggaagaggcttctagaagggaagaaattgtccctctgaggccgccgtgggtgacctgcagagacttcctgcctggaactcatctgtgaactgggacagaagcagaggaggctgcctgctgtgatacccccttacctcccccagtgccttcttcagaatatctgcactgtcttctgatcctgttagtcactgtggttcatcaaataaaactgtttgtgc

SEQ ID NO: 218278 - DNA, 388 bp, Homo Sapiens
gttgccagagacgagtatgcccatgctccctctacctcactgccaccactcctgctgttaggagctgagtgtgtctccctaaaatttctatgttgaagtcttaacccttggtaccacagaatatcactgtatttggagatggggtctttagaaaggcacttaaattaaaatgagctcactgatatgggccccgatgcaatataattggtgtccttataagaaggggaggttaggacacgcaggaaagaccacatgaaggcccaggagtgggagggggaatagccatcgacaaactaagggggcctcagaggaaaccaaccctgctgacacctcaatcttagactctggcctcaaaattgtaagaaaataaacttctgtcttttaagcc

SEQ ID NO: 218279 - DNA, 500 bp, Homo Sapiens; identical to SEQ ID NO: 42321

SEQ ID NO: 218280 - DNA, 488 bp, Homo Sapiens; identical to SEQ ID NO: 51000

SEQ ID NO: 218281 - DNA, 374 bp, Homo Sapiens
  misc_feature (102)..(102): n is a, c, g, or t
  misc_feature (239)..(239): n is a, c, g, or t
gcctgccccaccccctgcctcttttggttgttgttcttaatctcctctccatgtagttcccagtgggcaagagcctttgaaaatgcaggattctaaacactngtgcttgcgtttgaagcctcgcgtcactcagtcgcgtgggatgatgagtccgttgttgtctgccttggccgaaagatgaaaaaaagcctgaaccccaacccccagctggttgagagcaccctgcattctgcctcatntgtgcagttagcgatcacaggccttcagaagtacaacatcagctcagcaggaacgccggctccccgaggacccaggcttgacgattcaccggggatctcctggcgctgggctctccttggaagtgaggcctttat

SEQ ID NO: 218282 - DNA, 500 bp, Homo Sapiens; identical to SEQ ID NO: 45677

SEQ ID NO: 218283 - DNA, 407 bp, Homo Sapiens
atcgctgccaggaactgaccacctaggtggctgccaccccctctgcacaccatggaccctgccctgcgctccccaactcccccaggctccctgtccactgccctccctggtctggccccctcctccgggttaggggagcaaggattgggggtcgtgcagcccagccagcaggagggactgaggccctctaggaggaaagcccagagggagggggccctcattccttcagacccagttttcccccaccctccttaccccgctgggctaggtctccgccagggctggcctcagtttctcctcaacaggcctgggggcagcccttcccctgcctagtccccgcctgagtgccagccccccaccccgcctgccgccccctgtccaggttccctccccgccacagtaaataa

SEQ ID NO: 218284 - DNA, 503 bp, Homo Sapiens; identical to SEQ ID NO: 44476

SEQ ID NO: 218285 - DNA, 534 bp, Homo Sapiens; identical to SEQ ID NO: 47799

SEQ ID NO: 218286 - DNA, 530 bp, Homo Sapiens
tgcttgagcccgtgaaaggggaggcagctgaggagttgagcaggtgcttctcacctggtgttattgaggtgcaggaagtccaaggtaaaaaggtggccagagttgccaacccccggctggataccttcagcagagaaatcttccggaatgagaagctaaagaaggttgtgaggcttgcccgggttcgagatcattatatcttctctgttgagtcaacgggggtgttgccaccagatgtgctggtgagtgaagccatcaaagtactgatggggaagtgccggcgcttcttggatgaactagatgcggttcagatggactgagcttggatgcttctgaggcaagctgaagctttgggttctgactgacccaccctacaggactgctgaacagagagcccagtgtgactagggatcctgagttttctgggacaattccagctttaatcaatacattttgttaaatgtgccataaaatgagactttttacgcctttataaggccttagatgtaaataaactcacccaaacaaaa

SEQ ID NO: 218287 - DNA, 560 bp, Homo Sapiens; identical to SEQ ID NO: 49335

SEQ ID NO: 218288 - DNA, 501 bp, Homo Sapiens; identical to SEQ ID NO: 55905

SEQ ID NO: 218289 - DNA, 499 bp, Homo Sapiens; identical to SEQ ID NO: 2992

SEQ ID NO: 218290 - DNA, 423 bp, Homo Sapiens; identical to SEQ ID NO: 55989

SEQ ID NO: 218291 - DNA, 500 bp, Homo Sapiens; identical to SEQ ID NO: 44585

SEQ ID NO: 218292 - DNA, 593 bp, Homo Sapiens; identical to SEQ ID NO: 41562

SEQ ID NO: 218293 - DNA, 540 bp, Homo Sapiens; identical to SEQ ID NO: 42227

SEQ ID NO: 218294 - DNA, 500 bp, Homo Sapiens; identical to SEQ ID NO: 55063

SEQ ID NO: 218295 - DNA, 485 bp, Homo Sapiens; identical to SEQ ID NO: 33870

SEQ ID NO: 218296 - DNA, 343 bp, Homo Sapiens
tgcatgatagttacatcatgttaggcaagtcaactttggaaaacagttttccatcttcagtaaaggggtagaggctgggctgtaatttgaccagtatgtttatgccctcccattcccagggatgcccggaaaaagccttgcatttggatatcagccacagacacggagatactcaaagaagcattgtgcacctgcttccacccccacaggggttaaagggcaggagcccatctctggccgcgtcctctcctggcttctccatgtgtgtgtatggatggagtaagattgtacttgtaaactttaatattccccaacccctagacctgagcctgaatctcacccc

SEQ ID NO: 218297 - DNA, 556 bp, Homo Sapiens
ttttttttttttttttagtatgataattgcggagtttaatgaacaccttgcttcacttcggggtctcatctgggatttcggagtgaactgtgtccaaaggctgccagtggcaattcatgagggagtcgtagagttcttcacttttcaccataaactcttggtttgattcctcaatattcaaatgaagatgtggatcttctagtgggtcttcatcttggttttcagctaaaggtgtggtttccatctttaatttcactcagcagcttcccaacaggggacacccagcaggatggcaggcaaatggcacaagggggtactttaggcttaaccaaagttccagctgtgtgttcaggggtctcatgcgcagaaaaacagtcctttccatttccatccactgcacagccatagctgtggccagaaagaaggtaagagccgtgctgtcgcgcataccagttgccatagcggtaactctggctgggctggaactcctgcttcactctaatagcagaggggagacctattaacgacagaaagcctcgttccgctggtccctgaa

SEQ ID NO: 218298 - DNA, 386 bp, Homo Sapiens; identical to SEQ ID NO: 57869

SEQ ID NO: 218299 - DNA, 410 bp, Homo Sapiens
tttttcatgcaaaaattatttattgtatacttacccaggcattggggatacagccttaaaaaagattacgactctgccctcacaaagcttgcattcttgagaagggagactgataataagcaacaaatccaaaacattgtttcagacagtgatgagtgctgagaaggaaataaagcaaggccaagtctttatagagtgtttgtggctattttagatgtatggtcagacaagggttctttgcagaggtgacatttgagccgagacttaaatgacaagatggaatcagtaggcaaagcactaagcagaagaaacagttcttgtgcgaggagcgagcaaaaggaattattaacaatgatggatggaacttggcgacttccgggaacagcatgaaggcctttgttaccaaatat

SEQ ID NO: 218300 - DNA, 459 bp, Homo Sapiens
atcttcatacatgcccagttcctggaacagcttcggggccacgttcttgaggttggcggagatggctttcctgtccctagcctccctttggtggcattttcagagttaccttgtacttattgacttcctctgcgtgtccattgctttatacatattgtctcaaatcctcttgacaaccatacaaagtagggctcattccccttgtttacagatgagaaacttggggctccgtgaggttcgataaatggctcaagttcacacaggtggtggatgatggtgacagggagaaaccaatacctcgattctaaagcccacaggcttcctgctccccgatcccacccctgagcttgggcctatcttcctcctggcctccctatcaaaggcaactcgtagaagaagcccctggtgataaagaaaacacgattcctcctggagctgagtggagtttacacttcaaca

SEQ ID NO: 218301 - DNA, 477 bp, Homo Sapiens; identical to SEQ ID NO: 59893

SEQ ID NO: 218302 - DNA, 513 bp, Homo Sapiens
ttttttgagatggagtctctctgtcacccaggctggagtgcagtggcaccatttcggctcactgcaatttccgtctcctgggttcacgccattctcctgcctcagcctcccgagtagctgggactacaggcacctgccaccacacccgaccaattttttgtatttttagtagagacagggtttcacggtgtgagccaggatggtctcgatctccagacctcgtgatccacccaccttggtctcccaaagtgctggattacagccatgagccaccgcgcccagccgaaatttattttttgatatgtgtactttcttactttactgggacacaatcacagatgacctatgtggctgatcttaggtccacaccctcccagaagtcaggttttaactttagcctctagttctggaagtttctggcctatcatagatcacagatctatcatagttcgtatttttaggctgtccagtggccaaaggacccaagcaaacaaagacactaccattagcaag

SEQ ID NO: 218303 - DNA, 608 bp, Homo Sapiens; identical to SEQ ID NO: 61902

SEQ ID NO: 218304 - DNA, 589 bp, Homo Sapiens
ggtattgtgttaagcagcctgaacacactaagacaccaaactgataagaatactcactttatcccagagatcttcaaactcttcttgtccaaaagacccatagactgcccaaaaaaaaggaaggctgcagttgagtcaaatcatgtcagtgtctcagaaacacacctaactttttacaaaaggaaacaagagtctgatgtgagtttgcctagggggcagtgcacacagagcgtgacagtgaacccatccacccacccgccacccagaactgcagttctgaagcccactgcattaactcccatccaggacttcccacggctgcgccaggtgggcaggagtgactgaagagctctgcccagagcaggggcagttaaaaaggcacaggagacaggcctttcctatgcatctgtgaaacctcctcctcctcttctagcacaaataaggaaaggcaccacaccccggttacaagcaaggaccggacggggcgtttgccatcactgaggccacttacaggagtttcatagatgctaagcgtatccagggtcattcttgcaaagaatttgccatcatggctccaccttagaaaaac

SEQ ID NO: 218305 - DNA, 510 bp, Homo Sapiens
cgagaggcgacggcgggagcggcggtgatggacgggtccggggagcagcccagaggcggggggcccaccagctctgagcagatcatgaagacaggggcccttttgcttcagggtttcatccaggatcgagcagggcgaatggggggggaggcacccgagctggccctggacccggtgcctcaggatgcgtccaccaagaagctgagcgagtgtctcaagcgcatcggggacgaactggacagtaacatggagctgcagaggatgattgccgccgtggacacagactccccccgagaggtctttttccgagtggcagctgacatgttttctgacggcaacttcaactggggccgggttgtcgcccttttctactttgccagcaaactggtgctcaaggccctgtgcaccaaggtgccggaactgatcagaaccatcatgggctggacattggacttcctccgggagcggctgttgggctggatccaagaccatggtggttgggtgagactc

SEQ ID NO: 218306 - DNA, 636 bp, Homo Sapiens
ttttttttttttttttttttttttgggtggaataaatttatttcatctgtctgtaaacaaggtgtttaatagttatggcatttttttaaatgcatattaaatcagatgagttagactgtatcccagatgtaacaaagtgcagggaaagaaatggacaaatcagcaacaagatttgtttttaaatctgtacattatccacaaggcccaaacaatagaagcaaatactagaatgtccctaaagtagtgccattcgaaagaaacccttaataggtcagttaaaatccatctcacaatagcaacagttcattttaacaatagtatggcacagaatacatatgaaaaaaattcatcacaagacagccaagtccacaataatgcaacttcatataaaaactcaagctgcaaataaaaattggtcctatgaagaacaaactggacacactccagatggttatgttgggatacctaatgtccataatggcagccttttacaattttactaaagagtagagctggtgtgcaaagaaaaaggaagaaaaatctgagctattgcaatgatggaatgtccctggggattcaatcagtatggttactgtaaggtcatgggaggaagtgctttttgctcttgttttgcca

SEQ ID NO: 218307 - DNA, 478 bp, Homo Sapiens; identical to SEQ ID NO: 60003

SEQ ID NO: 218308 - DNA, 730 bp, Homo Sapiens; identical to SEQ ID NO: 44611

SEQ ID NO: 218309 - DNA, 521 bp, Homo Sapiens
tttattatttcacttattatttattttatcttccaatttcctcttgccagactcccatccaaagagtcatagcagccttcttccaccttctacatgaaatacatccccacctgaacaaaggcacacgacaggaggaggggaataggacttcgcaaactggacacggcatcgttcagatctggactaggttccgttgttactggtttcacagttacaggcttcggatggtctgcacgtgctgtttcaagactaatggtagtctctattgcttctgttatgtccttatccaacctgttcagcctgtcctctgactcaaatatggagtaatcaatggtgaaatctgcactaaagtcatcataactgggggtgactgtataataatagaccacctgataatattcatcctctcccagtctttcttcatcctcatattcttgtcccaggataagtggcacagcaaagatggctacaaagaggacatccattctggattctgcactattgctgtgaaagtaaaaaag

SEQ ID NO: 218310 - DNA, 670 bp, Homo Sapiens
ttttttttttttttttttttttttttcagcgagaactctggcgtctttttatcttttaactctgaatcatccacaagttaatgctccacactacttcaattataggatgaaaacagctttgctttcccagtctccatttttctttgcttattttcttcatgtttatctgagtacatggacccagaacattcactgtattatcatgaataattcagcatcttacaagtcactctccaagcaggacagattaaggcagcccggtgtggacataatcacatctatggctacaaggaacacgcaacagaaaatcagattccaaccaagcaaaaggctgcttgtttttttttttctttgaaacacagtctcgctctgtcacccaggctggagtgtggtacgcgatttcagctcactgcaacctccgcctcccaggttcaagtgattctcccacctcagcctcccaaatagctgggactacaggtgcacaccaccacacctggctaattttttgtatttttagcagagatggggtttcaccttgttggccaggctggtctcgaactattgacctcaggtgatctgcccgccttggcctccctaagtgctgggattataggcgtgagccaccgtgcctggcctgcttggttaactttattcttccaactttaccagc

SEQ ID NO: 218311 - DNA, 657 bp, Homo Sapiens
ttttttttttttttttttttttttttatttaaagaaagaaatattattgattctatagaaaaccatttaccaactgaaaggacacgaagtctagctccggacaaaagctgttagaggcccaggctgtctgcctgcggtccttcctccggccagagtggaggccccaggctgctagcacaggtggaaggctggggcccgggggcgggtgctctgccgggggctcctccgtgcttctctcctaagttctctgcgccccaagaactcgaggttgtgccttgctctcggcggccgtgtcctcctcctggcgtggctgcgtcccagggcgcgggtgggtttggtgaatgtgggtgtgtcagcgtggcagccacgtggaagcagggcatgtagcaggccaggccacgggcttgcagctcctctgagggtgtgcctggccccctctccaggggctgtgcaggcagcccatccaccccagtggagttcccacggacgcttctgctcatggtccaaggctgtgttgtgtggtcattctcgccctcccttttcctctctcctcctgccccctccaagaagtactgactggtctcctctatcgtgtttgctgatccacagtgttgggcacaactttgacgtttcttaaaaaaaaaatttaaaaaatgc

SEQ ID NO: 218312 - DNA, 717 bp, Homo Sapiens
ctggttgaccacagtggaggagaggcagcagtttggggagttgcctgtgtctgaaacgctgaaagctgggcagctccacactcgagtcagtcgctgccaggtgtgtatgaaaagcctgtagggtggcacctgccactctgccccttgccctcccctgcccctcacaacagtcacctcacaaacctgaatggtctgaagaaggaaggcctgagcccctttgcctgtcaagttgtacattggagtctcatttgggctagactaccggacactcgtcaccccagccctcgggtccatagagatgagcccaccctgctgagatctgctgtcctgtttctgtcaagctggtgctactgtttgatttggatgattgtgtgactattcatggctacctcagaaagatttgatgggccacaactgtcttagactgctagctttctccttaccgtcttgatcggaaagctcttcctaatcgctaatcagtcatttcttcatgtacagaggtcagcacacattatttggcttaaaccagaacccagtgtttccacacttaaattctctaaccgaatattcatggatggctcaagtctgcacagagcaagtcctcactcttcaaggaggcccactgtgtctaggcaggcaagagaattgaaatgaggtgccacccagtagcccagagtgagctttagctctctctagaatgagcaagactgggcccca

SEQ ID NO: 218313 - DNA, 691 bp, Homo Sapiens
ttttttttttttttttttttttttttttcactttgcaaactctgtatttatttggattaaaaagctttagatgaacaacaaaaaaaagatacatacatgttataagactagttaccacgtaaacctcagatgatatgatacagaaattagaataaaccaagttttaatcaggtatgaaaacattcaagctcaaaatcatcaacaccaatttggggattttacagaaataggtgcccctctcaattcttcctcataggaaggggagagtggcttaaaaaaaaaacaacaaccaaaacagttaaaggccttttaaatcagttggctgacaaacatactgttttaaacctacaggttcccctcagtccccccgtttgcaatataaacaattcttctccacaggaacttacattttgaaaacatttaggccattatactttctaagccacattactacagttcctaaaacttatgaaaaaaaggtgtatagtttacttgtactttcttgagtcaatttttttttcttttttgaagatggctgacctcaaatcttatatcctaaatattaacgatatcccccaagttaatatacagaaaaacatgattctaaaataaatacacaggctttttaaaaaaaaacttaattagggcctgtctagtgatgccctgggccggtgctgcactgctttaggga

SEQ ID NO: 218314 - DNA, 681 bp, Homo Sapiens
agccgtgcgtcccgctcgagcgccagcgcccgcgcccgcgccccccgatccgcttcccctttctccctcctcagttggccgagtcgtcccgcgcgcaccgcctccgcgcgcctatgagaatgaggtggtaacgggcccccggatgaccccgcgtcaccactgtgaggcctacagctctgccggggaggaggaggaggaggaagaggaggagaaggtagctacagcaagctgggtagcaggcagatccaaaggatatcatgaagtttccagggcctttggaaaaccagagattgtctttcctgttggaaaaggcaatcactagggaagcacagatgtggaaagtgaatgtgcggaaaatgccttcaaatcagaatgtttctccatcccagagagatgaagtaattcaatggctggccaaactcaagtaccaattcaacctttacccagaaacatttgctctggctagcagtcttttggataggtttttagctaccgtaaaggctcatccaaaatacttgagttgtattgcaatcagctgttttttcctagctgccaagactgttgaggaagatgagagaattccagtactaaaggtattggcaagagacagtttctgtggatgttcctcatctgaaattttgagaatggagagaattattctggataagttgaattgggatc

SEQ ID NO: 218315 - DNA, 744 bp, Homo Sapiens
cgggatgaccactatggaattccacagcgtgctctgcggggtcactcccactttgttagtgatgtggttatctcctcagatggccagtttgccctctcaggctcctgggatggaaccctgcgcctctgggatctcacaacgggcaccaccacgaggcgatttgtgggccataccaaggatgtgctgagtgtggccttctcctctgacaaccggcagattgtctctggatctcgagataaaaccatcaagctatggaataccctgggtgtgtgcaaatacactgtccaggatgagagccactcagagtgggtgtcttgtgtccgcttctcgcccaacagcagcaaccctatcatcgtctcctgtggctgggacaagctggtcaaggtatggaacctggctaactgcaagctgaagaccaaccacattggccacacaggctatctgaacacggtgactgtctctccagatggatccctctgtgcttctggaggcaaggatggccaggccatgttatgggatctcaacgaaggcaaacacctttacacgctagatggtggggacatcatcaacgccctgtgcttcagccctaaccgctactggctgtgtgctgccacaggccccagcatcaagatctgggatttagagggaaagatcattgtagatgaactgaagcaagaagttatcagtaccagcagcaaggcagaaccaccccagtgcacctccctggcctggtctgctgatggc

SEQ ID NO: 218316 - DNA, 663 bp, Homo Sapiens
attgtgtccagatctggcaccctgacttatgaagcagttcaccaaacaacgcaagttggattggggcagtctttgtgcgttggcattggaggtgatccttttaatggaacagattttattgactgcctcgaaatctttttgaacgattctgccacagaaggcatcatattgattggtgaaattggtggtaatgcagaagagaatgctgcagaatttttgaagcaacataattcaggtccaaattccaagcctgtagtgtccttcattgctggtttaactgctcctcctgggagaagaatgggtcatgccggggcaattattgctggaggaaaaggtggagctaaagagaagatctctgcccttcagagtgcaggagttgtggtcagtatgtctcctgcacagctgggaaccacgatctacaaggaatttgaaaagaggaagatgctatgaaagaaaaaaaaaattcctaaaactgtggaatggatcacgtagacatgtaacccagcagcagtttgcttctgttgtccactgattaatcagcctatgtgcctgacactggtcttgcagtacaactggaagccaaaacaaggtggaagatgtcctgaattaagacgttttcaccacattgtattacagagacagccaataaatctactatttgat

SEQ ID NO: 218317 - DNA, 777 bp, Homo Sapiens; identical to SEQ ID NO: 41283

SEQ ID NO: 218318 - DNA, 684 bp, Homo Sapiens
ttttttttttttttttttttttttttcaccaatatttattaaaggtattttaaaactcaggttgatctctcatcttaactgtgattggttcaattttaccataccgaaagaataaattcatttgagcttttacctacgcctttgctttttgttaaaggaagaattcaatgcaatgtgttcagaaagttacatttaaatcgttaataaagagaaaaaggaagagaaagagaggacaccattccgacacaaacgtttatgtgattttagccattacaacagtaattcagaaatatctcaaatgttacattgatgtcatcaatattacaaaaaaggaaaaaaaagtgacaggcaacagtgaagagcaccagagacccagcgcacacctaaagtagaccatgcttctttccttccactgccaggttatcgtcccgggaagccccccaccccctcgctttcctcctccgctttccctaacccgtctcgcgggggcatctacgcctcgtcctcgccctcctcctcctcgaactccccttgttcgtcggccgtggcgtcctggtactgctggtactcggacaccaggtcgttcatgttgctctcggcctcggtgaactccatctcgtccatgccctcgcccgtgtaccagtgcaggaaggccttgcgccggaacatggccgtgaactgctc

SEQ ID NO: 218319 - DNA, 600 bp, Homo Sapiens
tttttttttttttttttttttttttttttgaattccagaacttctttattgtacataaaaatctgaatttcttaatatggaaaccaaaggtctgcaaaatgtactctcctagctcaggatcattatttattcctcttatttttggaatctattcttcttttattcaaggaccaactcaaaggtcagcttttaattaactcttatatccccatacacatatcctaaaggcagaattaactgctatatccaagctacttcttggcatatccttgtcagcctaaataacagagagggagactctctgaaagaaaatgatgtttattcaggagtaggcattgcaataagaatacaagtgccacagtaaactatgtgcatataccgggaggtcaaggaagacaacggtttttaaagcaaaaatgattgttttgagagaattatccttggctacaaggatcaataacaaggatgttgccagttggacattggacagggagttgctgggcaaatgtcctcataaaagtattttttgtgtgtgtcaggttgtgatggcctttgtgcaaggtgtggttttgtgcagtcttttaatgatagtcctcatta

SEQ ID NO: 218320 - DNA, 724 bp, Homo Sapiens
ttttttttttttttttttttttttcctggcaagtaaatgaacaagcttttaatacagcttagttatgtaaaatactgtacactgtaaaagatctagaaaactagagcttcaagtcatgttttaaaaaagccattaagcttaattgaaaaaccaagtatagagtacaaaactgcaacaagagccacagtgattccatggcatccagaccccgagtccttcatgcagagctgcagccggtcagtggaagtatcacattggtgtgctgtgtggacacaagcatgtctagcctggggagtgggttgggagctgcatttgggtcctgctgtcgcttttattcttgaacttgaacaggcggcagaatatcaagaaccaggtggtatgaaggattacgctgcaacattcccccctcttctaccccgcccttcaacctctggctattgttactttctgggaattgtgttgggttcttgtaagtttacttgttaaacactgtctgtagtagggccttacagcttggtctaaacggtggtgatttctctagctcgctcatgtactacagcctcttatttcactgtgtgctgcagatgagccatttagctgaccttctctcaccatccctgctgatgtaccccttgtggagatctcacatgtcagtcgcttgaaatattctggaagatcggcatagtcatctccataggagatgactttaatccccttgtccagc

SEQ ID NO: 218321 - DNA, 583 bp, Homo Sapiens
tttttttttttttttttttttttttgcctttcaatgaaatactacatttattgaggcgaaatcacattatttttagttcttggagtcaacaagtgtacacaaatgtttttcaacagttattgaaaataggagaccaagttgaacgtgccaaagagataccattcagttggattttctagggtcaacatgaagaaaattagagaagggatttacttggttggtttccatagcttgatagaccaaaaacaaaaaaactgccacaacaacaaacagcaaaatttttatccatacgggaatggagcgtcccttttttgtcttttctgacttgacatctgccaagggaacatacttaggaacatatttagatgaaaaagactcctccatcctgaaatcactgagttctaatggccggcctgcagcccctttgattggtctgcggcaactagcactaattcctgttggtgtagatgcttcataggggaacatttccttaagaatatccctttctactcttctttcctctgttttttctcccacttcagctcttgtcaatggtttctttggtgctcttctgggtatgtct

SEQ ID NO: 218322 - DNA, 742 bp, Homo Sapiens
ttttttttttttttttttttttttttttatgggcaatcaccacgggtttatgtaagtatatgaaaataaatccaagtattaaaaaacacaaccttaacatagcaaaaataaggccaccaggatcagaagacagtaaaatgagccacttatagggataggcaatcaaaagcagagtgtccagagggaaaagcaagctcagacgtggtttttacacattagtcttaacatctaatgcttcaagatagagagtaaagatttaaaaagtactaatattaactgaaaatgagctctgcattgtatttgtacttactgataaaaaatactcagctaggagaagtatgtttgcctaaagtcacacaatctgtgaggcactgagccaggattaaacccaaggccatctggcctcagtgccaatgtttttcagctccaagttcccagttgggaagagtaaaagggagacctgctcaaaatgcatcaatctcaaggtccttccagagatgcaggtcaacttatatgcttgagatgggaaaatgcatacagatcaactttactgaatctgatcaacctatcattccattttttgtacaagaactttacatgtagctttaggggtcatgctcaagccccttcttaaaatagtgtataggttttattttattgtttacttaagctttcttccacgtcttttatagaaaaattagtttatggccataattatgacaagctaatattagcagtttca

SEQ ID NO: 218323 - DNA, 792 bp, Homo Sapiens
ttttttttttttttttttttaaaatatcaaaaggagtttattaaaatacatattttgttatacataaaacttagaaatatttcaagatttacatacatcaacttttgcaatcttcctgctggtaaaaatacaaaacagcagcataagaaccagttactcatatactcaactatattcatgcatacttaacaaaatgaaaagttctcctaaaaactggcaagatacaaaatgtcaaatctaaaatgatatatatacttacgtttttagcattcttacagattacaaacccttaccaacattaatcttggcctactttaaagttgagtgatagcatgaactctgaaaagagaatgcatgggttttctcacagctatatggccttggacaagtcacttgtcagttccctcatctacaaaaagggggttaaaaatattcacatcacagaaatgagattaagtagtttaacacataatggctaacatttcattgcttacgtgtttttgaaactacagggcacttttatggtgtgactagtattttaagtaatcagtgcaacttagtatttttatctctagctgagtatgtgtctctccttacctctactatgccctttaaatgttctttgcccacacaatagttaattgtgctaggtataagtctgattctaataataaattgatataatacagtcatcttagtgttaagacttattctcagtaggtaagagttttagaactagttccctgaaaaagctgtatttatgatagtttatgtgcaatctgtagggccagg

SEQ ID NO: 218324 - DNA, 692 bp, Homo Sapiens
ttttttttttttttttttttttttttagggtttttactattttattatggcacacaggatagaggatggtacagttttcttacttcaaccaagtaattctcaaagcatccagctatttccatttggctaaagttactttttgcacatagcttgcatctgtttgagacttaccatgtacatcaacccaggtctagtaagcagaaatgtgaaaagttttgtttctgaggagacgcctcatctttacagaagccaatacactgagagccttcatagttccaatccattaccatcatggcaaggaagcactttacctatttgcgtagcaacatatatttaactagaaataggtggtacaaagggattaagtaactttaaatggagaccactttggtttcaggttaaattaataacttatagagatcgtctaaaaaacaaatattgaatgaaattagctgacaaagcaattgtttcagaacaaaggcagaatagcagatagtaatatcatctatatttattccacatcaaatgcaagagcgttcttaactttacgacagaaaggatacatggggcgtgtatttgatgcaatgtccaaccagtcaagctatcattgaaatccaaatatttcccagtagagacatgcagagcaatgtcaatgtaacatacaagcatattacctccccccttaagtgact

SEQ ID NO: 218325 - DNA, 820 bp, Homo Sapiens; identical to SEQ ID NO: 53858

SEQ ID NO: 218326 - DNA, 764 bp, Homo Sapiens; identical to SEQ ID NO: 40313

SEQ ID NO: 218327 - DNA, 481 bp, Homo Sapiens
aattagtgccagccttttcgatgccacaccctacatcctcaccagcacccacatgctcaggatccatgagctgcttctctgtccatcaatttcttcctttcaggcttggtgttattcccctatttgagaacttaggaagaactccaggactccagtgatcctcccacctcagcctcctaagtacctgagactacagatacacaccactgcactggctttgggatgcattatataataattatgataattaaaagttgagtgcccatcatggaccaggctctatgccagccacttgaacatatgatgtctgatacagcagcctccaaagagggttttctgcccattttataatgaggaaacagaaggtcatccagctaagactcttttcttttctttttttttttttttgagatggagtctcactctgaagcccaagctggagtgcagtggagggatctcagcccaccgcaacctccccctc

SEQ ID NO: 218328 - DNA, 757 bp, Homo Sapiens
ccgagcggacgtcctgtttcaagagcctcagccaccctttcgcgtgatcctttttgagaaggaggatgagggaaagcgcagcggcaaagagtaggcaggccagccacacgagggcccagcgcttgtggatgtatttgtccatggggcaggcccatagcgctcccaagtcatcgtcccatagctgcagacactggcctgactgcaggtcttgtagtaagtactctccaaggcgagctgccctcgtggaggctttgctgggtagtgaagtacagccactgggttccaaggcacagagggatctgttgtcctgggggcctcgtgtctccaacagtagcacatcgtctttgagaggccccagggagtcagcccacaagcactcctgcagctgcagcttctccgagctgttcacctgaacacagaggttagggtggcctttcagcaatgggaactcgagaaccttgtccacagtgacgttctcccaggaaagcggtgggaccagtggctggcaggggtccccacccggagcccgccagcacagtgccgcttctgcgggcagcgagcacggtgcgtccagcagccagctctgcagggtcagcagtcgcagtcgggcggcttgccagaggttctggtgtgcgcgggggtcctccctgaaggggcagatgttcgtcctaacggagtcaggttccagaggccacacctgaatacagaggcagggaaccaggtctgtgtggttcaaggtaatgatctgcggtccagt

SEQ ID NO: 218329 - DNA, 799 bp, Homo Sapiens
tttttttttttttttttttttttatagaaaacataaaggaactttaatatccaaacattcagggtaaagaatactggattaatcacccattaagtgtaaatcacttcaggttctttacagtaccagaaagtaaaatctaaattttgcatattgcagagaatgaaaccattttaaaaactttaatttccttacctgatactaataccagtatgatttttagacggaaaaactaagagtaagatttaaaccaaagatagaggtgttcctgaaatgtgaatttgttcagtagtaaccttttcatcatgagtactgataccactttcttctcagaaagtagtcaatgtacattttaagatttgtgcaataagccaatatgctggataataaaaactgttattactggagatagtcaaaatgaaagaaaactatttaaattatttatgcccaaataatttaccctgcagtccatgagatgcacaggaaataattttttttaataagagaacaatgagggtcctaaagtagaaacataagccagaagaaatctaaaaatagcttcctgatattttattttaaaatatttcatttaagctgcttttggttgcatgccctgatctgtagaagttaacaaggaaataaaatttccaagtatttaaaaaatttactcatcttccataaagcgacttttaatgtatcaacacttaaaaatacacagtgacttaatgaaatatcagcacaactgcatagaattgagctccagagaattatacactcgagctgtctttcctgggctctggtt

SEQ ID NO: 218330 - DNA, 548 bp, Homo Sapiens
gaaaagtcaatgtattttattgtacttatctttcataatttaaaaacactaattatcatgacaagctttagtcttcaaattcacacagaaagtcaacattagcaaggaaattcttatattttttcatttttcctcattttctgaaactaatcttctgaaaaatacgtctggtgacaagaatcaaaataaacacacattgtcactttgttttcttaacccgacacacgtccacgaacacaaaagctgcaaatgttgacagtgagagctagaactgctgcagaccccaggaggcaggaactggcgagctaggccgcatgggcgcaagaacgcggatgagcggacaccgcaacccggggacaccgccccctagggaataccgcgcccagggacaccgcccccgccgcattacttggttttcgaggcaaatttcttgagccagttcttgcaggagacagcagagcagtgaagtccccgctcgcagcctggaaatagcgcagcatcgcggctacggaacagggcccggagacccgcgcgggagcgccacagcc

SEQ ID NO: 218331 - DNA, 617 bp, Homo Sapiens
  misc_feature (589)..(589): n is a, c, g, or t
  misc_feature (606)..(607): n is a, c, g, or t
ttttttttttttgcttttctcattttaatttaattcatcaaagcaaacctagataatttagggaaggtttgtggcacaactgcacctaaaacaccaacacggggtattcatttttcattttatttcatcctcttgtgccaaatatcaaaacaaggaactgcatgaagtctcacatacttctgaccatcaacagaacactgaaagcacccataaactgtctcccttttgaagttccccattccacagagtatgcaaggccctttgggaatgttgtgattaagtaagttaactcggatatgggtcccttctttgagtgaaatatcagtcatgctgagaggtttgtcatagtagtcagaaaaaagatcatccaagtaaagctgtgaacgagaaatgacatccatcactcttctatttctttcaaataggatatttctcaacctgtacagcagtgcaaatgttgccgtttcttccctttcaaatcctccttttgacactgaagtgacacaaaggtcaaaggcaccatccaggtatatgaagagttcaaaaacactgaaagctatggttgtatgtgctgggaaaacaatagctntgtcccttcccttgggnnatctgtcatc

SEQ ID NO: 218332 - DNA, 835 bp, Homo Sapiens; identical to SEQ ID NO: 51239

SEQ ID NO: 218333 - DNA, 630 bp, Homo Sapiens
ttttttttttttttttttttttttcagaaacagataaacagtatatttattaaatgagttaagacaaataaactttacaaatagacaaataataaaaggctcagtggctaaaatagatggtaagcatcattgaaagaaatcaacaccatcacggtatctcagttggcttacacgtgtaaaaagaaattttcaaagagcaatttcacagaaatgaagccagtttttttcttataaacaaatcaccaattcttggttcaaaactgacatctgttatgaaaattaccatatcacatatttgtaagatgacaaggagtaactcatcttcaaagtgcaagtaagtctatttacaaccacaaaaaaggcaatgatgaggagaaaaggatttttaaaaaatatacaaagattaaaaacatttgggatgcaaaattaaacaattttttggttagaggataaaagagaaaaagtgattgaattacagatttcagctatacatactatataatgggatccaagatctttaacagcttgcttgcatttttttctacctacataatgctctggaaatttctggtagaaattacagtgtctcaaagagagaaatacacactaagcatgtcttgctactacttc

SEQ ID NO: 218334 - DNA, 769 bp, Homo Sapiens
ttttttttttttatcgctcttttatcttttatttccaaagaagatgtacaaatgcttacataatcagaacagtgcaatcttaccaatgaagtttaccttgtgggagctacatttacttatttcatatattagttcaacaacataaatataataaaaatgcttttaagcaatctgattagagcaacatttatattaactacaaaatatacagtaaaatgaaacatcttgttaaataggcctgtaggaaaacaatattttaaaggaatacattttcatgaatctactttcacatttatttgttttattgtatcttatagttactataatcgttgtgtgcttttgttactgcaatttccaggatcattgtatattctcagtatgccagtgactatatatgtaaaggtaatttaaaaagtattactcccagagtaaaaacagacaaacaaataagaaatctcatttttaatgggaagttgtgcataaaactattgtagtatttttatagaaatgtcccttaatcattataagttcatcattataaaatgtatactattgtactaaagcaaaactgtctgcctttaaatctaagtggtgtcaacttactgtataattctggttacaaagttagatatgaaatctttggctattaattagaaaagcattatttgaaaagacctgtcaataaacatttctaaatgtggttgctcatcttaatagttttcttaattagaacagctaggaaatgaacagaacagtggtgcttttatgt

SEQ ID NO: 218335 - DNA, 716 bp, Homo Sapiens
ttttttttttttttttttttttttttaaaagggaaacatcaattttattaacaatttacggcaatagacatttacagaacaaaaataagacagttccaagacaaaggagtgtaaaagtacagcacacaggttaatactcttcaccctcatcctctccgtcagcactatctgctccaacctcctcataatccttctcaagggcagccatgtcctcacgggcctctgaaaactcgccttcctccatcccctcacccacgtaccagtgaacaaaggcacgcttggcatacatcaggtcaaacttgtggtccaggcgagcccaggcctcggcaacagctgtggtattgctcagcatgcacacagctctctgtaccttggccaggtctccgccaggcaccacagtgggaggctggtaattaatgccaaccttgaagccagtggggcaccaatccacaaactggatggtacgcttggttttgatggtggcaatggcagcattgacatctttgggaaccacgtcaccacggtataacaggcagcaagccatgtatttaccatggcgagggtcacatttcaccatctggttggctggctcaaagcaagcattggtgatctctgctacagtaagctgttcgtggtaggctttctcagcagaaatgacaggggcatatgtggccaaagggaagtggatgcgggggtagggcaccaggttggtctgg

SEQ ID NO: 218336 - DNA, 728 bp, Homo Sapiens
tttttttttttttttttttttttttttgaatttttaggagcttttattgttttagtaatcttaacataacttaaaataagagaggggaaatgacatctggagatctaggtatgtggcccattgcaattgagcacatttcttgggtctgtttctctatctctaagggcagtctcaaaaccccagctcaaaatacgacactaacatgatgaacatgcatgagctttgaaaagtgctctgtagtcttatgatgatctagaagagcactgtccaatagaactttctgtgatgatgaaaagattctacttctgacctattcaatagggtaaccactaatcatgcatggctctcaagcacttgaaatgttgctagtgtgattggggagctgcgttttgaatgttaactaatttaaatttaaatcttaaaaagttacatgtgggtagtggctgccgtacggaacagtacagcactagaataatgctgtgtcctcctgttacacatactcatggtctctcctactctcccttcatcacacctgtgacatcttgcaatttatatttgattgtgtcattatctaatgtattcctcctggactctaagctccaaatgaacaaatgctttgtctactttgccataactgtgtccccagtgcttggcatgggacctggtgcagagtaaatacatcataaatattttgtgaatgaatgaatgaatgaatgaccatgattaat

SEQ ID NO: 218337 - DNA, 637 bp, Homo Sapiens
ttattaagcggccgctggaggtgaacgggctgtcaaagcgttccgggcgttgattgcgcaccggcggctcacaggtcgggtggtggggctggggttcttggccgccttgtatttctgcaggttctcaaagtggcccagggacttgcagtgggagagctgtgcccctgagttgctgtgatagaacttgtggcagatgcggcagatatagcccatcacgggcaccaggaagtccacaccatatgcagtattggggctgtaggtctccgagcccttccactcctctctggatatatctctggacctcacctgaaaacatgcaagtgtgggcctcggatctggcttccccttgacacctcccagacacaggtcgggggcctagagaccaccaatgcccttggacacacagaatccccttgatttccaggaggtagtgggtggcattctctgagcctttgcacatggtgatcctgcctcccagagtgctcttcccaatctatactttctagactctgttcaactagccccctcctccaggaagccctcctgctcctacaggcgccataatccacgccaggtgtgcccaagacatcatgtgtcatttgactgaatcctcataacagccctctatggctacaca

SEQ ID NO: 218338 - DNA, 438 bp, Homo Sapiens
tttttttttttttttttttttttttgaaacggaatcaggctggagtgcaatggtgcaatttcggctcgttgtaacctccgcctcccaggttcaagtgattctcctgcctcagcctcccaagtagctgggattacaggcgcacaccaccaacccacataatttttgtttttttagtagagatgaattttcaccatgttggccaggctggtctcaaagtcctgacctcatatgatctgcccacctcggcctcccaaggtgctggggtgacaggcatgagccaccacgcctggcctgaaatgccgtttttatcatacgctgcagactaatgcatcctcagtgtcacctcccagcttgatgtgggacaagccaccaagggtgtcctcaccatggccccgctcaggccaccagttggctatgtttgcccctgccaccccaggc

SEQ ID NO: 218339 - DNA, 590 bp, Homo Sapiens
tttttttttttttttttttttttttttaaagaaaaaacctttaatttaaaattctgatctatgcataaaattcatttttatatcacggttaaatttagtacaaactataaaaatgttaacactgaagttttcaacagaagtctattaagatgccttagaaaaattaaacaacagcaagtcatttactgctatgaggttaatacataaagaaacattcacacattttactgaaattttcagtaaataactttagccataacacttataattaaaagttcaaaagttgtgtgtggctctacagcaattataatttgcaatgaaaacactaagccaaatctttttgagctgatcagaacaatcttagctacaaaattggctgaaatttgcaaaccttaaaaagaacaccaattgtgaatggaataggtatcataacttagcttaaagtggaagatggtaaaaactcgatgcttaagtctgaattgcacaaggaaaatattaggggaaaaaacactcagctattactgatagctattactttaaaaaaatattagatcattcttatattaaaaacatgaaatgaatccaagcca

SEQ ID NO: 218340 - DNA, 530 bp, Homo Sapiens
tttttttttttttttttttttttttggggctttttcttttctcttttcaacctccaggtgaattcctgatgcggagatgagaccatgccctgaggggagtgatgaaggtgctagtacatgcagggctgtgcagggggaggcccactagctgtgccacgcagcccctccccgcttcccaccggctctggctcccctctccctggcgggtggagtgacgtctggcagcctgcaagcctggtccaggtgtgcggtggaaagatggagaggaatgtgcctctgggggaagaccttgccttcgccatgtcggcgccagcttgctcctcgtcctctgtgcctgagcttcctctgtgtccggctcctctgctaacctgaatggagctccttcaccagggatgacatggtgttggtgatggagtcagctgccaccagcaggtcattgcggaggtttctcctcgtaccttgtgcgaaggcctcctgcacgtctcccccgactccgctcagcgagtcctgcggacagtgggtgggggtgg

SEQ ID NO: 218341 - DNA, 593 bp, Homo Sapiens
ttttttttttttttttttttttttttaaagacacaagcacgtaaatgtttattgcagcattattcacaatagtaaagacatggaatcaacctaaatgcccaatgacaggttggatacagataatatggcacattgtggagcaaaatttaaatattaaatttgaactctattgaacagggacagaaacaatggtcactaagtcctggaacgagttgtgtgagccccttgaggcattcatccagtgctgtttcggagaactagttattgaaaaacaacagacaatggcaaaaacaagttgtcctttttgtattccttgagcccagtcaggaagggctttcatgaccgggcctcctgacaaacaacttgttacaaaaagagctcggttcccagactgcgccgaagtttcatgggacctctcctcgtctgtgcacggactactggtcaattctggagcccaggctgttgcttcctggtctgttgatgaatcctccatagtctggttttaacctcagatcactgaaagaggcactgaagagacagaaaaaacagtcctgaaatcaccgtttcctcatccccagcagtgatggcatgct

SEQ ID NO: 218342 - DNA, 725 bp, Homo Sapiens
tttttttttttttttttttttttttttccaacaaatttaattctgttccagccccaaagaagaggaaggacctaaagttcaaaaataaaaataaaaattgctaaaaataaaagccattacaaaattaagccccctcctttagcaataaatactgaactgatatatacatatgaggcttaggaaggaggcaacaacaggaaccttggggactctgtcccatggcaagatcccaagacttctaccaattccatgctctttgcttaaaacatagagagcagtggaagagacaggagagatatgccagaagagtatgtggccctgtagagagctggaacatgatgaggacagaggagagagaagagatacgaagtgtaatacaggcagggaaagagaaagtcttcatttaaaacattcctcccatccctgctgaatcactggatgtggctggaccggctgtccagagccttgtctcctctcctccactccctgttgagcatgcaagtcaaaggtcattcacactgtggtcgcgatgccactgtggcaacagcctggctgctggatccctgaggcttcccattcaccactagcaggaggggcgtctccactcgaacactggaaaaggaatagtcctttcctttgtgctgaattcggtgaagccgcaggttgggctcaggaatggctacagagtctccaatgagcactccccagctctgcactatattgta

SEQ ID NO: 218343 - DNA, 730 bp, Homo Sapiens
ttttttttttttttttttttttttttttaaatttattattttattgctacattggaagtgaaaataaactgtaagaagctgccaaaggatgcaacttcatgaagattatgaaactattgaggcacccattgtagaaagttaaaattggcttatcctgcatgaggtgcaaggactacctacacaaaggtcatccatggcaaggttattgacagcatctgccatttggaatttacataccaatgggaagtttaaaaaggaacttaaggaaacattcactacccctgacctcttaaccagggaatataggtgagaagaaatcagaagatgtctgaaatctctacaaacacacaggtttacaaaaaaacaagcctaaaaccaagactgtcaggcaatgctgaaatctgctctttggaggagatccccattttatgatgtttgaacacactctttctcctgctggatagtttcctttgagggaagagtatttttttcttcagtattagttttcttcagttttgacctgtcaaacttctccacttccgacaagtctggtttatcactcatcttgactagaagaaagcctgaaaagaaaaaacttttttctttttttgaaacagcgtcttgctctgtcgcccaagctggagtgcagtggcgcaatcccggctcactgcaacctccgcctcctgggttcaagcaattcctctgcctcagcatctcaagaaactgggat

SEQ ID NO: 218344 - DNA, 716 bp, Homo Sapiens
ttttttttttttttttttttttttttacctttgctttatcttcaatgaacttctttccaaatgccccaaatctggcaataagttattatttttaagagaagggatctcactaaggtggccaggctggtctggaactcttgggctcaagtcgtcctgctgctgagcctcctgagtagctgggactacaggcatgggccattccacccagctaaccgattaatatttttactgttcctttttaaagctagctccatagctggaatattgcctgtgttggatcctatttgctggattcatgtcattctctggtttgtgtactccttcattttgctggagtattttctccaacagcttccctaaaaagggcacatggaggtaacccctgagtctttgcttgtctaaaaatgtattattttaccttcacccttgattatttgggtgaatatagatttatcagttgaaaataactttctagaattatgaaggcatggttccattgttttcagattccttttcgagacaaggtctcttctgtcaccccggctggagtgcagtggcacaatcacgactcactgcagccttgaactcgtgggctcaattaattcttccatctcagcttcctgactagatgggaatacaaggtgtgcgccacaatgcccagctaatttttgtgttttttgtagagatggggctttgccatgttgcccaagctggtc

SEQ ID NO: 218345 - DNA, 785 bp, Homo Sapiens; identical to SEQ ID NO: 47008

SEQ ID NO: 218346 - DNA, 814 bp, Homo Sapiens; identical to SEQ ID NO: 45493

SEQ ID NO: 218347 - DNA, 672 bp, Homo Sapiens
ttttttttttttttttttttttttgctcgtaacaaagaaattttaatgcataaggcacagtgagaggctggaatcattaagcatcctcaaacacaaagggcccagcaggctgagcaaaagaacagagacactctccctcactaccactgggcgccctggacagtcccctgaggagtagggggcatccagtctttggcacggtgcctgggggcaggaagtgactagcatgatcccagctacccctctgtgggaatactgccaccaagaggcagctctttggtctggataaagtcagtgcaaatgtccaggggtcaagctctggaggaatgagggtggcacagtgccctagggctgggcagtctctgaacagtctcctcagccctcatgggcaacatgtgggcttcttcttgctggcagttaggtagaggttgctgtcatcactgttgatgcggacaacatccccaatgcgtcgagcccccgatttctccagctcagccagcacattggcctcaaaggtcagtgctgccacacggaagaagaattctcggacattctcaccagtgagagatgagactgcccagtactcagccttcatctcctgggccacctggagggcgtctttctccatcagcgcatactgagcaggggtactcagatccttcttggaaccta

SEQ ID NO: 218348 - DNA, 765 bp, Homo Sapiens
ttttttttttttttttttttttttttaagtattttgaaaagtatttacttagtttaaataaattaattgcaaataaaaattaagctacaatatatagcctgaataaaaatgactagaacaaatacaacacaggacttgctttcttgcattagtcacaaagcatgtgacaatctagaaaacttcaaaatcaattacatttctttgaaaaaggggtaacagcagttactgatacatcacaactaataaacttataatacaagtttcctgacatgcatttcctgagtgaacccaaatgatcattttttaaaacaaggaagtttcgacagttgaagtaaaataaaataattcatggcttctaagcaacaagttttgttttttaaaaaccaaaagaaaattcagaacagttttgtaataggataaattaaaggtatgctaccacatataaaactttgctacagtcagttaagtattatacaacttttcaaactaaaggaaaacaaatcaaaatattaaaagaagatactgtctaatctaaaagtgtactggtttctacaagtgtcaaaaaaagatttgatgtagtgcaactgtctatacttgtggtgcctttgaaaaaagggtgggaaggaggggagagaagaaacttttcttgcttctggaagcaaaagacatattggaattagagaataaacagaccatgcagtgcgtcactccacgctgcagtcattggtgctcatctgccaaccaaacatttccttaagtctcact

SEQ ID NO: 218349 - DNA, 373 bp, Homo Sapiens
tttttttttttttttttttttttttttttttttaattatgtatttcattttatttttttgaaacagtttccctcgtctcccaggctggagtccagtggcgcaatctcggctcactgcaacctccacctcccaggttcaagtgattctcctgcctcagcctcctgagtagctaggaccaccggcacccaccaccacgcccagccaattttttgtatttttagtaaagacgggatttcaccatgttggccaggctggtgtggtctccaactcctcacctcaagtgatccacccgccttggcctcacaaaatgttgggattacaggcgtgagccaccccacctggccaggacaggcaaatttaatggtagacttaa

SEQ ID NO: 218350 - DNA, 603 bp, Homo Sapiens
tttttttttttttttttttttttttggttttttttttttggttggaccaaaatatttaatcaatatgctgttaaaataaaacccacaaaagaaacagtaatacaattttactggtttatatttcaattcataaagttgacacactgaaactaccttagcacaatgtccacacacctagcattagataggcttacagctattttggtaactgaacaagaaagacacagaaagcagcaaaggggatggttggtggggagggggttgccacttgttacctcccttattacagataacctcagcaagcgttagtacagccaataagaaaaagagctacaaaacaacccgagtgtctttatatacaaaaccagtgcctcttgtaagcagccgcctcaacactgaacgcagaaaacaggacaaaaccatctgcgtgtcagcctgtcagcatatcactatataaattaaaagtcaaagtttttttttttttttaaaggggctaaaatccattccatagctttgaagtgagaacttacagcccatctgaacagtgaggtttgtacccaggcatactctgaggagggcccaaaggcccagcccatctgggag

SEQ ID NO: 218351 - DNA, 529 bp, Homo Sapiens
tttttttttttttttttttttttttttttccacacaggcttttttattagtatagataccttcacagacaatactgtaatttttagaggagttccacatcattacatcaacagtgtgaatttctaacagaggcaaaactgagcaccatagtttacaagtagaaagaccatgcttgaggacaacagaagttcactaaggatgcacgattgatctgagaagtttttaagcctcgtcctcgccctcctcctcctcgaaatccccttgttcgtcggccgtggcgtcctggtactgctggtactcggacaccaggtcgttcatgttgctctcggcctcggtgaactccatctcgtccatgccctcgcccgtgtaccagtgcaggaaggccttgcgccggaacatggccgtgaactgctcggagatgcgcttgaacagctcctggatggccgtgctgttgccgatgaaggtggccgacatcttcaggccgcggggcgggatgtcgcacacggccgtcttcacgttgttggggatc

SEQ ID NO: 218352 - DNA, 786 bp, Homo Sapiens
tttttttttttttttttttttttttgaaaaccatagacacatatgttttattttagtaaaaatttcaaattatgactttagtagtctttaaaaggttacaaccatatcacagaccttggcaaagctgcagtgtattaatttttatccccagtttccattctttaaccttcaaggaacgaaaatgaaatcaaaattttaaaacacatgattataagcctttgtatcaactgagaattaagaatttaagtcatgaatctttttcttaataagctacttgacgtaacaaaaagtaaaaaaaaaagaaatcttactaacctctgtactcttagagtttgaaaaatattgattacagctcttcctacagaatcacggtcaccttcaaaatgctatccacaatataaagaaaattatgaaagtcagaaagcagcttgattgtcagtagtatcagtttccatcttctttaacccatgtgaatgttcaagacatgtggtagaagaaaaggaataatgctatttctaatgttcatgataacaaacactctaggaaaacatttaaagaaactccatgatttcacagttaaaattagagctctattaataaccaacaagctaaggtgttttctatatctcattgctctgtatatttctagcaatttatagagaagtttagcagatctacaagggttttcatcagttaattttcaacattaactaggtcacatgccagaagctgttataccaaatatttaaaaattagagctgtgctgaaaaaaaaatgacctacaat

SEQ ID NO: 218353 - DNA, 702 bp, Homo Sapiens
tttttttttttttttttttttttttacttgatcaataccacagtttatttgtaaacatgttatatgtgtcaataatcaaattgacaacactttatagatttcattgtataatattaacatcctaacagaaaacgatccactgtactcagttacagtttggtattttaaaatccttaaatacaaattgtatttgaaacactgaacacaaaaaagaaacatgaatggcagagaaaactgaaaacaacaagtaaaagaaaccaatattccgctcccctgaaaaaaaaacataaaatcatctgattacataatttaaaaaagaaacaaaggaaatcagatgacattttttgatataaagttgcatttcttcaaatccattttagaggtgaaattgtatcaatattaaattctatgtcttttttgatatttgttctttctttcctcttggtttctaaagaatgtttgccagggtttaaattacattaaggaagcgggaaaaagaaaggaaggaacatggtaaaaagccaaatgaaattaactatttgcaaaataattggacgtaaatttttcatgaatcttctttggcaaataacaaagtctgcattttaaatttacctttttgttgaaatggatcaatgcttgtaagatttaagagattacatgagttaatgtataagtaaaacaaagccaaattcacaaagcaag

SEQ ID NO: 218354 - DNA, 698 bp, Homo Sapiens
tttttttttttttttttttttttttgaaacaaagttttaatttttattttacatatttatacataaaactttcaaggaaccctctgaatccaacagaatgttaatagcacatctaaaaaggaacttcaggtagtcaacattcacaaaatgttgaaaactgagtaaaatatacatattacggagagctacaacttcactacgaggcaggcatgtattttttgacttgtatagcaccgtcatttacagttcttctttaaaactacagtgaagaatgaaaagtagtcaatgggaaaatactgttccaacttaaaatctctaaacaaataaaaataaagttaaaactactctcttttattaaccatgatttgtggtggtgtcagtactgtacattttttgtaacaatattttattaaaatgcctgatattaagtggcacaagtaaaaaattaaaataaattaagaagcaaaggccaatcactggacattaagcttcagacattatcaatgactaacactgatatttgtttctgcgccacctttagcaacagcatttttacaaccacagaagcaaaataaattctagcttgttctctggttgaatggcttcttttcactttgcaggcattttctctgccatgtgcttctgctgactttcagcatgtctggtcaagtcttcaatgtccaccagcatggcatcct

SEQ ID NO: 218355 - DNA, 706 bp, Homo Sapiens
tttttttttttttttttttttttttgatgttaatgactttactttgagatatgatggaaaaatattacaggtacacatggaaaagacatgatcaccaagtgaaaacaatctaaccagaaagctttaacgtctgtcagttaagctgaagctgaaattctgggagcatgacatgctgcagggccaaaaggaatggataattagtattcctctccttcttcctcaccctctccttcaacagaatccacaccaacctcctcataatccttctcaagggcagccatatcttcacgggcctctgaaaactcgccttcctccatcccctcacccacgtaccagtgaacaaaggcacgcttggcatacatcaggtcaaacttgtggtccaggcgagcccaggcctcagcaatggctgtggtgttgctcagcatgcacacagctctctgtaccttggccaggtctccaccaggcaccacagtgggaggctggtagttgatgccaaccttgaagccagtggggcaccaatccacaaactggatgctgcgcttggttttgatggtggcaatggcagcattgacatctttgggaaccacgtcaccacggtacaacaggcagcaagccatgtatttaccatggcgagggtcacatttcaccatctggttggctggctcaaagcaagcattggtgatctctgctacagaaagctgttcat

SEQ ID NO: 218356 - DNA, 660 bp, Homo Sapiens
gtctcatgtaccagaaattccggaaccaattcctctccttttccatgtaccagagcttcgtgcagtttctccagtactactaccagagcggctgcctctaccgcctgcgggcgctgggcgagcggcacaccatggacctcactgtggagggcttccagtcctggatgtggcggggcctcaccttcctgctgccttttcttttctttggacacttctggcagctttttaacgcgctgacgttgttcaacctggcccaggaccctcagtgcaaggagtggcaggtgcttatgtgcggctttcccttcctcctccttttcctcggcaatttcttcaccaccctgagggttgtgcaccacaagtttcacagtcagcggcacgggagcaagaaggattgaggctgggccttcccctgccggcccagaggggcttctgtcctgtgtgttgtgggaggggatgggaggcgcccctcgagtgtgcgtgtatcagggggtctcttctattctcccttgggttttatgggcgctgtgggccctgaaggaagacctgggcccagtgccctcaataaagagaggcccagaggtggcctgagcgtgtgtgttctcctgggggaagggagggctgggtggccccaccacatgggttcctggggtctgagttagt

SEQ ID NO: 218357 - DNA, 739 bp, Homo Sapiens; identical to SEQ ID NO: 43356
  misc_feature (656)..(656): n is a, c, g, or t
  misc_feature (681)..(681): n is a, c, g, or t

SEQ ID NO: 218358 - DNA, 652 bp, Homo Sapiens
ttttttttttttttttttatgttaaaaatatttattttttttcctaaaagatcacacaaaagttgggaagagaaggatgtcaattagactacatcaaaatctgggcagagggaggacaaagagctgcctaaagaaactggtagctggagcaaactgcagagatcaagatgaccctagtcaacggaaccagcagcccaggtcagccacattcaggagcaccaccgaggcacggcagggagagcaaagttgctggccccaatcattcctccttttcagggcaggagaggcagaagctcactctttagacatgttcttgatggtcttgtgctctttcatggccttctcccaatcgctgccattgaattcctcagtgaccatactccgcacagtgccctcatccaggcagtggggggcaattccgaagcctccggggtttgatcgtggagtatagaagctctgaacgccacatctcttacagaaggtatgctgggctttgtgagtattgaacgtgtaagtcgttatgtgctcagctcccttcaggagcttgaagcgagaagctggaacaatgaagtgtctattctgcttcttcttgcaaatgctgcaattgcagtcaaatatatgcaagtctgctgaggcccaaacttcaaaacga

SEQ ID NO: 218359 - DNA, 814 bp, Homo Sapiens
ttttttttttttttttttgtggttgtggaatgcatacatttccatgtatttttacagtaaaaatgcattaaaaaatctttcacaaaagaaacttaaaaaatacaattagggtgttgagtcctcccccccaacattctttcaggcatcaactgtgtaacggagggagacaaattcctaaatcgtttgatttcatcatacaaaatactcatccattatctctcatcaagacatttacattaagtgggggaggggggcggcgggattaaggaaagtaggctcacaagaatcagtttccaatttaaggttacagcagttcaaagaaaactatatctttctgcataatgcatagtccctgtacagtacaatatttccaaacaaatctgatgtgtggaattcaggtgaaactgccacaccaaaaagtccacggattgagacaagcccaggtgggtagcacatagattttaaattgccaaatatcatcttacaacaagaaggacatcaagatgttaacttcaggatatattcccaaaatccaccttgatttcatttatttaaaactctggatcacaattgagagcatcagtcatttaacatcacagattttgttagaactagtgagaagaatcctagcagtggagccctgggaataaaatctccaagtcagctcttaggaacttgatgaaaaagaacatcattattcagttgtactcttcctcagccttactacagctcaatgtatgctttgtatggaaaactttaataataaaaatagcattcacagacttttccctcctttttagctacagaatgtata

SEQ ID NO: 218360 - DNA, 866 bp, Homo Sapiens; identical to SEQ ID NO: 52614

SEQ ID NO: 218361 - DNA, 857 bp, Homo Sapiens
ttccgtgttctcagaacccaacagaggcaatagaagcctggatcaactttaataaagaggaaagagaggcttttgcagagtcactcaggacaagcttgaaggaaattggggagaatgtgcacatttacctgattgggaaagagtcatctcgtacccactcgttggctgtgtccttgcactgtgcagaagatgactccatcagtgtaagtggccaaaacagtttgtgccaccagatcactgcggcctgcaagcatggtggagacttgtatgtggtgggagggtccatcccacggcgcatgtggaagtgcaacaatgccaccgttgactgggagtggtgtgctcctttgcctcgggaccggctccagcacaccctggtgtctgtgcccgggaaagatgccatatattcactgggtggcaagacactgcaagataccctctccaacgcagtcatttattatcgcgtaggtgataatgtgtggacagagacaactcagctagaggtggctgtgtcaggggctgctggtgccaacctcaacgggatcatctacttactagggggggaggagaatgatctggacttctttaccaaaccttcccgactcatccagtgctttgacacagagacagacaaatgccatgtgaagccctatgtgctgccctttgcaggccgcatgcacgcagctgtgcataaagatctggtgttcatcgtggctgaaggggactccctggtgtgctacaatcccttgctagacagcttcacccggctttgccttcctgaggcctggagctctgccccatccctctggaagattgccagctgtaacgggagcatctatgtcttccgggaccgatataaa

SEQ ID NO: 218362 - DNA, 715 bp, Homo Sapiens; identical to SEQ ID NO: 52760

SEQ ID NO: 218363 - DNA, 734 bp, Homo Sapiens
cttttttttttttttttttttttttttaaagtgaaaacattatattataacatggcttttccaaacaaaatattaaaattaataatttttaacatattctttaaattctacatgcatacttttgaatatctaaactacatgttaaacagctgaatacattctactcacacttcagatctttaaacaccaacaatctatgaatattaatctattactacaggacaaatttggatatacgtcttggataaattttaagctcactttaagagcaccaatcattaacaatcatttttgtattttattcacaaacactgatacgatttgtttatttatgttaaaacaaacattttctttaaaaatgaatgtgtattaaagtagtttaactggtagaataggctttattccaatctgtttgttaaacagcctattttcacaatatctatatctacttttcattgatctgttccatcattactaacatatttgttcaaattattaggactattttttcaaagggaggaataatcaaattccccagtccatatatcttataaatattttacacctaatacacacagctttacagttcatgcgataggcagtgtctaaaaaatcagttactaaatctcaaaaacatttaaatatctatttaaacacagtgtcttctagattttttttgtaagaaaagtaatctgtaaacatctttacctttagttcatgcttggtcatttgct

SEQ ID NO: 218364 - DNA, 850 bp, Homo Sapiens; identical to SEQ ID NO: 49858

SEQ ID NO: 218365 - DNA, 757 bp, Homo Sapiens
caggatccggtttattctgccttggcagggtggtcctgagagtggtgggtgccaccctgtccggggcggagagagggcccgagggccagttaaggccaatggcgggagaagcagggggctgcagcccctggaatgcggtgaagccaggccgaggcccggaggcagctgtggtaggccagggcagggtggaaggcaccggactgggaccgggccagggctacagggccgaggacccaggccacacgggcaccccgggaggcggggcacagggtcacgtgacacagaacatgaaacacaggcacagggtcataggccagatgcacatccagccatggctgggccagacactgggacacagtggtggtgtcacacacagaccacaggggggacacatggatttgacagccacaatgcacagaccaggctacagagctcgagggacgtgggaaggggccttttggcactactgcactggaatcgtgagacaaaggtagcaggacactctggcggtgcctggggcggtccccttgcggcctctctaggcttagtccgtcttccacactttgttgagcagcttcaccacttcatcatagatgacaaacactatggccacatccaggcagacccggcccaggcgggggacagtgcccttgtagaatgccttgagcccctccttcttcaggatctgcaagccgcagtcccacgtgttccggtatttgtgcgcctccaggccctgcatccgggtcttaatcacatc

SEQ ID NO: 218366 - DNA, 840 bp, Homo Sapiens
ctgtttggagcccccagggcaggattcatcaaattgaatatgcaatggaagctgttaaacaaggttcagccacagttggtctgaaatcaaaaactcatgcagttttggttgcattgaaaagggcgcaatcagagcttgcagctcatcagaaaaaaattctccatgttgacaaccatattggtatctcaattgcggggcttactgctgatgctagactgttatgtaattttatgcgtcaggagtgtttggattccagatttgtattcgatagaccactgcctgtgtctcgtcttgtatctctaattggaagcaagacccagataccaacacaacgatatggccggagaccatatggtgttggtctccttattgctggttatgatgatatgggccctcacattttccaaacctgtccatctgctaactattttgactgcagagccatgtccattggagcccgttcccaatcagctcgtacttacttggagagacatatgtctgaatttatggagtgtaatttaaatgaactagttaaacatggtctgcgtgccttaagagagacgcttcctgcagaacaggacctgactacaaagaatgtttccattggaattgttggtaaagacttggagtttacaatctatgatgatgatgatgtgtctccattcctggaaggtcttgaagaaagaccacagagaaaggcacagcctgctcaacctgctgatgaacctgcagaaaaggctgatgaaccaatggaacattaagtgataagccagtctatatatgtattatcaaatatgtaagaatacaggcaccacatactgatgacaataatctatactt

SEQ ID NO: 218367 - DNA, 697 bp, Homo Sapiens
agggtctccctgtgttgcccaggctggtctgtaatgcctaggctcaagggatcctctgccttggcttcttaacctgctgggattacaagcatgagacaccattcctggcctagaagcctatttttaaagaaactacaatctcccatggggactgtttccctgcctcttttgtgcagtcccatggaacttgcctacagcaagaggcctaagattgaatctttttggggaaaagtcattctaggatgaaaatcctatgttaaggccgggcgcagtggctcacgcctgtaatcccagtactttgggaagccgaggcaggtggatcacctgaggtgaggagtttgagaccagcctggccaacatggtgaaaccccgtctttactaaagctacaaaaattagctgggcgtggtgccaggcacttgtggtcccggctactcaggaggctgaggcaggagaattgcttgagcctgggaggtggaggttgcagtgagccaagatcgctccattgcactccagcctgggtgacagtgaaactccatctcaaaaataaaagaataaaagtatgtctgtcatccagctcctatgtctgttatccagctccaagtacagcttgtgtatatcaacattttcaaaaacctttaaactaccaaatgaaatccagatgtttttccatgaaaaaaaaaaaaaaaaaaaaaaaaa

SEQ ID NO: 218368 - DNA, 841 bp, Homo Sapiens; identical to SEQ ID NO: 44478

SEQ ID NO: 218369 - DNA, 627 bp, Homo Sapiens
tttttttttttttttttttccaataaaacttaatttattgaagacatcacgccgcaacccttacgactgcccaggaggctgcttgcaagaccctgtcccgggctgagacctgcgaggaacctccctcccccaccctgccgccgtgcatccccagagcagggcagcacagaccaggagacagtgagaactaagcaaactggcactttatggctgagatcctgccccaccccaaccaaccccaataatattaaggtgctctccctccccagacccacacagaacagtttaaataaaccccagcccggtcctcgggctattccttcatttccggacggacacccgcccccacccccagcgggggtggggaggtcttagcggagctcctccgctgtggttcaggcccggtggaaggccgcagaaactggtgaaagtgggggcccagacgtacccaaatggacccccacaggcacccctggggctgggaggcggggtccagtaaaacaggacagcaccagagtaaccagggtcctcggtaaccatggcaactgaccttccgtcctgagcctaaaaggcgaggggcaggatgccctaattagggcattgcaaatgattgggcagcggggaatg

SEQ ID NO: 218370 - DNA, 730 bp, Homo Sapiens
tttttttttttttttttttttttttttggacgttgaacgtttattacaactaattggcgatgtgataagacagtgctcacgtggcctgaatgttggtcacaatcacaacaaagcttaatccagcccagcatatataagtgaaaatataaaccatgaagacatgtttagatatgtataagtacttagaaaagtgacgctgaacaattacatagctttaaaaaatatagagccatctaatgccattttacctcattcaactcttttttgtaagaaatgtgtctttttaaatttttataagacttctgttaactaggcagtgccatggaaagaaaggaagctgctgtaaagtgtgcagcacttctaagtggagggaagcaaaataaatttagctttaacaagtaccccagagggaacattcgtgctttaaacaatgactttacacataatactgtgaagagagcaacacgttttttgtaagatactgttatgaagaattcctggcaaattaccattctcactttattttggggcatcaaaaacaactaagtatttgattatgaccacaaaaaattcatctcaggagtcaaatgtgccttggccttaaaaattatgtgcttactattgtgaaacaatcctgtttctcatcccagattcagaatgcctaagaaataatttttagtgtaagaagtatcactccaatttagtcattaaaaataatctgtagtccttt

SEQ ID NO: 218371 - DNA, 761 bp, Homo Sapiens
ttttcccagaactacacaatgttttattgaaaaagtcaggcctcagctcagctgtctccattcggctcagcttggtggggggccctgcccatagtagactgagccagatcttcctgcaggcagctgggctggactccctccctggctacccttcccttcgtctctgatggtgacatccaaacaataaatatgcaataaatagcgctcctgggctgggccgggccggctgccttcaaaccccactcggcccctaccagtcttctctggccaggacaggcctactggggtgctagatagtaaagtccccaaacatcccagggtcccacaagacctgggatccatctccattttgaggcccaggcctggtttccaaggagacctagcaaagctgggtccaggacagggccaggcaagcagggctggcaggtgggtgctgggaagaggctgttaccccagaccacagcttgttatgtcctggccaagacctcgactccaggccacaagatgacactgggctcaggagtagatggtgatgacttcacggccaccaccgcgcaccaacagcacccgctcaaggccctcggtcagcacctcgaggaactccatgtagttctcgtcgccctcactgttcctgggtgggccaggcatgtttaggagaaccaggcgggcgtcgtgggagcgcgtgacaatgacttcattgagcttcacagcagtgtgcatgcgccgcacattggattggtccggcttaatgtgcaccagct

SEQ ID NO: 218372 - DNA, 808 bp, Homo Sapiens
catttattttacaatttaatgtaaatctagaatatctaactatttatacaaacttaactttaaaaatagccacttgctattttacatacaaaacattcaaaagaaaattcttcatttagagtgactgaggcttcacattccagcccagagaatggcagcgaggagggtggcggcgggaagcagaggccttgggtggtccgtgctggccccagtccctcagcccaccctctccagcactgggaatatatttatgcttatttttctttttcaaataaaacttctactaaaacatgtttctttttttttttttccaagacaggttctcacattggtgcccaggctggagtgcagtggcacaatcacagcccactgcagcctgcatctccttgagctcaggccatcctcccacttcagcctcccaagtagctgggactacaggcatgcactaccacacccggctaatttttgtattttttgtagggacaggagtttcactatatttcccaggctggtcccgaactcctgggctcaagtaatccgcccacctcagcctcccaagttctagggttacaagtgtaagccactgcgaccagcctaaagcttgtttctgagggttgaaaaccactttagggctgttctttcaaggcaaaggatttggttcggcttagaacttgaggagtggggaatccacgttctccttgtcagcctcagggctcagctggatcagaggggagctcaggtctatgagctgtcccaccaccggtgaaggtttggccacatttttattcatgtctggagtgtttgtcat

SEQ ID NO: 218373 - DNA, 807 bp, Homo Sapiens; identical to SEQ ID NO: 44086

SEQ ID NO: 218374 - DNA, 705 bp, Homo Sapiens
ttttttttttttgccagttgataaaacttttaattaagacacaatagcgcgggatataaaaacacaagaaccacataaatatcgaagaagttgtataccattttcatgtaaacagttttgcttacgagcaaagccctaattagattctggcctgaaacttttggcagatgacgcgtgttcagccaggctctgtagcgatggtgacgtggaagccaggtcagtccccatgttgacaagcatgcaacttgaaaacattgcacaacaagcaacacaaagagtggagaagctcacaacacttcaaggagacctcacaaccttcacaactgcgtaagcacagagacccacgctccctcctttccacgcactgtcttacacatgggagaccttctgtgactctctagcttgtttgatgctatataaccacttgatgattctagcatttctttcgatggcagaaatgccatacggcacgcggtcattggcactgtcatcatttctaaggtcactgttactgtcctgagactgttcacagtctgagctgatcatgcttgcgctgcggaagttgagggatattatgtcagaattagcccttgcaaagttttccattcccaggttttccagctcttccgggtccagtccacagtagttgaagaacctctccacgtccgcgtccactcggaaatatctgtcactcaagtctgactt

SEQ ID NO: 218375 - DNA, 857 bp, Homo Sapiens; identical to SEQ ID NO: 41030

SEQ ID NO: 218376 - DNA, 773 bp, Homo Sapiens
gtccggaattccgggatcccagggtacgagcccccccaagccctctcacccctgcccccacctaccccatcgcccccagcctggcaggctcggggcctgggcaccgcccggttgcagctggtagagttctcagccttcgtggaaccgccagatgcagttgattcttaccagaggcacctgttcgtgcacatcagccagcactgccccagccccggagcgccgccgctcgagagtgtggacgtccggcagatctacgacaaattccctgagaaaaagggtggcctccgagagctatatgatcgtggccccccccatgccttcttcctggtcaagttctgggcggacctgaactggggcccaagtggtgaggaggcaggggccggtggcagcatcagcagtggtggcttctacggagtgagcagccagtatgagagcctggaacacatgaccctcacctgttcctccaaggtctgctcttttggcaagcaggtggtggagaaggtggagacggaacgggcccagctggaggacggcagatttgtgtaccgcctgctgcgctcgcccatgtgcgagtacctggtgaatttcttgcacaagttgcggcagctgcctgagcgatacatgatgaacagcgtcctggaaaacttcaccatcctccaggtggtgacaaacagagacacccaggaactgctgctctgcaccgcctatgtcttcgaggtctccaccagcgagcgtggggcccagcatcacatttaccgcctggtcagggactg

SEQ ID NO: 218377 - DNA, 850 bp, Homo Sapiens; identical to SEQ ID NO: 50995

SEQ ID NO: 218378 - DNA, 581 bp, Homo Sapiens
  misc_feature (443)..(443): n is a, c, g, or t
  misc_feature (530)..(530): n is a, c, g, or t
  misc_feature (565)..(565): n is a, c, g, or t
ttaagaggaaaagtttcaagtcggctgacttccctacccggcgcttcaggcgccccctctccggggccgcgcgggcgcagagcgggaggggcgcgccccctcctttgtcagcctcagagcgcggctgtgacgtcactcattccactccctccggggttcttgttgtcatgttgttgttttttgttgggcaggaaggcgggctcgactttctctttttgccagcgggagctgaagcccgttcttagcgcccgggccgcggtttccatcttgagctggcggtctccttgaaacttccccaagtgtctgcacaacttaccttttcccgacttctcttcgacactcggctcccttcggcaaaccgggcaggccgaggacattagaaatttgggacgcacagaatgttcaagcctaggattttatgttgctgttttttttccagcggngcgtagggtggggcgcggtgctggggggactagggaaactttttccccaggaggacatggtctggcgggcgcgagcgcggcacaatntagtgcgtcgcacgcgtcgacactcgcgctcgctntgcagccggcgctctc

SEQ ID NO: 218379 - DNA, 632 bp, Homo Sapiens; identical to SEQ ID NO: 42406

SEQ ID NO: 218380 - DNA, 805 bp, Homo Sapiens; identical to SEQ ID NO: 46892

SEQ ID NO: 218381 - DNA, 771 bp, Homo Sapiens
ccgcctgtaatcccagcactttgggacaccgaggtgggcagatcacttcaggtcaggagtttgagaccagcctggccaacttagtgaaaccccatctctactaaaaatgcaaaaattatccaggcatggtggcacacgcctgtaatcccagctccacaggaggctgaggcagaatcccttgaagctgggaggcggaggttgcagtgagccgagattgcgccattgcactccagcctgggcaacagagaaaacaaaaaggaaaacaaatgatgaaggtctgcagaaactgaaacccagacatgtgtctgccccctctatgtgggcatggttttgccggtgcttctaagtgcaggagaacatgtcacctgaggctagttttgcattcaggtccctggcttcgtttcttgttggtatgcctccccagatcgtccttcctgtatccatgtgaccagactgtatttgttgggactgtcgcagatcttggcttcttacagttcttcctgtccaaactccatcctgtccctcaggaacggggggaaaattctccgaatgtttttggttttttggctgcttggaatttacttctgccacctgctggtcatcactgtcctcactaagtggattctggctcccccgtacctcatggctcaaactaccactcctcagtcgctatattaaagcttatattttgctggattactgctaaatacaaaagaaagttcaatatgttttcatttctgtagggaaaatgggattgctgctttaaatttc

SEQ ID NO: 218382 - DNA, 795 bp, Homo Sapiens; identical to SEQ ID NO: 46161

SEQ ID NO: 218383 - DNA, 768 bp, Homo Sapiens
  misc_feature (735)..(735): n is a, c, g, or t
attttattggactgtttgtctttgttctctgcctcttgtattctagcatccgcacttccactaatagccaagtagacaagctgaccctgtcagggagtgacagcgtcatccttggtgatacaactaccagtggtgccagtgatgaagaagatggacagcctcggcgggctgtggacaacgagaaagagggagtgcagtatagctactccttattccacctcatgctctgcttggcttccttgtacatcatgatgaccctgaccagctggtacagccctgatgcaaagtttcagagcatgaccagcaagtggccagctgtgtgggtcaagatcagctccagctgggtctgcctcctgctttacgtctggacccttgtggctccacttgtcctcaccagtcgggacttcagctgaacctctgagtgccaaggacaccactggaactcacaaaggtctccttcaccgaaaacccatataccttttaagtttgtttcaactaaaatattaagtgaatgctttgcaagtttgactgtatgcaggtttatatcagaaggtgagattgaataatgcttgatgcagaatcgaaacttctcatttatctgtatattatgtttacttctaaggatatagcacaaagggaacattttttgtttaaagtgaactacagctgtgctgtgaagagagttctttataaagcctgtaggttcttttaactttggtttaaaatgtaagatangaaaatgttggatatttgaggccatgcttaata

SEQ ID NO: 218384 - DNA, 818 bp, Homo Sapiens
atagtttcaatctgagaataaacactatataatctgcactttataggttgggtgcagtgtctcatgcctgtaatcccagcactttggaaggccaaggcaggaggattgcttgaggccaggaattcaagaccagcctgggaaacaaagtgagaccctgtctttacaaaaaataaaaacaaaaatttaaaactgtataatctgcactttatgctaaactagctgtgctcttaaactcaattttttcagctctaataaagggcttaatttgatagaattattctacgattaaattttgaagactgttttcactctcctctgccgcccatagcaagactgcttccatagatttctcagaaccgtagccagttctggctatttggtcaagtctgggatccctcttacctgctattctgcagctgctttctctgtcttacattttttgggccacgtctaatcttaaagagtaaactctacccttggtttgcatagtgtgcatgacaaaaataacaagaataatggtaatgatgaaaatgataagagcaaaatttgtggagtgctttccacattccaggtaatgtgtaacatacaatttaattcttacagcagtcttatggagtgaaaatactattatgattcccgttttacagatgaaagaatggaggcacagaaaagttacttgtctaagtaacagtctatccttaaagtccacagtcttaaccacttgatttttcatagtgaggaaaatatcccagaaagttgcagtttcaattaatcactaattgtagggtaatttaactataccagtgagtcctactagc

SEQ ID NO: 218385 - DNA, 736 bp, Homo Sapiens; identical to SEQ ID NO: 46910

SEQ ID NO: 218386 - DNA, 720 bp, Homo Sapiens; identical to SEQ ID NO: 40358

SEQ ID NO: 218387 - DNA, 411 bp, Homo Sapiens; identical to SEQ ID NO: 45659

SEQ ID NO: 218388 - DNA, 576 bp, Homo Sapiens; identical to SEQ ID NO: 60317

SEQ ID NO: 218389 - DNA, 550 bp, Homo Sapiens
tttttctaattaaagattttattaacacttaagattaatataaagtaatactatatattgtatcacaatgcaatataaaagttaataaaatcattgttttgttaatatttaccataaaagttatatttatctttgaagcactaagatcaatacctagggacaccattctactctgtgggattgcaggtcaaagattaaatacaaatttatttaaataaaggccctttaatagcatagaaacaatatatattcatacaataaaatgtaagctgaaaaatgcacggaacaaaatatgtgtgctgtgaccacagacgcgttctgaaaaatacgtgcgctgtgattgcagacgcgttctgaaaaatacgtgtaccataatcacagacgcgttcgcaaaaatacatgcactgtgatcgcagcacgtgcgccgagaccgcagacgcgttctgaaaaacacgtgcgccgtgatggcagacgttctgaaaaatacatgcgctatgaccatagatgcattctgaaaaacacatgcaccatgaccgcagatgcgttctga

SEQ ID NO: 218390 - DNA, 500 bp, Homo Sapiens
ctagcggccagacgtggcttctcctgagttctagggctcgggccagagtggcactactgcccggccagtccaggctcaggcaggaatcggacgctggggcccgggctctgcacagagagctgggcttgagtggagtttattgtagatttctcccaaggggatcacttagcttctcactgacacacccttcccaattgccacaagcgcaggggtatcttacagcactttggggaggggtgggacaaactgcaaggttctggggccaaggcctacccaggggcctctgcccagagaactcacaaccccctctctgacctaggggacaatgcaaacaggtcacagtgcattcccatattaggccatccccttcacgaagaattcaggggatgtgggaagtggggaggcggggagggatcttgactcttgtctcctttgtccttttgttcagacagagttgtacctgcagcagacaactctgaattaaagcatgaaaacacagc

SEQ ID NO: 218391 - DNA, 403 bp, Homo Sapiens
caaaggaggccctggcagcgccccggctgtaagccatgcaaccccaaggagtcccgggcaccttcaccccaccgggaggggccacaaggacctgggcctcggccaccaagctttgtcccctctcgctgtggggggctagtgattctcctccgacctgacgattgcttggttttttcaaaagggagttttgtgcggtgagaagtgtgtttctgtgtggctaactctgggctagcgtgccgtggccattgaaggtgtggcctgcgtgggtgcagtgtaagtgacgctggattgtcaggtggcagcagggggcccctgctgtgtcagtgctaatgaaacatgttggttggtttctaaaataaagccaaacaagccagcacatgccgaggcttggaccctgatagaa

SEQ ID NO: 218392 - DNA, 502 bp, Homo Sapiens; identical to SEQ ID NO: 43421

SEQ ID NO: 218393 - DNA, 500 bp, Homo Sapiens; identical to SEQ ID NO: 44164

SEQ ID NO: 218394 - DNA, 500 bp, Homo Sapiens; identical to SEQ ID NO: 43541

SEQ ID NO: 218395 - DNA, 500 bp, Homo Sapiens; identical to SEQ ID NO: 43161

SEQ ID NO: 218396 - DNA, 499 bp, Homo Sapiens; identical to SEQ ID NO: 42113

SEQ ID NO: 218397 - DNA, 498 bp, Homo Sapiens
aagtataatatgcgtgtggaagactacgaaccttacccggatgatggcatggggtatggcgactacccgaagctccctgaccgctcacagcatgagagagatccatggtatagctgggaccagccgggcctgaggttgaactggggtgaaccgatgcactggcacctagacatgtacaacaggaaccgtgtggatacatcccccacacctgtttcttggcatgtcatgtgtatgcagctcttcggtttcctggctttcatgatattcatgtgctgggtgggggacgtgtaccctgtctaccagcctgtgggaccaaagcagtatccttacaataatctgtacctggaacgaggcggtgatccctccaaagaaccagagcgggtggttcactatgagatctgaggaggcttcgtgggcttttgggtcctctaactaggactccctcattcctagaaatttaaccttaatgaaatccctaataaaactcagtgctgtgtt

SEQ ID NO: 218398 - DNA, 478 bp, Homo Sapiens; identical to SEQ ID NO: 47980
  misc_feature (146)..(146): n is a, c, g, or t

SEQ ID NO: 218399 - DNA, 501 bp, Homo Sapiens; identical to SEQ ID NO: 51111

SEQ ID NO: 218400 - DNA, 417 bp, Homo Sapiens
ctggcaagcaagtggtatagtctgtgaagcactgcagcgagcagcacctggatcttgcctttataagaacattttactacctgcagctttgagtcttgccctacattttgggcatgacataagatgtgtctttattcagctcgtcgtgaagatgctgctgctgaatgggtcagcatatctctgtttgcatggtttgcaggaggtcggttttcatggtcattcagttccacagatctgaatgattactgtctgtctgtgtcttttttccatgagaaatcactgttgcaaattgcctataaattgactctactaaaataacaatgtttcagtctgaaaatttgaattgaaaaaaatgtataatataaaattgtaatacactcaaatgattataaaagtaaaagttggtaatttaggcag

SEQ ID NO: 218401 - DNA, 501 bp, Homo Sapiens
cactgaagcaggatttcattcctagcttagctgaaccaaagaccttgcagaccctgtgtggcagtgtctagagctgtgtacctagccttttctaccaaagagcaaagctacacaaagaaaattcctcagtttcttgaaaataagggcctgacttggcctgctacttataactgatctatatttcatgtattccagaaaattggaagcagtctggaatggttgtcctcaaattactgagcagacacaccccctgcagatcttgttaaatatagattctcatgaactggatggggtggagcctaggattctgcatttctaaccagctcccatgggcagggcagcttccaattcttgttcaggggccacattccaaaaggcctctctgaaatggtagaaattctctgaggacctgattaaggctaggccctaattgggcatcctccaggatccattcccaagctcccaattccacaagaccagtagagctggttttattttggt

SEQ ID NO: 218402 - DNA, 497 bp, Homo Sapiens; identical to SEQ ID NO: 48311

SEQ ID NO: 218403 - DNA, 500 bp, Homo Sapiens; identical to SEQ ID NO: 53827

SEQ ID NO: 218404 - DNA, 463 bp, Homo Sapiens; identical to SEQ ID NO: 60625

SEQ ID NO: 218405 - DNA, 500 bp, Homo Sapiens; identical to SEQ ID NO: 52295

SEQ ID NO: 218406 - DNA, 500 bp, Homo Sapiens
acttgtaaggaagcttggtgcagacgatgtaattgattacaaatctggaagtgtggaagagcagttgaaatccttaaaaccatttgattttatccttgataatgttggcggatccactgaaacatgggctccagattttctcaagaaatggtcaggagccacctatgtgactttggtgactcctttcctcctgaacatggaccgattgggcatagcagatggcatgttgcagacaggagtcactgtaggttcaaaggcattaaagcatttctggaaaggagtccattatcgctgggcatttttcatggccagtggcccatgtttagatgacattgcagaactggtggatgcgggaaagatccggccagttattgaacaaacctttcctttttctaaagttccagaagccttcctgaaggtggaaagaggacacgcacgaggaaagactgtaattaatgttgtttaaataaaaatgcagtttagtgattgttgacgttctt

SEQ ID NO: 218407 - DNA, 500 bp, Homo Sapiens; identical to SEQ ID NO: 46774

SEQ ID NO: 218408 - DNA, 473 bp, Homo Sapiens
cgggacccggtctctgcctcctggctgccctcctccctggctgtgtaaatagtctccctatcccacgagggggctttgatggccctggagatcctacagtaaataaaccagcatcctgccgcccaaagccgcctcttctcagttgccaaacgaggggcctgccccccgccctaccggcttttggattctgggaggggaactctgcctccctgcaaatcttgcagcccctcctgcccagggcacccctcaaggactgcccccgatagctctactgttcccttggccacgaaggtgcccccctcccagatgccctggccctaggcctgactccggccaggagggtcagaagaaggacaaaggggagagctgggacaaggccttgcccccttcctgccatctccccaacccacagtctctccacctttgcttctgaattcttgtttttgagcaataaacagaaaatcaccacttgt

SEQ ID NO: 218409 - DNA, 502 bp, Homo Sapiens; identical to SEQ ID NO: 43720

SEQ ID NO: 218410 - DNA, 500 bp, Homo Sapiens
ggggccccgccagcatccaggtggccctgtcgaggaagtctccctacctgccctcggcccaccgggtcagcgggctcatgatggccaaccacaccagcatctcctcgctcttcgagagaacctgtcgccagtatgacaagctgcgtaagcgggaggccttcctggagcagttccgcaaggaggacatgttcaaggacaactttgatgagatggacacatccagggagattgtgcagcagctcatcgatgagtaccatgcggccacacggccagactacatctcctggggcacccaggagcagtgagtcccccaggacagggaccctcatctgccttactggttggcccaagccctgcctgactgaccaccccctcagagcacagatcagggacctcacgcatctctttctcatatacatggactctctgttggcctgcaaacacatttacttctcctcttatgagactatttatctttaataaagcactggatataaatc

SEQ ID NO: 218411 - DNA, 500 bp, Homo Sapiens
ggttttccccgttacagtaaacagctttcactaacgtatacaggtatttcatacacatctaaacacacaagggtaagttgtgacctgctacacatagggtctaaagtggtgtaattgtgattttcctgtgatactcccaagaaaactataaatagtgaaccccatgcaagtactgggaagcactagtcttttatcacaggttgaacctgaggaggtttaactcttgacattagtatctgtaaagagcgtacggctctttttgctatgttttctccacaactgacatgcacttggtgtgggagaattctgatggctgtctgacctaagagtgataactactattcaaaatgtgggtaccttttcagtaatactgagttacacatttaacattaaaaaaacaaaaacgtggatcatccacagctttaagccggaaggcagaagggagtgtgtctgaatgttaatgttttcagttatactattttgtgtttctcccgctgtac

SEQ ID NO: 218412 - DNA, 499 bp, Homo Sapiens
agaaagcagaggaaatggccctgagcctcacccgagcagtggcgggcggggatgaacaggtggcaatgaagtgtgccatctggctggcagagcaacgggtgcccctgagtgtgcaacataagcctgaggtctccccaacgcaggacatcagattcctcatggtgcaaaatggccattccagctccatccagccatcacatcacaggaggaagggaagaaagacacccctccacactcttctaaagagcatagctcaaaaattgtacacacttcttccgttaattcctgtggaccagaactgattcccacagctacagttcagcttgaggggagactgtatagccaagatattcagctagaattcaggggttcgcttggtaagggaagggaagagaatggatactgtcggtctgtgctccaggagacttaaactcaatgctgaaacactttgcacaatgcctggcgtgttatgcactcaataataaacattagtgtctat

SEQ ID NO: 218413 - DNA, 500 bp, Homo Sapiens; identical to SEQ ID NO: 49273

SEQ ID NO: 218414 - DNA, 500 bp, Homo Sapiens; identical to SEQ ID NO: 46044

SEQ ID NO: 218415 - DNA, 500 bp, Homo Sapiens; identical to SEQ ID NO: 49413

SEQ ID NO: 218416 - DNA, 475 bp, Homo Sapiens; identical to SEQ ID NO: 55909

SEQ ID NO: 218417 - DNA, 469 bp, Homo Sapiens; identical to SEQ ID NO: 40608

SEQ ID NO: 218418 - DNA, 500 bp, Homo Sapiens; identical to SEQ ID NO: 44069

SEQ ID NO: 218419 - DNA, 615 bp, Homo Sapiens; identical to SEQ ID NO: 49198

SEQ ID NO: 218420 - DNA, 551 bp, Homo Sapiens
  misc_feature (374)..(374): n is a, c, g, or t
taccatattccccccttccctccaatacatcttatagggctgctgggtacagttgttcaggctgtgcactgcacaagggcaccttgtccaaggagacaccactttcacccaaacttgtatatttattacaattttctgcatcttgaggaaggggcgtcattttcctgttcgcacaaaggcaccacaggggctaacagtgggcctgcaatcttagatcccatccttgccttcttcgagggatctcttgggaccctcctggttttaactgggaggcccagaccaactcctttcctgcaaaccaccctccaaggcctgtcccacacgatcaaggcagggaaagataggcaggagtcccctcacgaagtcctcaagtnctggcccctctggcgctctggaagcggtactgtatctctctccaaggcctggtcaagcactaagtgcatttacaaatctctgagaatgttttttttatactaaaattgaccattatattctactgtgagaagtgcagtctgcactatattgttttaaaaacgaagagaaagaagaaa

SEQ ID NO: 218421 - DNA, 605 bp, Homo Sapiens
caacaaggaggcggaaaagttccggaaccccaaggcatccttgcgtgtgcggctctgtgacctcctgagccacctgcagcggagcggtgagcgggactgccaggagttctaccgagccctgtatatccatgcccagcccctgcacagccgcctgcccagccgccacgctctgcagaactcagattgcacagagctagactcgggcagccagagcggcgagctgagtaacaggggacccatgagcttcctggctggcctgggccttgctgtgggactggccctgctcctgtactgctatccgccagaccccaagggcctgccagggacccggcgcgtcctcggtttctcgcctgtcatcatcgacagacatgtcagccgctacctgctggccttcctggcagatgacctaggggggctctgacagaccctggacccagggcctcacctgccactcaaccaaagagtcctcgagccggcccgccaaggggactgctgcttctttttctaaatgcatatttttcattatttataatttgtgtaaaaaacacaccttcaccttacaaggtgctgaccatattaaatgttcaggttctctcagccaaaaa

SEQ ID NO: 218422 - DNA, 335 bp, Homo Sapiens; identical to SEQ ID NO: 44914

SEQ ID NO: 218423 - DNA, 601 bp, Homo Sapiens; identical to SEQ ID NO: 49938

SEQ ID NO: 218424 - DNA, 617 bp, Homo Sapiens
gtgtacctaattatgtatagcagtgtagtctcaattatatctgaaagtaattgtgactaacaagtatgctttgccttatttccacatttaaactacctgttaatataagggatttgtagtatcagcttgttgagcaatgactttgaatctagttttcagtgatcagaagcagcagttatttgagtgtatgaatggaatgatgatcactgtgctataatgtactgaaaccaccatattacagaaatatttactacatattttccatctgtagtttctcagaagggctatggattagtttgaactgtcaaatccttgcatacttctgtgacacccctgcccattttctgtctttaattaaccaaggtgttaggtgtgactgtcacaactgttatgttttccagtaaactagaagtacgatatttgataattatatttgtatttcaccacctaaatgtaatgttgattcctcaagaatgaaatgaaggcactacattgaaatatgttttgtataaatttgtcatgttgaacagcattttagcatggtaagttcccttagctatatgaattttggcatgtttcagagagatcagtaaataaaatattagataaaatataaa

SEQ ID NO: 218425 - DNA, 631 bp, Homo Sapiens; identical to SEQ ID NO: 49204

SEQ ID NO: 218426 - DNA, 534 bp, Homo Sapiens
tccccccacggcggtcccatctactctgtgagctgttcccccttccacaggaatctcttcctgagcgctgggactgacgggcatgtccacctgtactccatgctgcaggcccctcccttgacttcgctgcagctctccctcaagtatctgtttgctgtgcgctggtccccagtgcggcccttggtttttgcagctgcctctgggaaaggtgacgtgcagctgtttgatctccagaaaagctcccagaaacccacagttttgatcaagcaaacccaggatgaaagccctgtctactgtctggagttcaacagccagcagactcagctcttggctgcgggcgatgcccagggcacagtgaaggtgtggcagctgagcacagagttcacggaacaagggccccgggaagctgaggacctggactgcctggcagcagaggtggcggcctgaggggtcccgggaggcgggtgcaagccttcgctgtgccgagccttgtgtttctgacgcaagccaaatgaagaaaagcaaagcttaaaa

SEQ ID NO: 218427 - DNA, 536 bp, Homo Sapiens; identical to SEQ ID NO: 52322
  misc_feature (73)..(73): n is a, c, g, or t

SEQ ID NO: 218428 - DNA, 518 bp, Homo Sapiens; identical to SEQ ID NO: 51760
  misc_feature (28)..(28): n is a, c, g, or t

SEQ ID NO: 218429 - DNA, 432 bp, Homo Sapiens
tgcgccagaagtttctatcattccatggagaaagctgtgttccaatgaatcctacctcttgcccagtcccaggcagagtaagcagggcccacctagggaccaagaaagagtaggaagaaggggacgagccgggagcaaaaccacctcagacacccgggccttctcagccttctccccgcggccagctgggtctccggggaccctgggccctgggccgcccattcctggccctcccgctgcatctcagacctgacacccaacggggggatgtggtggcctgtgcccaccttctctccctcctcccgacccgccccctcgcccccacccctgtgtgtttcgccagttaagcacctgtgactccagtacctactactggttttgggttggttgttctgtcttttttttaattaaataaaaacatttttaaaaaaa

SEQ ID NO: 218430 - DNA, 479 bp, Homo Sapiens; identical to SEQ ID NO: 48395

SEQ ID NO: 218431 - DNA, 500 bp, Homo Sapiens; identical to SEQ ID NO: 53605

SEQ ID NO: 218432 - DNA, 485 bp, Homo Sapiens; identical to SEQ ID NO: 53905

SEQ ID NO: 218433 - DNA, 423 bp, Homo Sapiens; identical to SEQ ID NO: 49243

SEQ ID NO: 218434 - DNA, 454 bp, Homo Sapiens
cggagaccccagggcctctcaggagacagtgaggctgcccctcctaccacctacctcattctgcctactcaccccaggggccacagccacagcctgctggactcaggactgtcctgtcaactccagacaactgaataaacaggccgggtacagtggctcgcacctgtaatcctagcactttgggaggccgaagcgggtggaccacttgacgtccgtagttcgagaccagcctggccaacatggtgaaaccccatctctactaaaaataaaaaaattagccaggtgtggtggcacacatctgtagtcccagctacttgggaggctgaggcaggagaactgtttgaacctgggagacagaggttgcggtgaaccgagatcgtgccactgtactccagcctgggtgacagagtgagactccgtctcaaaaaaaaataaaaaagataaccgaggaaaa

SEQ ID NO: 218435 - DNA, 362 bp, Homo Sapiens
cagccaggccactcggcacctctccgagccatgtgagccccctgatgccaccgagcaggggcagcttcatgaccgatgtctggctgaggctgtggcggacactctcggggttgtctgcaggagagcaagccaggaggacatgggcctggacgacacggcctcgcagcaaagtgtgtcagacgagcagtgacgggcgtgcggccgggcggggaggctggctcccccacacctcccacctgcattgctctccctcgtgctccccaaatcaccacaaccaaccaataccgcgatccatgagggactcctcctgtggaaaaggagagctgttccagaacacagaactgatctcaggtttttgaaaa

SEQ ID NO: 218436 - DNA, 470 bp, Homo Sapiens
  misc_feature (183)..(183): n is a, c, g, or t
ctgcagttgtctattttgatttaaaagatccttttacttcttagaagagggttcatcatgatacccacacaaacttcggacaaacagcagccccagtgatctctcatctttgttcagcagctacagaacacaggcttctgtctggacttcagaatcaagaatcctatgggctgaaaggaattntacgcaggtgggaaatcttaaacaaaagctcaatccagtctctaaataaacttatctcttagagttcaacattttcactagcctgaaaagggcattatttcctatttggaccccaattctgaatgtatcggcttcatcagaaacgccttgcgtccctccaggcctggaggcacaaattccagcttatggcgcctgctatggcagagcccactgctggggccccagctccacccagtccaggtttgtcccaccagctccactgaaagcaggaaaaggtgtatgttctt

SEQ ID NO: 218437 - DNA, 499 bp, Homo Sapiens; identical to SEQ ID NO: 49849

SEQ ID NO: 218438 - DNA, 500 bp, Homo Sapiens
aacttgtgctcagactggtgaaactgagagtcaggcttttacattttaaagaaaatacagttttcattctaattcaggtgtctacttattttatgtaagaataattttagatttcccccccaccatgaagtttcttcctatttttttatgctgtaacttacccccaatctttatctctggatttttactctttaaattttgaagttgactagcattttcaaacctttattttatacccttgtcttttatattaactttttcttattattctttaggtaagaatgattgatgttggctgatattggagtgctcattcacatgaagtggatagatacttctcaagacatcacacagcgtgagtcaatcaaggagggaagccacaagcagactgacaacgtttctagcaggatcaggtgagctgtgtccagaaaaccaacgagaaggagtggaaggaggaatgaacgtttcattctcgttaataaaggcattatcctaattat

SEQ ID NO: 218439 - DNA, 581 bp, Homo Sapiens; identical to SEQ ID NO: 45920

SEQ ID NO: 218440 - DNA, 500 bp, Homo Sapiens
gcaggggacgagccagccgagagcccatcggagaccccaggccccagcccggcaggacctacaagggatgagccagccaaggcgggggaggcagcagagttgcaggacgcagaggtggagtcttctgccaagtctgggaagccttaaggaaaggagtgcccgtcggcgtcttggtcctcctgtccctgctgcaggggctggggcctccggagctgctgcgggctcccctcaggctctgcttcgtgacccgtgacccatgacccacagtgctggcctcctgtggggccactatagcagccaccagaagccgcgaggccctcagggaagcccaaggcctgcagaagcctcctggcctggctgtgtcttccccacccagctctcccctgcgcccctgtctttgtaaattgacccttctggagtggggggcggcgggcagggctgcttttcttagtctgataccaagcaaggccttttctgaataaattcatttgactttaaaa

SEQ ID NO: 218441 - DNA, 445 bp, Homo Sapiens; identical to SEQ ID NO: 46456

SEQ ID NO: 218442 - DNA, 500 bp, Homo Sapiens; identical to SEQ ID NO: 53916

SEQ ID NO: 218443 - DNA, 501 bp, Homo Sapiens; identical to SEQ ID NO: 50655

SEQ ID NO: 218444 - DNA, 434 bp, Homo Sapiens
ctgcttcttgaaggcttgcacttccagaattgtgtttccttctactgtgccattcatatatatatatatatatatatatatatatatataatcttgaccagtcctggtcatttgctcccctccttgtctgtggaccatgataagcccaagtagtgacttcagagctgggtaacagaaattaaagtgaaaagacctttacgtggagaatttgcatgcgtaatataggaaggtgttctttaggtatgttacaggattactttaaaccatttgactttcgctccaaagttatgttggtagtatagcaaattatgatgaatagctttaattgtatgtttaaaagtctcatatgttcacatgcttaaatctgggtatcagaatttaagcaattcttgaaatgtattgtctccttaatatactaattacaaagcaaaaaa

SEQ ID NO: 218445 - DNA, 496 bp, Homo Sapiens
aaaccagtccagtgtccacttgccagaatttcagctccttttttctgtggtgaggcaaaggctagaaataaaatggaatccgcgcccaagtgggacccaagcaggcatctttcggtggagaaacgccccccagtgtccttgacacagctgactgctggcatgagcccaccctctgcctgaagatgcaggaccatttttgccttaaaagttggggaggagggacatgtagattgtgtgcattgtgcatagtcaaggaaatcctagggccacctccagttcatttgtgtgggaacaaggatattttatagatacaaattatttttatgctgtgttgaattaatcaattaggagaggaaggggaaatcacttccttcaaactttttatctgattgtctaaaattctaaccatgcttttaacttattatttttacccagctctgaaggtcattgttcttgcctgtgtttgaataaaatcatattggtgtttgtaaaaaaa

SEQ ID NO: 218446 - DNA, 499 bp, Homo Sapiens; identical to SEQ ID NO: 48630

SEQ ID NO: 218447 - DNA, 439 bp, Homo Sapiens
  misc_feature (87)..(87): n is a, c, g, or t
  misc_feature (155)..(155): n is a, c, g, or t
  misc_feature (186)..(186): n is a, c, g, or t
  misc_feature (255)..(255): n is a, c, g, or t
taatgctagatatctatttttaaattccacgtgtgtaaacatgctatactcttctgatattaaacttactaagtacataattccagngcccccttttctcagaatttttttttgtttttaattttggggggtatagttttggttttcctagtgcncattagtttgtgcaagttcttgcaatgttcncagcaaatatagatttattttgctttgaataatgcagcccataaactttattggtttgaaagttcttcnctaccatttaatcacagcttctaaacatgtgaaacaggatctttaaaaaaattttccatatgtcaaagtgtagagatgtttctagcagcatttatcttgtcatctatagattgaacaaaaaagtggtagctgtgaaattgtgatttataataaatacatatttggtcttcatcccctggtaaaa

SEQ ID NO: 218448 - DNA, 500 bp, Homo Sapiens; identical to SEQ ID NO: 52050

SEQ ID NO: 218449 - DNA, 569 bp, Homo Sapiens; identical to SEQ ID NO: 46015

SEQ ID NO: 218450 - DNA, 595 bp, Homo Sapiens
aagatagtttaagcccaagagtttaaggttacagtgaactgtgatcacgacattgcactccaacttggataacacagcaagacactgtctaaaaaaaaaaagttatgtatgtgtaatatttttttgtatatattgtatttgcccaaatacaaggtgatgcatacacaatcgaacacttccaaaatgacttagcaactatgtcatatatgaagttagagaaaaataatttataaaggaactataacactgttacttccataaactaatctcagtacctctcatgtcacatagcacacaccagttctgtactgtaatttattccacaccctttagaacgttatcatgatcaagagcagaaaggagagccatgacacattctttatctcctcaaggatgtgaggaagaggtggtacaagaataagaggtggctgggccaggcatggaggcttacgcctataatcccaacactatggaaagttgaggcaggtagatcacttgaggtcaggagttcgagaccagcctggccaatatggtgaaaccctgtctctactaaaaacacaaaaattagccaggcatggtggcacatgcttgtaat

SEQ ID NO: 218451 - DNA, 442 bp, Homo Sapiens; identical to SEQ ID NO: 53205

SEQ ID NO: 218452 - DNA, 496 bp, Homo Sapiens
tcagtgcactcaccctttgaggctctggttcctccaaacaatgattcgttgtctggattggctggaactgtcacccccgcaattctactccccacccacccatgtgaccttaatgtcagttgctggtctgttgctcttcggggagggagagatggcctggatacagagctaagcaaatgcttctttaagagccactgcacctggccctgttttcatggcttttatttcctttcatcccacacatttgtctgcagtactagacatgttttacaaatcaacaagtttacacaagtatatgcagcttgttttggggggaaaggagacaaaatatgcatattttctgtgtggatttgtgcctcttaattgtgtttctagtctctaaggtgaccctttaacctactcaagatggggcccagagaagtggcctgcgttacagatttattttggcatatgtactaagttccattttctctttacaaataaagtgttttctttc

SEQ ID NO: 218453 - DNA, 438 bp, Homo Sapiens; identical to SEQ ID NO: 55423

SEQ ID NO: 218454 - DNA, 639 bp, Homo Sapiens
cggcccgctctagaactagtggatcccccgggctgcaggaattcggcacgagaagaagtcaaattttatttgtttgtagatgacatgaccttctgtaaagaaaatcacaaagagtcagccaaaatgcaactggaactaacaaacacattcagtttatttgcagaatagaataacagcaccaaaaattagttgaatttccatacattaacaataaataattttaaaagaaaattaaaaaccaattccatttgctaaagaacttaaagtaagaaatatttaggaataaacataaaaagtgaggtttgtaccttgaaatctataaacattgatcaaaatgattaaaaacatgtataaatagatataaatcccatactgattggaaaaatgaatatcgctcaatgattatatacccaattgtgatttagattcggtacaatactcatagaagtctctataactttttgttaaagaaacaaaaaacaggccaggcacagtggctcactcctgtaatctcagcactttgggaggtggagtcgggtggatcataaagtcagaagatagagaccattctggctaacacggtgaaacccagtctctactaaaaacacaaaaaattacccaggtgtggggcacacaact

SEQ ID NO: 218455 - DNA, 501 bp, Homo Sapiens; identical to SEQ ID NO: 42911

SEQ ID NO: 218456 - DNA, 496 bp, Homo Sapiens; identical to SEQ ID NO: 48700

SEQ ID NO: 218457 - DNA, 500 bp, Homo Sapiens
cactgttccctggaccatacacaggctgaagcagaggaaatcccaaagcgggtgcccatccagcccaggtcccaggatccctgcacccatttctgtgacctggggccccagccgtgctgtgctgctcatcccagcagagggacctccctcgtccagcgacttccctttggccatagaaagaaatggtgagcatgagactgggcacagcctgagggcgtgggcagcttcccaccctccctgggccttggaatcccccaaggctggttttcttcctggagacccccatgggcaacttggcaggagagatggtgccgtaggaggtcgtggatggttgatgccaagagaggccctccacccgtggtgggcaaatgtccaggcctgggctggcagcccagggctgtttctgggtgctccctggccccagggtggcgtctggttaccatggctgtgtgtgtccatgtctgcaagcagttcttcaataaatggcctgcctcccccaa

SEQ ID NO: 218458 - DNA, 447 bp, Homo Sapiens; identical to SEQ ID NO: 52237

SEQ ID NO: 218459 - DNA, 413 bp, Homo Sapiens; identical to SEQ ID NO: 55544

SEQ ID NO: 218460 - DNA, 461 bp, Homo Sapiens; identical to SEQ ID NO: 45878

SEQ ID NO: 218461 - DNA, 500 bp, Homo Sapiens; identical to SEQ ID NO: 42347

SEQ ID NO: 218462 - DNA, 471 bp, Homo Sapiens; identical to SEQ ID NO: 53013

SEQ ID NO: 218463 - DNA, 463 bp, Homo Sapiens; identical to SEQ ID NO: 46389

SEQ ID NO: 218464 - DNA, 500 bp, Homo Sapiens; identical to SEQ ID NO: 45285

SEQ ID NO: 218465 - DNA, 501 bp, Homo Sapiens
actcaataaaatgaacctgtatggcaaatacttgaaatggaactcactccttccactttccccctttcttctgtcccaggaaatagatcatcttttgaaaagactcttgtctaggaaaagttgtgtccttttcctaatttaacgtgttctttcttaatgaagttttaatttatttttgttgagattttgctagatggcttttgcatcccctgtagatggtgagtgttggcggtgatgtccatctcggcgttcggaggccccacggtcccgaggctgggccggggccccccagggtggctgtgctgctgcctgtaggagggtgcgggttgtgctgtcatcctcgggtttgcacgcccttttttaggagcctgtggacatctgtggttttgtactttggggcttcaggggaggtgtttaactttctagtgattgatgattgtcaggttttgaaataccaaagcttttttgttctgtttttaaataaatatctttcaaactttc

SEQ ID NO: 218466 - DNA, 500 bp, Homo Sapiens; identical to SEQ ID NO: 44282

SEQ ID NO: 218467 - DNA, 500 bp, Homo Sapiens; identical to SEQ ID NO: 47964

SEQ ID NO: 218468 - DNA, 501 bp, Homo Sapiens
ggccggatgctttaaaaaaaattgctttttaaagtgtctgtcgttgaaagaaattagtcttacccttgaagtcaggggcgcgtcctcgcaatacacatcttgttagggaaagtgttcggctccagctagggttctacaaggcgtttcttgttcaccgccggagggaagcaggctccggagtgactgccttctgaaagtcggtcttgtaacaattggatggatgcctttgaagagcccctgtccctattctatgcttgaaaacagcgtgcagtcctaatgttcaagaaccacgaccacataaaaacattgctccccttctgctgctttgaaaacgacccctaaattccgtgtagaagttgccaggtcgtcttgacgtacacttcgtttgtatgatgtttgtctgtcaaatactgtgatggaagagtgtatgcgggggaggagcagggaatttttaaaagcattttccggtcacctcagactgggagatcatgttctttcctg

SEQ ID NO: 218469 - DNA, 500 bp, Homo Sapiens; identical to SEQ ID NO: 53648

SEQ ID NO: 218470 - DNA, 500 bp, Homo Sapiens
accaccaaataaagacctttgtgtgtgtttggtgggtggggggggggcaggggtctttctcttatgaacataaatctgtgagctgaagtctcattcccctgttcctccctacccccaaagaggcacagagtgaagggacttggggggcacagctcagcaacccagtgggagttagcaccccctcccaccttatgatgtgtgtggacctggccagtgcccctctgaacgtatcattattagtgtaattatcatttattttgtgtatttgtcacattgtgtgcatgacagcctttgttaagggtgtctgaggagtatggagctgacaggggcattggaatgccaggaaagaacttcttcaactgagatcaaggcttcctggagggaaccactgcaaaaaggccatcaggcagttttcaagttatgtgacagagggcaaagacggccatagggtgctctgagttttgggatggtcacatgacacaatccagcacttgaacctg

SEQ ID NO: 218471 - DNA, 500 bp, Homo Sapiens; identical to SEQ ID NO: 53134

SEQ ID NO: 218472 - DNA, 466 bp, Homo Sapiens; identical to SEQ ID NO: 53492

SEQ ID NO: 218473 - DNA, 500 bp, Homo Sapiens; identical to SEQ ID NO: 42994

SEQ ID NO: 218474 - DNA, 500 bp, Homo Sapiens; identical to SEQ ID NO: 42963

SEQ ID NO: 218475 - DNA, 496 bp, Homo Sapiens; identical to SEQ ID NO: 55695

SEQ ID NO: 218476 - DNA, 501 bp, Homo Sapiens; identical to SEQ ID NO: 51789

SEQ ID NO: 218477 - DNA, 500 bp, Homo Sapiens; identical to SEQ ID NO: 50860

SEQ ID NO: 218478 - DNA, 415 bp, Homo Sapiens; identical to SEQ ID NO: 45521

SEQ ID NO: 218479 - DNA, 500 bp, Homo Sapiens; identical to SEQ ID NO: 44532

SEQ ID NO: 218480 - DNA, 501 bp, Homo Sapiens; identical to SEQ ID NO: 53775

SEQ ID NO: 218481 - DNA, 501 bp, Homo Sapiens; identical to SEQ ID NO: 50592

SEQ ID NO: 218482 - DNA, 500 bp, Homo Sapiens; identical to SEQ ID NO: 54873

SEQ ID NO: 218483 - DNA, 498 bp, Homo Sapiens; identical to SEQ ID NO: 50309

SEQ ID NO: 218484 - DNA, 500 bp, Homo Sapiens; identical to SEQ ID NO: 41576

SEQ ID NO: 218485 - DNA, 459 bp, Homo Sapiens
tttgccacaatgaaaaaaaaagaatgtgctgggatgagtacatctgagaatgggatgactgtagacaagcggccagaaagagaaatgggttttaatggacaagaatttaatgaactggcaactcactcttcccctaatctcaggcccttgttataaaaagttatcacagtggcgtaaaacctccatagaactctcattaacctcctcctggttttcattgctgccgctgttcatgacagacatatttctgtaccaaacttgatacaccatttctaccaaacagtatatggacaatgttttgagttatatattccaaatgtgaatggtaggatgtcaggctcaggtgcagttaacaaaggggatatatacttttggacatttctggtgcttacagaccaatcacaattttccaggacctaacctttcagcctcacatagagaaatttacaaacttaaatg

SEQ ID NO: 218486 - DNA, 442 bp, Homo Sapiens; identical to SEQ ID NO: 61828
  misc_feature (382)..(382): n is a, c, g, or t

SEQ ID NO: 218487 - DNA, 454 bp, Homo Sapiens; identical to SEQ ID NO: 38524

SEQ ID NO: 218488 - DNA, 455 bp, Homo Sapiens
ttttccaaagaataattttattcaaaatggggaagggttaggctgacacacaggtccactcatcttcgtctcagcaactgctccccacaaggggacctgcaggacttccaactcccaagggcttgaaattagtctcttaagccaactgctgggactcctagagggctgatggtttatgagatgccactgttgctgctgctgctgggcgtgggcgaggtcagctgccccgatgtccacggccggcgtctctccgttggaccgcccctcccgaagaccgccgcactctagtaagtggttgctgccgcccgacccattctggatggctgaaccgttactttttgtctcagtcccagattcttgcatcatgactcaaaaaccttttttggcttctgtaaagcaatcttcagttatagtcacctcaaaaggtcacgtcttacccctgaaattttaacgtg

SEQ ID NO: 218489 - DNA, 442 bp, Homo Sapiens
tttttttttttttttatggatatctttctgttgtaatgcttttttttttgaaatgtccatttctaagacttttccagatacttcatccaccatggactgttttccataaattttcttatgaccttcctttagtttccattcaaattcacctatgtcagaccgaaaacggccatccttgcataaggctccttcaatagtctcacccttcaaggcataaatacaaagtttacttcctttttcatgaagttcgttgatcttaacaatcttctttcttgtccttcctatagcaacaacatgaaaaagaatgcattccatgtttggattttcacattggcgtaatatgtgtccatcttctttgctactctttctttgaccaaaggtaattttaaaatgagaatcactatgcaggcacttgagaggcattcctaaatttatatgtcca

SEQ ID NO: 218490 - DNA, 406 bp, Homo Sapiens
ttttttttttttttcttgacaacatactctttattccctttgcagattcgcctcctactcccccagcagaggttcctggatcagcaccaaacacactgatccttaaatcctcatctcagggtccattttcctggaatccaagacaaggaagcactcccgaatctccccgaggattctgcctaagggcaacactggccctcgtacccgaggggagagctgtgtatgttcctgagctgcaggtgggtgtctgcctgcctgccagcgagacctctggaggggtctgtgccgacaggtctttccacaatgagagcctgtagggatggagccaatcacaccatttattgtgccctggttcttacgcccactcttgctattctgcatgggttaggatcggggtcttccacga

SEQ ID NO: 218491 - DNA, 518 bp, Homo Sapiens
  misc_feature (254)..(254): n is a, c, g, or t
tttttttttttttttttcccagtttcaggtatgtctttattagcagtgtgaaaatgaactaatacagactggaagccttgtgacaggaaaactgaacatctgagacatctataggaaaaaaagatctgcttacatccagtccttggagttccagtagactgatttattcaccaacagcattgctcctccagctccattccaggagacaggcaccccagaagtagcaggactggtagacatcactagtattgtanatgtgttgtgcatgtatgtgtgttgaggaagaggatggggaaaacaatgatggtggtcaccaggtaagatgggacccaggaagggattgcaagtccaggccccatgaacaccccccaagaatgcccctcctcttggaaataaaagtggttctggatccagggagatcaacagttgcaagctgatattaagagttgtctattggatctgttctaagggatatgttatgtgaagccaaattaatgaagttaggaagtcacattaca

SEQ ID NO: 218492 - DNA, 527 bp, Homo Sapiens
tttttttttttttattaacactaatattttaactacaattacagcatatgggcaatacagaatttacctaaaaggatactaatttggaacaaaaaaaatcacctttcgcacatgtatcatgtcacaaccagtttgccattgaaacaaatagaggttgcaaatattgtcagattgtcaggctgtaagaaaggatgaaattcatttcccattgcatcatcttgtggcccatggatttcaagtgccttagccaaaatcatatagctagttagcagtagagccgagactcagaaaaaaacaaagtaaaacaggcagactgaaacaaaaagtcttctaattcccagtccacatgtaaaatttgcttcatataaacaaacctaattgtaaatggcactgtagcaacaggcttccttttaacacttggattggtaaaggtcttgtttgcaacatattagaagtattatttttctctttcccccccaccccacccccgacagagtaagactgtctccaaaaaaaaaaaaaaaaac

SEQ ID NO: 218493 - DNA, 568 bp, Homo Sapiens; identical to SEQ ID NO: 60670
  misc_feature (337)..(337): n is a, c, g, or t

SEQ ID NO: 218494 - DNA, 618 bp, Homo Sapiens
tttttttttttttttttactttggattatgtttaattaagaaaagcaaagtgcatacagagatttataactttaaaaacaaaaaaaaaaagtctttttatatgatccaaagaataaactcaaaagtccatgacaaatagaagttctaaacaattgtttacaaatactttaggtataattacagtaaaagtcaagttcatttgaaatcaccaaaaaaaaagtttcaggttggacacggtggctcaccacctgtaatcccagtatttagggattttcttacaataaaaggcatacaggttgattattttaggcatacaggttgattattttaggcatacaggttgattattaaatgacatgattgcccatatataaaattttaaggaatctaaaaacaaaaaacagcttccaaaactagtgagtttagaagcacagaggatgcaacataaatatatgaaaatcgattgtatttctatatagtaacaaaaaacaagtagacactaaaattaaaactactatgttgtttataatcattcgaaaaggtaaatacttagctataaatctcacaaaacatggacagaactcataagctgaaacctacacagtgctgaggaaaaca

SEQ ID NO: 218495 - DNA, 592 bp, Homo Sapiens; identical to SEQ ID NO: 61990

SEQ ID NO: 218496 - DNA, 348 bp, Homo Sapiens
tttttttttttttttttggatatctggacttagcagaatcttttcaaaagagtatgtaggtgggatataggaggtaaactaaagtgtaaaggccaggaaggtgatagaaagtcttgaattggctaaataactgtatttgatttatttaaacagtctgttctgctagtaccaaagttcttgaacttcatttcatgttataatcatctgtgagcttttaaaagtcctgatgccaggaagccagtgcaaaccaattaaatcagaatgtctgggggcaaaacccaggcatcagacctgtattagaggctccagtgggcttcaggcttgagcctcagttgtttcctcgtgccg

SEQ ID NO: 218497 - DNA, 526 bp, Homo Sapiens; identical to SEQ ID NO: 59646

SEQ ID NO: 218498 - DNA, 576 bp, Homo Sapiens
tttttttttttttttttaagtttctaccaaactattttattattcaattcattttgtaatgatagatcatactctcaaacaaattaaaacacagacagaaaaataaagacttacgtcatttgtgttaacatgccaagccatatcaccataagataccagttgtccattaacataacactgaatttcactgtttctccatcgattgtaaatgtggacaatgctgatcatgtaccacttaaataaaaaaattaaatatatcaatatgtaatgtttggttattatggtctaaaatgcaattataatattcataaaaccctacaataatatgctgacaggactattaatgatcatctaataccacttcctcaagttccccctcccatccctcatttcacagatggtagaagtggcacataaagaatattcatggagaagacaagaactacagccccttgacctccagagtaatattctttccactataccaagattcaaaattgtggaaatacaattcatttgtgttcattcatttaaaatttacattgtgccaggcactgcagatacccaaggctaacc

SEQ ID NO: 218499 - DNA, 403 bp, Homo Sapiens
tttttttttttttttttagcaaaggtaccatttttcacaggctattttctactttcataatcatctcataaaggcagtataggttcaaaaggcaaatttttaggagacaacctgatcagccaccaagaatcgtttttgatttggtatcaaaagacataacatttgatcagtttgcaattttgtttgggataaatatccacagtgatactttgactctgaaaaaacatcaaagtgccgctttgggggagatcatgaaaacacagcacgcaggcctaagagttgctaggaaggctatgacagacgggacagcagcaggttctctctcaagactagaccgtcaacagagcatgcagagaaagaggcacagaggctgttgcttcacaaaactgaggacggtcaggat

SEQ ID NO: 218500 - DNA, 452 bp, Homo Sapiens
tttttttttttttttttcagaggcttaaaaatatagtctttattttgggtggccatggatccaggtcaaaacaaagttaagaattctgtaactatagaagaaggtatcaaactgtagagggaggttgaaatgccattggtcgcataaagtaaaggagctgagactgtttgggctttgttttccctttgggttctatccacagttatgtttttgccagtcagtcagctctgctttccttcatgatgtcttcatatcaagatgcacactgagagagcagattgtacctgggaagctgccgtccttgtgacccaaagaaaagaacaaggcagaaccaggcaatggctctcaaagcctccacctttttacaccacatttcattgaccaaagcaagtcatatgaccaagacagatgtcagtgggtcggaaagttgcatccctctgcaggagcaggct

SEQ ID NO: 218501 - DNA, 467 bp, Homo Sapiens
ttttttttttttttcttgcactttgcatttaataatttaaaaggaaaaatttaacagatgataaatatcaaaccaaaaaagtcaacaaatcttaataatctcaaaatatacaagggcaaagtgatacataaaccaatacagaatacatttgtctgcacatttttgcataaattttaaaaagcatataattctgtaattttaattttatagagctttccctaaaatattttttattttatttaaaaatgagtttattttcaaataagaagattaagtctaaaaatcagtgcaaaagattgatggtgatgatgtatcaatgcaatttgatgcatccgtttcgctgtcttgcaaaaggtgtagtgaccaatgggctgtctgtactctcaatacagatgtagtattctgagaagagatcatttgttaagagcggatttaagacagagagtgtattcattctttcaaaaata

SEQ ID NO: 218502 - DNA, 437 bp, Homo Sapiens
tttttttttttttttttaactggcagaaggtattccaacatccattactcttcatactggccaaaaccaaaagtcattgaaaagagtgagtaaaacaaaacaaaacaaatcaggcagggcaaaaggtctccacactggtgaactgtattgtagactgaatgaaaagacagcctagcgcacatacaaaacatatcggatactgcagtggaagaactgtgttttgaatggatgactcctctgatacttgctttcaatcctgtgagaggaactataattcaaactttcatgatttttagtagaaagaaatgtatgggaaaagtgcagctaggaagattatacccagaaacaacacacatactgctcccatccagcaatgtgaagccatttccttttctttccttgcaggaatatatacatcccagctgctcctcgtgccg

SEQ ID NO: 218503 - DNA, 479 bp, Homo Sapiens; identical to SEQ ID NO: 60627

SEQ ID NO: 218504 - DNA, 435 bp, Homo Sapiens
gcacgagaagtgtagctagttgcttattaatttcactcttaaatatttttcacattcacagatcgggtgctaccaaggttttgcttttgcatggaaatgtctactgcacagttgcaccactgagaaggacaggtaaaggtggagatgtctttctttctcagcgtaggaaccaggagttctagttccatgggttaccagcatgcccttgagtaatcaatctgtctgttcctcatctgtaaaatggagaaaattatcagtgtcaagcttgagtgttgttaggagatttaacggaaatactaaatagaaagtgccaggcacattttaggtgtttggtgaacactggctgttgttgcttctcaagagttctatgctcctgccttttacctggagtcattagtgcaccacgtggcttttagataccctaccaataaaata

SEQ ID NO: 218505 - DNA, 406 bp, Homo Sapiens; identical to SEQ ID NO: 40232

SEQ ID NO: 218506 - DNA, 605 bp, Homo Sapiens
  misc_feature (1)..(1): n is a, c, g, or t
  misc_feature (460)..(460): n is a, c, g, or t
  misc_feature (467)..(467): n is a, c, g, or t
  misc_feature (489)..(489): n is a, c, g, or t
  misc_feature (536)..(536): n is a, c, g, or t
  misc_feature (587)..(588): n is a, c, g, or t
ngcacgaggtggagccccgtgattaagggatggcagaggaaggggacatgtcctttttttttttttttaacagaaaaacactcatttagatacctggtttagtaagacatctgaacaacatgaaacccaactatgtaaaagctttaaaaatccaggttatgaattagcctaaacctgtgcttatgttccattctgtttagaggaagggggatggaatccctttcacctttatatttttcatgacaagtccatggtcacatcaaaaattacttttgtctttaacacagttgaaattattaaatgttatctagacctaaccaaatcctatttccttaatgttatattcaggacagtgaaaaaaatactgttttcttttagcaaagtctgacttttaaggctcagtttttacctgattaaataaactgcccctgcttttgaggtactaaaaaattactttttngttccantgggggtcccattattactggnacttatttaaggtttacttttttatatggttttgggaaaaattttcncagcccgggccgccgggtgggcttcatgccctattaaattcccccagcctnnctttgaggggggggggc

SEQ ID NO: 218507 - DNA, 531 bp, Homo Sapiens; identical to SEQ ID NO: 59119

SEQ ID NO: 218508 - DNA, 473 bp, Homo Sapiens
gcacgagatttttggtgtattgctttttctaattgactgtttttaatgattttgatacattttaatgttgaaattaatattgaatgttagctatgaaattttagtattgaattttataatggaacagaacattggtaggtaacaagatgcaagaggatgtcaatacaagattgtctgcctgtttttctttgtaatttgtaattacagtttttgtaacttgtgattatgtttttaactaaatttaccaccagatacaaacactacttcttacacagagttatcctttatttatatcattaagacgtgaatgaaacatcatcctaacttacttccccaagatattgagaggtcatatctgtttttctttatcattcatttctttttctaaaaagttggttactgatatgcttttgatttcctatgactctattatgttgtacagaacatcttttcaatttattaaaaaaaatagc

SEQ ID NO: 218509 - DNA, 445 bp, Homo Sapiens; identical to SEQ ID NO: 61507

SEQ ID NO: 218510 - DNA, 504 bp, Homo Sapiens
gccatggacatgtttttagtacttatgtagtagtcagatgtattactcattttttctgtgctctggatcttatgctttgaatggctttttgtgaattccaatattttaaaaataatttacccctagcttcagttcttacatttaaatatttgttccttctggaattttagtgaatgtggacaaggttatgcttcagttgccttaactagttgccttggcatcattaataagtgttcttttcctctactgatttgaaatgccatttttaatgtattccctaacatatttgggtctgtttctggatcctctaacccactgttctagagagaaaggtgatcgttttagattatttgtctctctgtaatctaaaatccaaggtacacgctgggcacagtggctcacacgtgtaatcctagcactttcggaggctgaggcacgtggaacagttgaggacagaagttcgagaccagcctgaccaacatggcgaaactctgtttctactaa

SEQ ID NO: 218511 - DNA, 503 bp, Homo Sapiens
aaaagcaattttttcattttatttatttttgagacagggtctcactgtgttgcccagactggagtgcagaggcacgatctcggcccactgcagcctttgcctcctgggttcgattctcctgcctcagcctcccaagtagccgggattacaggcatgcaccaccacacctggctaaatttttttatttttttggtagagatggggtttcaggtttcaccatgttggccaggctggtcttaaactcctgacctcaaatgatctgcctgccttggcctcccaaagtgctgggattataggcccgagccaccatgcctcgcctaaaagcaaaattttaaataattaggaatcaggaaatgagtcttgggatgattctgatgatactttgtgtaataggctctttaaaagtatgacaatttatgggccaggtgcagtagctcatgcctgcaatcccggcactttgggaggccaaggagggaggatcacttcagcccaggtgttcgagg

SEQ ID NO: 218512 - DNA, 586 bp, Homo Sapiens
ttctggtaccagttttatttataattaaccacatacaaatcacttttctacaaaataatggttaacatctattccttaattcacagaaatatcacaaaaccaaaatccttcccacgatatattactatttagtctaagctttaattcaaaggttgagaatgacgaattcaagaatttctttcatacataaattgctttccttagttctgcagatgggtaatctgtttgagataagcactgtcatgtttcaaccttagagaacaaaaagctatcaacaagatagtggtaaagaaaatgctagccaaaaaataacactattgagaaataggtgcgtattaagtgcaatacttacaacatctctgatgtcaaatgaccaaaatttagccttagggcactaaagcacatttgcccttttgaagcacatactagtatggcacattttatttcactaaaagtgatgttaaacgtgaatgtcttgtagactatttaaagagccagtcaaatggctaaaaaaaccattgtttttttgttataactctttgtgtctccctctttccattctcatcttatgatatttcactcaaaa

SEQ ID NO: 218513 - DNA, 475 bp, Homo Sapiens; identical to SEQ ID NO: 60544

SEQ ID NO: 218514 - DNA, 553 bp, Homo Sapiens
  misc_feature (492)..(492): n is a, c, g, or t
  misc_feature (543)..(543): n is a, c, g, or t
tttgtttgagaaatcttttattagaagatgtcccagaaggcaacattttaaaatcaggcaatcagtaatcacaactaaatacaaaatttcaggtgaacttgcctttcaaaataaatcagacccttgcaacaggaaattgccccaagagtttttttccttgtacaaaaacagttaacaccactttgcaaaaggcatacaaaaatacaatataaaaaaaaaagactcccccagcataatagccaacagcagcttataaaacacaagctattcagttgagacatcagtaacctacacccaaactgtcctccatagacaattccagaagtcagctggcttttgtaaaccatgctccagaagggtagagaggctatttccaaacatcccctggggtcctctgaggccaagaagcaacctcagaaagaaaccattatggacaatagatttggaagtagcagctggttttccagagccatatatagtacttaccacccnctacccaccccaacttccaaacccagagccagcaggcacctgctgtcctgngcagagttct

SEQ ID NO: 218515 - DNA, 500 bp, Homo Sapiens
aacttgtaaacaatttgccatttattccaaaatgccatatagacataattactattaaacatgtcatactaatttattgccacattattcttacctagtctacccactatgtggttcatacagcctagtcagttacctgcaacttaagcaagaactctggtactctgagcacaatgttcaggccactgacgtttcccttttgagagagatgggagaataactgcacataacgcatataagaccatggagggtctaacacaggagtcagccaacgacagccagtgggtcaaatccagctagcctcctggttttattggaacatagccacactggttggctggccatgccattggctggcatattgttttggctgcttttgcactacaaaggcaagagctgctacagagaccacagggcctccagtgtgtactagctggctctttgtaggaaaagtctgccccacccctgcgctactaggaagaatagatgaggagttgtgg

SEQ ID NO: 218516 - DNA, 563 bp, Homo Sapiens
  misc_feature (440)..(440): n is a, c, g, or t
gcaaactgcagttggacaagcatcttaactgcttttatctgagagaggtgtgaccactgttgtctcagtcacagaaattctgctgagtgtctttccactggaaataccataagataagctctcataagacaatttcactattccaaggtcagaatgtggcaaaagtggggctgctgctagcttaattattttagcagcttccctggtcaaaaactgtgaagacaaaattgaaatgctgatatgaacgtgttcattgggatgagtttgtcatcctctagagaaggcaactttcttgggatgagtatttattctctttggctctcaaagtattctaggtcaaggccattgctgattgggattggatcatagaacatgggctgagacccaacagccacagtagtgaaacgcatacaaaggcaagcacttatactgatccctgngttctcaggcaagaacgatgtaagtgatgaaaaccagccttgtcccttgaaaaaatgatcaaatgggctgcagagagatcccagtgcctgatccgcaagagagcttcttgaacacgctctctg

SEQ ID NO: 218517 - DNA, 552 bp, Homo Sapiens
caccttggtataactttattcacaaactccagacacccaggcctggcttagcacagagggcatgttcttgccagtggcaaaaaaacccgatacagcatgtttgttaatactaaccattttaatttaaattaatagcatgtctggaagacaaatgtagttgatagaaaatataaaaactttactgtacaaattttacatcacattcaaaaaaagcaagtgtgtggcttgtggccacagaaaatgctaggtttgcacgctgatgagatcctggctaacactgctgcatagcacaaactccaactggcttcacatttacgtctccaccctccccccacaccaaatcaacacagaataacacaggtttccagggcttgccattcctctctgtgacctcaagaggaaatgccgtaggatgacagagggtgttttgatttggtgacatggagagatcaactttgctacacactgctcacaaccccaaactagctaggattcaagacttcgagttagacagaaacccagggggctgcggctctggtggttaaaggcagc

SEQ ID NO: 218518 - DNA, 572 bp, Homo Sapiens
ccagagacaggacctcaccctgcagcccaggctggagtgcagtggcgtgattatagctcactgcagcctccaactcattggctcaagcgatcctccagtcttagcctttcgagtagctgggactactggcacatgccaccatgctcagctaatttttaaattttttttgtagagacggggtctcgttatgttgcccaaggtggtctcaaactcctggcctcaagcgatcctcctgcctcagcctcccaaagcgttgagattagaggcttgagccaccatgcccagcctattcactctttctttagaaatgtgaagtgacccctgaaaaacctggaggaagaaggaaaaggaaggatcctggataattatctaccctgtgggaagccattttaactatactgcattaagacattcattgcttctgtcactttcttactggctcctaactttgtttcatgtttccaaaggcatttaatattcttttcctaaatttcaatgctgctgtgttttaagataaattatcaagcctattgtcacacacacaagcatggacttagcaatgtaccatgatg

SEQ ID NO: 218519 - DNA, 484 bp, Homo Sapiens
gaagaaagccttattcgtaaaatgaaaataatttctggatattttcttcagtggtggactaagcagtttcttaaaacaagacattagtttgcccttcatttccaaatgccttgaaaataagatatactactgctttaaaagaaccatcggaatgcttcagcgctgggaacaggtgttctctctagtgaagtgccaggttttttctttagctcttcacattttctaaatttgcagatctggtgtcccgttttgcggttcctgcaactgctgcagacgccacagttgatgagcctcttgcagggcacgcagaccccacaccttttcctcttcttcttggctgggttggctccgccagctccccctgaggaggacgaggaggaggaggaatgattctgcgggcagtctgccagattggcaatttgaaacgcactgtctgtgacggctgctgaggctgctgcgggggagtgaagggctgtcatgacga

SEQ ID NO: 218520 - DNA, 457 bp, Homo Sapiens
tttttcttttttcttttttttttttttagatggggtctcactctatcacccaggttggagtgcagtggtgcaaccacagctcactgcagcagccttgaacccctgggttaaagtgatcctcctgccccagcctccagagcagctaggactacagttgtacaccaccatgcctggctaaatatccataatattcaaagctcagtattctgttatttaattttggcttcattggcaagacagtccctaagatggagatgaatacattttcagtaatagaaaccacataatcatttgaacagggaaagtttaatgttaagaattattaactactaagtgttataacaaaaagtgaaactcaaaagaatacagcaataacagatatagagtgtctctagggctgaggcagaacatcaaaggtaagaacaaatttgcaggagggtgccacaacttccccttt

SEQ ID NO: 218521 - DNA, 493 bp, Homo Sapiens; identical to SEQ ID NO: 53170
  misc_feature (416)..(416): n is a, c, g, or t
  misc_feature (432)..(432): n is a, c, g, or t

SEQ ID NO: 218522 - DNA, 542 bp, Homo Sapiens
ttttttttaaaagaaaaaaaaaatcacgtttattttacaaggcagttattttcctaaagtgttacatatcaaggaaagttgagctgtctgtaggaaaacaatataattttaggaaattacagaagagtcaacattgtgcttaaaactttaaaatagtttttaaaaatagcagagtaagtgaatattgccaggtatgaacagccttaaaaagtgaggtggacacaacgatatagaagctcaatattaaagccgctagtgataagtcgctttgagaagtgttcaggctactaagagaacactgcttcaaccttaatcgaaaaaagaagtcatagcactaactgaaacatggccttttcctagaacagctaactctcagttatctacagtaatgaaaaagagcagtgacaatttttaaatggtgaataattccaaaattaatgttgagaagtgccctatttctgtgttgatgtgagagacactgatatccgggaacttacagcactgaccacgtgtgtggaactcccactggcttcccccttctt

SEQ ID NO: 218523 - DNA, 1000 bp, Homo Sapiens
ggaataggtaattatagtcacatggtttaaaattcaaaagttacaaggggatataaatgtctccctcccaccttgtccccagaggtggctgtttcgatcagagccttgtttctagacgtgtgtgtgtgtatgtgtacgcatgtgtgtgtatgcacaagtagttttgggttctcttttcttggtggtgtacagaagggtagtcaaagcccgactcatgatccctaactcgagtcttttaatgggattgtgtcctaactgcaaaacccgcctcaccaactttgttataaactccccgggtttatagggacagtcatctactgtcccttcctaacagcatggtgcagaaacactccataaatgagtcttgtgttgaatcagattgaattaagtgagaaaggaatggcggtgaaaaatgtggctttagtcatcacatgggcctacgggtttgtgaaagtaacattgagtctccttgtgttctgtgtgtactgcatgtatgtcatcttgcatctaaggatgtatattacccataaaggagcatgcagacacatgagtgcatcttggcttgccactaactgcctgtggccttggggctgtcactcaacttttcatctggaaattgagaataataatactattatccttctggaattgtgtgcataaatgcacagggcctggctcataaaaagtactcagtgagggccgggcgcggtggcgcacgcctgtaatcccagcactttgggaggccgaggggtgcagattacgaggtcaagagatcgagaccatcctggctaacacggtgaaaccctgtctctactaaaaatacaaaaacaaaattagccgggcatggttgcggtgtgcctgtagtcccagctactcaggaggctgaggcaggagaatggcctgaacctgggaggtggagcttgcagtgagccgagatcgtgccactgcactccagccggggtgacagagcgagactccgtctcaaaaaaaaaaaaaaaaa

SEQ ID NO: 218524 - DNA, 1000 bp, Homo Sapiens
gttttaaattagccccaatcacccttaatagttggtattccccatcagccaggattttgtctatctttatttactttcttggtttatattatgaaaaatgatttatccttactccttttcaggtataaaattatacagtcaggtgctgcataatgatattttggacgtgatagtagtccctaggcttacaatggagctaaaaattccttgcacctgatgatgttttgacgatcttgaccctttgtcggcagagactaatgtatgtgtttttcttagtttttaacaaaaaagtttaaaaagtaaaagaaaaaaattaatagaaaaaagcttatagaataaagatataaaggaaaaaataatttttgtacagctatacaatgtgcttgtgttttaagctaagtgttacaacaaaagtcaaaaagtttttaaaaatttaaagtttataaagtaaaaaagtttcagtaagctaagggtaatttatcactgaagaaagaaaaatgttttttataagattaatgtagcctaggtgtacagtgttgataaagtctatagtagtgtacagttatgtcctgggcctccacattcactctccactcattcactgactcacctggaacaacttccagtcctgcaagctctattcatgctaagtgccttagagaagtagaccattttttatcttttatactgcatttttactgtaccttatacatgtttagatatacaaataccattgtgttacaggtgcctacagtattcagtacagtaacatacggtacaagtttgtagcctaggagcaaaatgctgtaccatatagcctaggtggtagtgggcttgaccatctaggtttgtataagtacaccgtatgatgttcacccaatggcagaatcccctaatgcatttctgagaacgtagccccatcaagtcactcatgactctatgttgactatgctttttcacgcttccagaaaagtcccctcattaaaaaaaaaaaaaaaaa

SEQ ID NO: 218525 - DNA, 1000 bp, Homo Sapiens
attccttggtgactttcaatgtgtctgttttcccagtttgtaagttcattgaggaagcttgtacttgaatcctattccccacagttcccaccacagtgccaatgcacacaaagcactcaataaatattgcttatttgcttcaatataatatcttttaggtctgactaatttctatgagacatcagggctaaaatcatctgtactcctgaatggagtgaatttagggatgcttttttgggttagtgatactcttaagtttttcccatcctggatgaacatgttataatagacagggagagactatttttgttttgcggtggcaggtagtggctgttaggcacacagtataattcagtgtcctatatgaagtagatatcaaatatgaaatgaaaagaaaaagcctacaccataactgatggatttgtgtggaaaagccaatgaaaaaaatatttaaatatgacagtctttttgatacttttataaagtaccattaattctggaattaaagaacaaatatgatctacatatagttaaataagatcataataaaggaaaatgccacagaaaataaatataaattaataaatctaaaatccagtctttcatgtctcacatttcttatgccctagatccatattttattctttttcccctgataacaagtgctggaaacatcagagattcaataaacattttaattgtttgaaaatatctaacagatgatgttcctgccatctagtcgcaaaattgtcttaagggattattttatgcaaaattgttcaatttgggggttttgttttgcaaaataaaatactaataagaaagtttgctacagtatttactgttttcaagccaaaaaaacatgtttatttgggaccagaacatggtccagtttgagttcttaagatctgctataactaactaactcagctgctagtatttcaagatgacatcagaagaagctttgcctttttttgcgaaaaaaaaaaaaaaaaaaaac

SEQ ID NO: 218526 - DNA, 1000 bp, Homo Sapiens
ttttaaatgttctgattcaataggaacactctccttagtatccttatcagaaatgattcttgtttatagaattgctaaataagtaaagaaattttgagttaaatcatggcaaggagttataattatactaagcttttttgttcctagagattttggctcactcatatggtaatctatatgaaaatttttctgtgatatctaataggagaaagatcctcaatgatagaatagtgtttcttcctagctgattcatacatctttctctgccaacattttgtttgttgaagtgttccccaacatatgactcattgcttactaaatccctattgagcagccaaagccctggtgactaattatgtcattaatttgggaaagtcagagacaataagactgtcagttgaaacttcgtaggaggtaaaaaagtcactgctgtcagctgcaaagatccttaaaatggtctttaataaagtcaaattttgtgacaataattattgcatcaaagtcggggaaatacctcttagatcaaataagatacattgaaaggccaaaaattatttttatctcactttgtattctcataaggtctatccactgttacttggatatgagacttaataaatggaaaagaagacaggggtactatcacactgtattttcctatggcctaatgaccacaatggttgatgaactgcagtaaagtttctataatattttccatctattcatttgctcaatcaccttgtaatggttatgttggttaattccagtctctcatgtgtaagcaacaaaatgagacttaatttgaaatatccagtatttttctattcttacaaataattttcaggatcaatgcgttgaggattaggaatggcaatgtgtattactactttgataccaactatatccgatctaatgttggaatttgtttgacaaagtgttgtgtatttgaaaacaggcagcactgaataaaaagaatatggagaaaaaaaaaaaaaaaaaa

SEQ ID NO: 218527 - DNA, 1000 bp, Homo Sapiens
ctgactcattttttaattttttatagatacagggtttcactgtgctgcccaggctggtctcaaactcctggcctcaaccgattctcctgcctgggactcccaaagtgctggaattacgggtgtgagccactgtgcccatccctctgttttctctttttacccacggagatcacactttccgtcgtggggaggctggaaaatctggtgttcatatgccacttggtctggttgttctgcagtctgcatgattgtctgatttttcccagggagctttgaaaataccgattccttggttcagtcccacacctatgttggagtggggtggttcctcacatcatttagcttcgttgcagaaaactctccttcagatcttaaggatctttggaataaggctctttcatcttttctggacttttttttttttttttccttgacaaatgagaatcctctccaccctgatctacccaagtgtttcatgcctcatggaggaaagagatacttgcacatgcatttttatagcagcacaatttgcaattgcaaagatatggaaccagcccaaatactcatcagtcaacaagtggataaaggaactatgagatatatatatatatatatatatatatataatgatgaaatgctacttagccatggaaaggaatgaattaatggcattcgctgcaaactggatgggactggggactattatctaagtgaaataactcaggaatggaaagccaaatgtcgtatgttctcactcataagagggagctaagctatgaggaagcaaaggcttaagaataatacaatggactttggcgagtcagggggctgaaagggtgggaggacggtgagggataaaagactacaagttgggttcagtgtatactgctcaggtgatgggtgcacgaaaatctcataaatcactgttaaaaaacttactcatataaccaaacaccatgtgttccccaaaaacctttggaaataaaaaaaaaaaaaaaaa

SEQ ID NO: 218528 - DNA, 371 bp, Homo Sapiens
tttttttttaatttttctgaaggataatcaataatttatttctctttaattgtcacaattaccataattatctagctacatgaccaatgtcactacatatcacaggaagattgtccacctacactttactgagacaaagacaatggccatttatgtgttaaatgtacaatgggatgttaacaccatttatgtgttaaatgtacaatgggatgttaaaagcagtggcttttatgtgtaagacaagatgtggcacatgatttattacgaacaggtttgatttaaaatgtattatgccaagaaacaagcatagaaatattttggcattgagttattattaaagtagaaaataagtaaactagagaaataaatcc

SEQ ID NO: 218529 - DNA, 514 bp, Homo Sapiens; identical to SEQ ID NO: 57827

SEQ ID NO: 218530 - DNA, 441 bp, Homo Sapiens; identical to SEQ ID NO: 60566

SEQ ID NO: 218531 - DNA, 552 bp, Homo Sapiens
aaggcatattcactaaaagcaaatatattttcattttcaataaaagaatatgaacaccaaaagtaattacccacccaccctcaaacaaaaataatcatcattacaaagggactaatgcttcctacccttggacaaagtgaaggatcacattcagaccagtgtgcatgtagctgactcttgagaaagagatgactatctccagggttcacgcttcacccaattcttgcagagccatgtgaagttagagctaatttcagtaatcaccccatcttaataataagatgtcctacaatctttggcagtgactcagagaagcagccaaaaaaataataataataatagtaataaaaataaaaagagaaagaaaaaaagcagaaagcttatatactagcaccactgactgcccaccccaatcagctctaccttcaagaaagtaaaaaaaggttagatagccccctccataatactgaagaaggctaaggatttctgtgcccacttaagaccatccatggtattcattttaacttgattttgtctatataaaaatgctga

SEQ ID NO: 218532 - DNA, 527 bp, Homo Sapiens
tgctggggaccaacggaaagagttcacgatgggaggcctggggccctgcccgctggacagcactatctctaccagcggtggttccggccttctgataatcactggcctgctgacacttccctgcaacccatccacccctggtttctcctcctgggagtcaaagtccatagcctgagctcggaggaaggcctctgtatcaccccagtactctgcaccactgccatacgagcttcccacccttcctaacgctttcacaccaatccgtacatgctgcttcctccaccaaaaatgcccaattcaggcagaccctgacctctccctcaggcagcccaaccatccagaatgaatattcttgcagagttttccaaacatcagtcattcacctctttcatgattttcaccatacctacaaaatagcaccatgataggttgcacgctgcctgtaccaccgtttacttaatgttttctttaaatggctcacttttgtatataaataaattcatttcaaaaaaaaagatatcactcag

SEQ ID NO: 218533 - DNA, 542 bp, Homo Sapiens
tttttttttttggggcatgagtttatacaacatgctacactacgcacttggtagcagtattcaaataaaaatatgattgctgcctcaggtcattccaaaagtatagtcatccaaaagtatttaaggcctatgctgaggactgaagcacaagtgttaaaactgctattccttactctgacctaatagctttcccccattcattctcatcaaatattgatttaacaatggaaagtggcaggaagcttgtgttcccattaaacacaacacttcccctcctccccagaaaacagaaaaaaaaaaagtcaggaacagggaagaaaagtaatcacatttaaatggtgatagaaaaatttaagtcttctatgctttaagcatttaattgcaatgtgtaggtaactcattcatttatttaacaaatattcaggagtaccaggtactgtgctaggggctgggagtaaacaagacatagtccttacccataggaagttatattttgtatctccccaggaaattccaacagagtgacatgtgctaaacagggg

SEQ ID NO: 218534 - DNA, 521 bp, Homo Sapiens
ggatttttgaagtttttactccagagctttcattttaagaaattgcaaaaaagttattaagtacagagagaaacattttccctgtaataatttgaaattaaggtgaccatttgatgccttatcccctgccaaatacattgatttactttccagcaaacaagaacatcctctgatgtaacttaacaggcaaccatgaaaatcaggaaattaacacggacacatcattaccacggcatcgtaggccccatttaaacttttccaactgtccctgtaacttcctttcaagcaaaaagatccagttcagaatcatgtgttgtgtttagttgtcatgcctctttggtcccctccagtttggaacagttccagggtctatctttgattttcatgaccttggcactttctaagattacagttttgtatacagcatgtctctttacgtgggtttgtctgatatatcctcatgattacatccaggttatggatcttcagcaggaatatcacaggggtgatgttgcaatctt

SEQ ID NO: 218535 - DNA, 639 bp, Homo Sapiens; identical to SEQ ID NO: 60651

SEQ ID NO: 218536 - DNA, 723 bp, Homo Sapiens
  misc_feature (568)..(568): n is a, c, g, or t
  misc_feature (630)..(630): n is a, c, g, or t
  misc_feature (675)..(675): n is a, c, g, or t
  misc_feature (684)..(684): n is a, c, g, or t
  misc_feature (700)..(700): n is a, c, g, or t
  misc_feature (705)..(705): n is a, c, g, or t
  misc_feature (718)..(718): n is a, c, g, or t
gatgtgcttcttggttcctcggagtactcaacacagattgacatgtggggtgttggttgcattttctttgaaatggcttctggaagacctttatttccaggatcaaccgtggaagatgaactgcacttaattttccgactgctaggaactccatctcaggaaacttggccaggtatttcttcaaatgaggagttcaagaactacaactttccaaaatataaaccacagcctctaattaaccacgcacccaggttagactctgaaggaattgagttgataacaaaatttcttcagtatgaatctaagaaaagggtttcagctgaagaggccatgaaacatgtgtactttcgaagtctgggaccaagaatacatgctttaccagaaagtgtatcaatattcagtttgaaagagattcagttgcaaaaggacccgggttttcgaaattcttcttatccagagacaggacatgggaagaacagaagacagagcatgctcttttaaagtctgataacatggtttcaagcccagcccccagcctttcttaccaatcaaggactcagaactgaangcaattatttcttttgggggacttgggaaactccgttgtctacactgtcctcttcaccaggnggagtctttttatttcagacctacagatggtttttattttgttgncacagtggnggacaaattttttgtnccagncgggttttaaggncttct

SEQ ID NO: 218537 - DNA, 511 bp, Homo Sapiens; identical to SEQ ID NO: 61952

SEQ ID NO: 218538 - DNA, 678 bp, Homo Sapiens; identical to SEQ ID NO: 50848

SEQ ID NO: 218539 - DNA, 736 bp, Homo Sapiens
ttttttttttttttttttctttgagatggagtttcgctcttgttgcccaggctggagagcaacggcgtgatcttggctcaccgcaacctctggttcctgcattcaagcgattctcctgcctcagcctcccgagtagctgggattactggcatgtgccaccacgcctggctaattttgtatttttagtggagacggggcttccccatgttggtcaggctggtctcaaactccagacctcaggtgatccactgccttggcctcccaaagtgctgggattacaggcgtgaggcaccgtgcccggcataagctttattttcaccaggtaaatacttaagtacaaatgatagaagggcggggggtggagtaagacctaagggttagagtcatcaaaaataatatcagcattaaccagtgaccccaatttactgtcttcctacatcacaacatcatgtcagctttaagatgaaattaaaccaagtgaagctaggcgtctgctcctaggtgagtactagaaaataaatgaaggaaaatccacagtgcatcttgcttccccgtttctggggatgggaaatccatcaactgcacccaaaaggggaggaaagggggatgttgagaagaaaaaacacattctaaaatggttaacagcaaacacatgttcaagtcacacacacgattactgcagctggaaatggcaaacccggagcagcaacggggtaggagactgcaggagaaacac

SEQ ID NO: 218540 - DNA, 753 bp, Homo Sapiens
tttttttttttttttttgcacaaaccatggtttatacaatactttatcttacactattaacactttattgaaaatatttctattgaaaagaactctggaaacacataaaaatatttggtaagaaaacaaaagcacatctttactaccagtgtgaattactacctgacaattatcaacttctcaaataagaacattaacctacttgtgattgaagaaagaattatcctgtctatggatgacataagcaacttggccaggacagaaccaatggatgaaaccacatataattccaatttggccagttaacttatgtaagtgaaatgaaacagttaactttattcattaatatgatcaaaacattatctttacttccaagatctgcaaaaacttaattatccaaataatttaagtttggaatttatatatttttcaatacataaagggtaaggaaactcttatacagtaatgagacggaaagaaaacaacagcttcccgtgaaaaagacctaatgtagtcaaatataaaaataagtacagtagcctcttttttttttttttttttttgagacggagtctcactctgtcgcctaggttggagtgcaatggcgcaatctccactcactgcaacctctgcctcctgggttcaagtgattctcctgcctcagcctcctgagtagctgagatgacaggcgtgtgccaccatgcctggctaatttttattttgtgtatttaatagagatggggttcaccatgt

SEQ ID NO: 218541 - DNA, 535 bp, Homo Sapiens
tttttttttttttttttttgtttacttttcatttattcacatttcatggattgttacacttcctcgatgggagcattcaaaaactaatacaagctgagattatattgtctgacaattcaagtattttagttttagaaaacaatttcctatttaaagtaaaaagcaaacaatttatccatctgattgctaagaagttttacatctccattacaattgtgtctgcatcaaacggagagtccttcgtcctcagtatgattgttactggctgagaacatacggtgacctgtgttctgagtgcctgcttggaaaagacctccctgtcatctgccatactacgggacaaatcagtatctactcaaattcccacttccagaaggagaggactcatcaggggtttaggagtttgcaaagccttcaaaatgtatcgtgcttgaattttgactcttctgaaatagaataactgacaaatgctcaaaaaaacaaacttgtttaacttttactgaaaaggctctcagtgaaaacttgttttgaactc

SEQ ID NO: 218542 - DNA, 747 bp, Homo Sapiens; identical to SEQ ID NO: 59868
  misc_feature (10)..(10): n is a, c, g, or t
  misc_feature (34)..(34): n is a, c, g, or t
  misc_feature (49)..(49): n is a, c, g, or t
  misc_feature (165)..(165): n is a, c, g, or t
  misc_feature (198)..(198): n is a, c, g, or t
  misc_feature (361)..(361): n is a, c, g, or t
  misc_feature (402)..(402): n is a, c, g, or t
  misc_feature (441)..(441): n is a, c, g, or t
  misc_feature (571)..(571): n is a, c, g, or t
  misc_feature (606)..(606): n is a, c, g, or t
  misc_feature (650)..(650): n is a, c, g, or t
  misc_feature (661)..(661): n is a, c, g, or t
  misc_feature (705)..(705): n is a, c, g, or t
  misc_feature (723)..(723): n is a, c, g, or t
  misc_feature (729)..(729): n is a, c, g, or t
  misc_feature (738)..(738): n is a, c, g, or t

SEQ ID NO: 218543 - DNA, 575 bp, Homo Sapiens
taaaggaacatgtcaagggttaatcctatgactcagtctgacaaaacgagtcagctggagacagggccaatttttaaacctgatttcagacaggctgcctgcacagtagttctgaactgtcatgcactttttatccagaattgtttccacccacaacgctacataatcacttatgtgttactctaagattatgtgatctgactcaatattcatgtcacctagttcaacaatataaaaaaatcaccaagttttacagcaagataggaatcattgtacacactagcaaaatgactagtgaaaatgccagaggaccctgacaaaatacgtaacttggagccatataccttttattagcaaactgatgattcctggtttaaagattattgcatttcaccaattttcaaatatggcttttcctcccaaatgttatcaggatgttatgtttgctgctattccagtagtcattaagcacagacctaaactaggcaagaaaaagccataacgtgctttgcctaaacaagttacttctttactgacgatataggaaaagatgttttcaaaaagtctaccaagta

SEQ ID NO: 218544 - DNA, 619 bp, Homo Sapiens
  misc_feature (601)..(601): n is a, c, g, or t
  misc_feature (606)..(606): n is a, c, g, or t
  misc_feature (617)..(617): n is a, c, g, or t
acaaaattgctcctacctggtttggcagctccacgaccctgaaactagaacaagacctctcctccctgggtcgccagctttctgaccctcgaactacagcaatgttgcttctgcctgggtctgcgctccacgaccctcaaactagaacagcagcaccagctgcttcctggacttccagctcaatgactctcagacttcaaaggcagcaacggctccacccccaggctccagctccaacaccctcagatctgagcagcggcagcaccagctcctttctgggtcttctgtttcacgatccttaaattagaacagcagcaccatcttctccctgggtctccagctccacgaaactcaagctagaatagcagcaccggctcctctgggatcttcagctccacgaccctaagacatcagtggcagcaccggctcctcccctggactccagctccaggaccctcaaacttgaacagaaacaccagctcctccccaggcctccagctccttgaccctcataaataatcccttctcatgaaatgtagcagtcaggaaaactgtagaggaagtaaataaataaatgttttcctttcaaaaaaaaaaaaanaaaanaaaaaaaaaanaa

SEQ ID NO: 218545 - DNA, 632 bp, Homo Sapiens; identical to SEQ ID NO: 42682
  misc_feature (576)..(576): n is a, c, g, or t
  misc_feature (583)..(583): n is a, c, g, or t
  misc_feature (619)..(619): n is a, c, g, or t
  misc_feature (627)..(627): n is a, c, g, or t

SEQ ID NO: 218546 - DNA, 725 bp, Homo Sapiens; identical to SEQ ID NO: 50786
  misc_feature (554)..(554): n is a, c, g, or t
  misc_feature (617)..(617): n is a, c, g, or t
  misc_feature (645)..(646): n is a, c, g, or t
  misc_feature (659)..(659): n is a, c, g, or t
  misc_feature (677)..(677): n is a, c, g, or t
  misc_feature (711)..(711): n is a, c, g, or t
  misc_feature (714)..(714): n is a, c, g, or t
  misc_feature (723)..(723): n is a, c, g, or t

SEQ ID NO: 218547 - DNA, 631 bp, Homo Sapiens
cttgaacctgggaggtggaggttgcggtgagccaagatcatgccactgcactccagcctgggcaacaagtgcgaaactccatctcaaaaaaaaaaaaaagtctaactcttctgcttgtctttacaatgctgtacagtgagagctaatgtttataaggataaacaggatacttacagggatttgaaggtaatttaattcagtggtttccaactttttaatcaccaaggccttctttttactcccctatgtcctgtgtcttaaaagattatgtttaccaaactgcatttattaaagaattatattttgctacataaaggcatgtacaacacaaatcatgcttctgactggcaccatgtaggcagacctaggtactaaaattccagcccaaagcaaataatttaccattttcattagtctttttattccttttgtgggcaaacatatcgtctatgttaggctttttgaaatattaactatgacttgtaaactccagattaaaaactaaccaattcatctttgatggagcttgaatcaaactaagggtattggacttttgaaagattgaaatttttgttacagtatgggaatgtttttaactgaatgttgaaataaaagttatttaaggaattaa

SEQ ID NO: 218548 - DNA, 286 bp, Homo Sapiens
  misc_feature (2)..(2): n is a, c, g, or t
  misc_feature (16)..(16): n is a, c, g, or t
  misc_feature (25)..(25): n is a, c, g, or t
  misc_feature (35)..(35): n is a, c, g, or t
  misc_feature (53)..(53): n is a, c, g, or t
  misc_feature (63)..(63): n is a, c, g, or t
  misc_feature (69)..(69): n is a, c, g, or t
  misc_feature (87)..(87): n is a, c, g, or t
  misc_feature (176)..(176): n is a, c, g, or t
  misc_feature (204)..(204): n is a, c, g, or t
  misc_feature (211)..(211): n is a, c, g, or t
  misc_feature (260)..(261): n is a, c, g, or t
  misc_feature (279)..(279): n is a, c, g, or t
gngagacctgttaatncaaaatgcnccattttgtnagctccctgccaatatgnagaccttggncaaagngaaacatttcacgagggntcgggccatgagaacctgactgcccaaccgcctgactttaacacattctgctgagaaaaagtccaaggaacatcattattacattctgngggaacaaggacccaactgcctcattgngggaacntcttctcaacatcttccctggcagcaccgccatactgcccagacccctnncctgccatacctacaagnatcccag

SEQ ID NO: 218549 - DNA, 723 bp, Homo Sapiens
  misc_feature (670)..(670): n is a, c, g, or t
  misc_feature (698)..(698): n is a, c, g, or t
  misc_feature (720)..(721): n is a, c, g, or t
ttttttttttttttttaacttttctatttttatttttttatttttaaaaatccaccaaaattacttaaatcatttgacagagtcatacaattttaaatgactataaaaatgtgcagatcagtgccaaattttttggcaaaggctgaatggcagacagtaatccaagacgcagacaaccttgcttttaagccatccgttacacagagaccagcaggctcccttctacctgtgagaccaaataatcccaaaatgtaaccaaataatcataactccccctactcctaaaacctacccttcacccttcactgtctacgtcagcctctggacagacctgatgcctggggtttggccatttccgccttcccaccctgtgttggtctccctcctccctcctcaggtccctcagttctcccaggcctaacttggcgtgcttccttcctctctcaccccaatcaatccggctctccttccctttctgggttacgccacctgcccgactcccggatttccccctcgggggcccctccttgccctgggggtctgctctcggcccgccaagttctcccaggggatccctccccacctgcctccattcagtcaagactggtgttcaatgtccgtttcgcgcccgtagcgacaccaagacagaagccaactaagtgacctcctngtcccaaaaacctcctgggctcctccanaacctcccggggctctgggccnnaa

SEQ ID NO: 218550 - DNA, 714 bp, Homo Sapiens; identical to SEQ ID NO: 55916
  misc_feature (686)..(686): n is a, c, g, or t

SEQ ID NO: 218551 - DNA, 280 bp, Homo Sapiens
  misc_feature (63)..(63): n is a, c, g, or t
  misc_feature (112)..(116): n is a, c, g, or t
cgaccggcgctcagtggtattccggcacgttgtatatacatatatttatatattagaatagrnhtacatacatatatgaaacavacataccaacatatatattgtgtatgvnnnnntaagcatcaaccccctccacatgaaactaataatactgcttttctgtggagacaagaacacaagagtggaaaaaggtctgttcatcgtatactttttcagttcgaattctcaaccatgtgaatgtattacttattgaaaataatacattggcaaagtaaattaa

SEQ ID NO: 218552 - DNA, 151 bp, Homo Sapiens
  misc_feature (10)..(10): n is a, c, g, or t
  misc_feature (84)..(84): n is a, c, g, or t
  misc_feature (86)..(86): n is a, c, g, or t
  misc_feature (92)..(92): n is a, c, g, or t
  misc_feature (102)..(102): n is a, c, g, or t
  misc_feature (118)..(118): n is a, c, g, or t
  misc_feature (121)..(121): n is a, c, g, or t
gatcacctgnaatttggggttttaatatcatgtcacactgcttgggaagaggtcttgggttcatttatgctgcttagaaacctnantactgntgcattcttnttgataagtgaagctnggntaggctctgctatagcgtagggtctcaatt

SEQ ID NO: 218553 - DNA, 516 bp, Homo Sapiens
ttttttttttttttttttgtagagacgggggtctggctatattgctcaggctggtctcgaactcctggcctcaagcaatcctcccaaagtgctgggattacaagcatgaacctccacacccagcccctagatattcctggaggccagtttgcattatatccagaggacaaccacaaaattctcatgccatgccctccccaaacccctaggggatcttattttcctccactacaggatggagtattcctacccaaccagaggatgaggtattcctacccagccctttgagggctcttctgtcttgcattcaaagtgctgagagaggaggaggctaccagccatccttatctggtgccagataccctctggctggtggaggatggagattcaaagggaacgtgactctgttgtaccccgcgaacccaagggctcggcccttgctccctcccagtctcagtacccctcctctaccattgccactggcatctctgccccaagattagcgactttctcccc

SEQ ID NO: 218554 - DNA, 467 bp, Homo Sapiens; identical to SEQ ID NO: 58911

SEQ ID NO: 218555 - DNA, 738 bp, Homo Sapiens
  misc_feature (575)..(575): n is a, c, g, or t
taattagtaatacttatattattttataaagttatttaaagtaaaaaccttaatatacctttgctttcaataatagagaaaaatgattttgaggcaagatacgtatctaagttcctcaggggaattttctctaattcacatatttctccctaagcaaatgcttccctcctttctactgtcttctcctagctaacaactctgctataatagtaagccactgtgattgatgagccctatgccacagtgtttagtagatatacaccaaaagtttcaaaaaaaaatgggacaatatggttctaatcaagatcagaggtaaaataattttcagtatctcctacaggcaaattcctcaatatgcctaccataatctgctggtgtataattcagaagttcaaattgccagtgtttatagcacgaataattctggtacatgtcaaatatttctcgggtaaattgttggcagatgtcacctccagtagtccttccagctgtcacctctaaaataacatcatttttgtcatatttctcctttggcacaaggctctggaaaagctcattgtacaacatgttgattntttgatcaatggtttgcctttcttccagtgcaagttcttgtaactgcttatcatcttgcttatttaggcttttacacattgattctaatgcttcaattgcttgttcagtctcctgaatttcttgttaaatggctgcaagaggtggcaactcagcatgccctct

SEQ ID NO: 218556 - DNA, 521 bp, Homo Sapiens
tttttagagagaaagacaaagatttattatagggaattggggcacacagttatagaggccgagaattcccaagatctcgagtcatcaagctgaggacccaggagacctgatgtgtacttccagcttgaatccaggagcctgagaaccaggagagctgatggatagtttcagtctgaggacctgcaggctcacaacccaaggaggaccaatgtttcaggccaagtctgaaggctgataaaactttccaaatagtcatagaatttggcagtcgtaacatcactgggcatttaatgactagggcttcatctctatgaagggggctgtgaagcctgctcgggagagaggaatgagggaccatctccttagagaagtgggtgggtagaaatcatttcttatacttggcaggggtggaggacagcctccatgagtcacgactcaggcgtttagggacttgtggcttgggtttttcccttctgcatattgtgtgtgtggtaggtagactttgcttctgggagcatctg

SEQ ID NO: 218557 - DNA, 460 bp, Homo Sapiens
ttttccttaaaacatcgctttattgaccgtgcacagttattaacaattcacatttcactttatctactgagtggaagagcatttattctttcattaaaaagttaagccctccggggcagcagcaggaatgcagaaccttcttcctataaatggcattgcccagtgactgtgaagtgcttctctattaatacaaaaaggataaataagacaaatggacttctccctccctccatcatctccctccctgctaatatgctcttcttattttataaaatgccattaagcaaacagttcccacactgatacttccatcaaccaaaaggggaatgtcaacatttatttggcaccactgaattcagaacatccttagggctctgtacaagtgacaaaatgagtatcaggccatggtcatttccttaggaagatgctttatgggaagagagggtggaaaatcatgagg

SEQ ID NO: 218558 - DNA, 491 bp, Homo Sapiens; identical to SEQ ID NO: 58740

SEQ ID NO: 218559 - DNA, 422 bp, Homo Sapiens
ttttttttttgtacagatttctttagggcagtatcttcattagcattctgttcactcctttctggtttttacaatgttcctagtgcatttggaaaatatttttttaaacctttggtgtgaagcagcgtccttttttcccccattatctcattttttttttccttttttgtttttcaataattctggagtctttggttgaaaggaacaatactacctaaggacaaaaatctattattaaaaaaaaagtcttctagtgtatattgtgtaacacatttctggagctggtaggaataaccatttttatttttctgtagtgccatctatacaaacttttactatttgaaaactgagatttaagttgcaaactttggtttcttgaactctgacatataaaaaaagtctattaagttatcaatgatcat

SEQ ID NO: 218560 - DNA, 323 bp, Homo Sapiens
tcacattcacataacttttattacagtgcattatcaattattgttgttaaactcttactgtgcctcatttataattacactttattataggtgtgtatgtataggaaaaaatatagtatacaagggctcggcattatctgtggtttcacggcatccacaggatctcggaacatacaccccgcagataagggggtacagctatataaaaatgtattcttgagaaaatcaggaaaaggcaaataaggattgggcattaaaagatgccaaagtggctgggcgcactggctcaagcctgtaatcccagcactcacagccccatgaga

SEQ ID NO: 218561 - DNA, 408 bp, Homo Sapiens
gaatccaaaaacacactctgttgcaccaggggggtttctaatcacatgagtttgccaagacttcaatattacccacacttcagaattaaacatactttggaagtaagttaatagtaatgatatgacttcaaaagccaaattgataaggtatattttatatacaaagaccatgaacagtatatatgagagagaaatttagagaaagtatgagacctatttaatctagagacatattaaaacaataacatttaaaaataattatataccaaaaacaaagaaaatgttaagaaattttaaacacatggaaattaagacaacacattctataagtacaatataataaatttaaagatcaacaataaacacatttaaaaactcttgcctactgaaaaagaaccacccctaatc

SEQ ID NO: 218562 - DNA, 407 bp, Homo Sapiens
tgttgcatgttaaactaaaagtttataaattaaagaaaaaatacagcgaatagagcttccaaacttcacaaatctttttacagttaatactctagttgagtgcacagtgccattaaggaggcgaaaagcggcgaggttgacaagacaggtgggatcacctgtttaagggtaagtgaggggcggataggggagtcccgggccagagcactggagtcgcagagggcggaaggtagacactgagggccaggcagcggcactgcggtgggcgccgtggaaaggctggccagggatattcacattgagtagaaaaataatcgtcatttgaatacaaacaactgaaaagtgcgacacgtcttaacctcctttacacaaataaaaagaaaccaaggaaagtttccgcagagggc

SEQ ID NO: 218563 - DNA, 674 bp, Homo Sapiens
gaaggtggagaatcaagttctgcatcatttttttcattaggcataggtaaatctgtctgacattctttgtgctgtgtatgtggtttgcaagaagtggccttggtctgtgtgacgggtttgcatgatatgcctttgttctttaaaagcctggaaggctgggaagattgggaagatggaaatttcatagcatcttcctgtgtactttcatcttgaatgatctttgctgcctctttagtaactgcaccttttaaaacactgttagtgttccctgtagataaggtagcaggtatttttgccaatgacatcacactggttataactggtgttgtatctgtccttgcagaagggagctccgtcacagcagtttttgctttagaaatatttactttattttgtggaagacagtcattcataatttgctgatgacaaaactccaagacacaaaataggttacagaaatgtttaatgttgcctcgccactttatggactcgcttagtttaccctgtcgtttacaaccatcacacttggccatctgataaaacagaactgttaatttggacatacaatcttcacaacaaaactcttcttacttgccctcccatcgatttttttaccaaatttggggatgttttgaacagtagctggcactcttacagtagtttccccatcgtct

SEQ ID NO: 218564 - DNA, 172 bp, Homo Sapiens
actttttctctgaaaatgtattttgaatgctgctgatggcaagagtagttcatgcagtggatgagtttcatacgatgcatttctgcagtcccctacagctgggcgtttaggtgattgacagctttttaaatattatgtcagcactgaagacattcatcttcccactccctgt

SEQ ID NO: 218565 - DNA, 452 bp, Homo Sapiens
ttttccagacaggatcttgccatgttccccaggctgatctctaactcctggcctcagatgatcctcccagagttctgggattacaggcgtgagccactgtgcccagcgtcatgtaccttttcactggtgtactggatatatggaacgtggaccctccaggcattaatcttctttctgacaatcacagacccagtgaggagcagagccaggatttaaactacatctaaatattgtgtctagtgggtcagctcccacatgtgcagcctctctccctgccttcctcttcctgtcttgcaagcacaggtggggatacacagtatttaaaggtaaatgctggcatacttgtagacctttttaaccagagttggccaccacactctcctgcctttcttaaccttggtactctcccttcaagagatggagtttaacccccttcccactgaatccggctg

SEQ ID NO: 218566 - DNA, 399 bp, Homo Sapiens; identical to SEQ ID NO: 57780

SEQ ID NO: 218567 - DNA, 421 bp, Homo Sapiens
gcccttttttttttttttttgtctggctagccatcttgcataaatatttaccacatgttatgagatgtaaacaaatgcataacatagcatcactggtgaacaaacaactcaaattgcattttcaactataaatgttctattggtagtggatcacaatggtcctcttcctgctacgtagttatattttaacaacaaccaagagaaagagttcttaatctggggctcatgggttcatgaaatggttggcgaaggaagggcccacgaatcttctgaagctataagcaaaattacgtgtgcaagtatgtatagcgtcctggtgagcaggtataaatttgttagtaattctcccatattcagaaaagattatttgcatcgagaatggcacaggccctcagtgaaaaggccaaagaagacatgatat

SEQ ID NO: 218568 - DNA, 464 bp, Homo Sapiens
cgcccttttttttttttttttttggaaacagaggtgggtggattgctagtgctcaggagtttgagaccagcctgagcaacatggcaaaaccccatctctacaaaaaatgcaaaaattagctgggcttggtcacgcatgcctgtagtcctagctatttgggagactgaggtgggaggactgcttgagcccagggaagccaaggctgcagtgtgccgcgatcgcactactggacttcaagccagggtgacatagtgagaccctgtcataaaaaataaaaaaattaaaaaaaaaataatatgagattttacatatttctatcacagggctccacaataatgtaagagcagacaccttctttctctctatatatataaactgaaatgcaaagtgattcagtggcttgatcaatttcaaagagtaaaacagagataacagaattgaatgaagaaatctggcttttaatg

SEQ ID NO: 218569 - DNA, 439 bp, Homo Sapiens
agaaaaagagactattcatttatctgagagtgactaatgaacaaacaggaaagaaatgttccgattaagtaaaaggggaattgtaagaaagaataaagttgctttttgctttcacagaactagatacaaaatattaactgtttgaaaggtaagagcaataactaaactgaggcgtaaacaagatagatcttaaatacaaatgaactaatatgttatattgtgttcccagggttggggaatagggagtacctattctatagccctattaagtctttcttaagtatcattggtaaaaactaagaataacttaaagaatattaacaaagtgcatgacatgaaacaacagtggaaagattaaaacaacattgaaaaataatgacaaaaaagatgagaagagtgttgtatctgatgtacacaaaaatactaactcaagtcttag

SEQ ID NO: 218570 - DNA, 509 bp, Homo Sapiens; identical to SEQ ID NO: 62001

SEQ ID NO: 218571 - DNA, 577 bp, Homo Sapiens
ttttttttctttccaaagcagaaaattcagcatctgtacttcagagttccactggagaagtggctgacctcaaaatgtattagagatcccattgcagctaaaggtcgatggattcaacaatgtgcagcagcccttcaaagaatacagactggggtttcctcctgggatgacttcaccaggaccctgggcaacagggctgctcaacagactttggcaacaagctatcacccttggttggggttccagggaaagtggagttgaaggcattctctaaaacgtgatggcagttgatgtccacaggagtgctggagagtatgcctgcgatgcaggctgtcatgaagcaggccacggtccccgcaatcagagctctcactgcccccgaggcgatatcacgctttctggaaggagccatggatgtgagtccgccgatcacgattcctagggacccgatattggcaaaaccacagagagcgtaagtggcgattatctcagaacgaattgatatatattgctgcacaccgtttacaaattcggtccaccttctttcctcaagtggatccatgtgaaggtgctcata

SEQ ID NO: 218572 - DNA, 493 bp, Homo Sapiens
tttttttttgacaactgacttgtcatctttattaatttttacaaatgcatgtctcctaatatgaaaaggttgattttcactttattgtgtgctttgcacatttacagcagcaacaggaagagcttctactgaatagattttagtcttcaaaaatgtgactgcatcttccatctctagtttgtccatctcccagttattgaccttaccaaagaaagaggaaaataatcagtttgtgagacgatactaacaaaagagctagtttagagatccaaacatagtaaagtaacatgaggacaatagctttttgaaagcaatgtgaccttataactactcatattttaaaggcataataagactacatgctagggtttaagaaagctttaactgtgaaaattatacaaattttaaaggtcctctaaatggtgcaaaaactgctttcttgagaaaatcttccttagaatatatataatcagcaatataaaaaacaaagtct

SEQ ID NO: 218573 - DNA, 302 bp, Homo Sapiens
ctttgatatagttttatagagactgtgatacatgaagttacagatttgtgtgaggtcataggtttgtctgagtcactgtataaagcacagaaaaaaaaattctatctttggcccagtttcacagagactgtaggacatgaggtctagagaaggacactataccaggaaaatttattttcttctcatagctttaatttagtttaatttttttgagacagagcctcactctgtcgcccaggctctgttgcccgggctggagtgcaatggcacaatctcggctcactgcaacctccacctcccag

SEQ ID NO: 218574 - DNA, 655 bp, Homo Sapiens
  misc_feature (541)..(541): n is a, c, g, or t
gccctttttttttttttttcggtatagaatcagggattactttattaaaagtaactagcatgttgccagttttccctatttattaaacaaactgaatagaattcagaacacactactgagcaaaatgtatatttaaaaaaaagtcaactagaagtaataattctatttgtacacagcataaatcaatatacagtattgtatgtgaatgagactgattggctttaaaatgaattttctgcttcaaggccaatatctctacaaacgttctgtagaagtattgttagggcaggccaacttctttatgatgtcgcattatgtgctggttcttttctgaaggtcttcggaagcctttcttgcagtactcacaccggtgaggatagtctttcgtgtgaatggaaataacgtgccgtttaaagcctgaggcatctgtagtgctatactcacagtactcacactgatacactttcctgccactggtgtcttcatatgctttttagctcactctgttgcctaaatccctttctacatctcttgcacctanaatggagatcccttgtgtgaacctgagagaatatgggcgacttagaaccaaatgatcctggaattctaaaggccacatgtctaccctgggtgcatttttttggccttgggggca

SEQ ID NO: 218575 - DNA, 473 bp, Homo Sapiens
  misc_feature (424)..(424): n is a, c, g, or t
ctcacttaaaaataaagttttattaatcaaaaggcacaaggaaacagtggacacatggaaagggagtcaaattttttatgttcaacattcattgcagggtaattagcaaaacttaaaagataaagtaggattctagcaaacaggactcttcatacagtcatctaatacagctaatatcaataatgctctattaaacagtatgtagagtttggattctagaacagaataagtaagcaaaaaataaaaactgttttagtgtctcattaaatgtcaggatcatttttctcaatataaatataaggcctgtcttttcagactgtcaaaaattacattctttaaaaaaaagtcttattctattcacctcatgcattgttggcatttaagaaacttatactatccattaatgtttttaatcttacttttntcagttaacatatcattgacacctgtgttttcattcagtcttcacaacc

SEQ ID NO: 218576 - DNA, 513 bp, Homo Sapiens
  misc_feature (324)..(324): n is a, c, g, or t
ttttttgtgatggggtcttgctctgttgcccaggctggtcttgaagtcctggcctaaagcaatccttttgcctcgacctcacaaaatgctgggattacagacatgagccactgtgcccggcccaaaaggcattcttacaaaaccgtgcggtccctgataagtggatattattaactctgtttccttgatgaggaagctggggttcagagccaactgttagcagggttgggaagtgagaatctctgcctcgagacacaacaacaagttgtttgtcccacatcatgctggggtggctgggaggggatagggtgaaacaaggaacanccactccactgaaaaccaggccatgtcaaggggatgagaaaggcagtgttacctcccgagaggctactccaaggagagcggctcggggtcactgtttcccccttttcaggctggcccacttcactatctgcgcccccttcctgccctctatcaggtccggctgtaggccactccctatcagctgcacct

SEQ ID NO: 218577 - DNA, 825 bp, Homo Sapiens; identical to SEQ ID NO: 57848

SEQ ID NO: 218578 - DNA, 468 bp, Homo Sapiens
attttttgtagaggcaaggttttgctatattgcccaggttgggtctcaaactcctaggctcaagtgatcctcctgcttcagcctcccaaagtgtggggattacaggtgtgagccattgtgcctggtcttaaaatgttaaacatggagttttaacccaacaattctactcttttatatcccagagagctgaaaacacatatccactctaaagctcatgtatgaatgtatgtagcagcattattcatagtagccaaaaagtggaaataacccctatgtccatcagttgatgaaggtggtatatccataaaatggaatgttatttggccataatacatgctatatatgaagtacttaacgtggataaaccttgaaaacattaagtgaaagaagctcatcacaaaacttcacgttatatgattcattccatttatagaaaatgccccagaccagacaacctataaaaacaga

SEQ ID NO: 218579 - DNA, 480 bp, Homo Sapiens
ttttcagattcctttgcacactttaacttgaaggttaacagatataatatatgtagataaacacatacaaacacatacaatatataaatatatctatgtaatgtccatttatgagtatgtcttataaaaaaaaaggtaagtcagagatcatttccctacttattcttctcaggggaggtgaatacaagcaacccacttactcagccctgattatttcaatcagccaattagctcagcccagtgtattccaattagccaattaatttggtctaggtaattctgatcagccaattagctcagatcaggtaaatccaatcagtcagttacctcattctaggtgatttcaatcagccaattaggtcagcacttttgatttcaatcagtcaattaactcaaatcaggtcattacagtcaattaaccaatcccaggagattaaaatcagccaattagtttagcccaggtgactccagtcagccgat

SEQ ID NO: 218580 - DNA, 463 bp, Homo Sapiens
tttttctcattctgtaagttttagctcaaataccatctctaagaaatttgccactaaacttcacgttatcatgtctgtctttacataacactatgttatcatttaccatattatactaaaattatttttcttatgtgtgtgtctttccacttctataagctccttgagaactgcaaccatgacaagccctccttatatctgggatagtacttgacaaggattaaggtctgtcactttttgttcaactgagccatactcctccatagatgagttttcaagtgaagtcaagagtttgtagcatagttcaactggtaaacatctgaatttgtgctaataggataatgctcatgattgatactgtttcaattattttctcaaagatcagcaacctaaataagaacaaactctagtttcatcagcatgcatttcacattgacaatctttctcaaaaaataaatcttgc

SEQ ID NO: 218581 - DNA, 397 bp, Homo Sapiens
ttttttatacaaacacggtctcacatacttgaactcctgtatgtaagcaatcctcctgctttggcctcccaaagcgctgggattataggcatgaaccaccacgcccagcctattactgaaattttaatgatgatgacaacctcatgacaatcccaaagtactagtatatccattttactgatgagaaaagcacagctaatatgcagtaaatctagtttctgaattcaggcattcttattccagagcccatgctattaattcctatactatactgtctctatataagcatgtagcatattaatctttttaaggggggagtattagcagagccacatggaagcagtagctgctaatgtgtaaagtgacaaggccaggggcaaacctgaaaaatctactg

SEQ ID NO: 218582 - DNA, 466 bp, Homo Sapiens
tttttttttcataagcaaagttgtttatttaaaatcagaaaatataaagatgctgagtcccaaaaatgtgataaaattaatatgacctctttccaagtataacacattgcctttctctaacagaaataaactatgattcttattacagtcttaaaattctttttttaatgaatgagtgtaactttttattaagatagaattatttttattaaagaaatatatgaaaatggttaagtaaaatcaaatggctccaaaagtcttacaatgaaaacagtcctgcgacttgttctttccagaggaaagcacttttcattctcttagtttttccttctggtagttacctccatgggttttaaaaaattactatttttttagtttttcaagtgaatacatatattaatacatgtaatctttaaaagcctcttcagtttataatgcatcctaacagtcccctgccccatccctc

SEQ ID NO: 218583 - DNA, 469 bp, Homo Sapiens
ttttttgtctgagtcaatttattcagcacaaagttttcactctcatagtgtgttgatttccatactgcaaaatgcagttaaccaatcattcatagcaataaactcttgcatttagtttttcattcccatattaacttttatccagtatttgtgaatagcacctaacatggaaggctagtatctgagttaatgacaattttatggaatttatctccatcagttgacactgtaaacagaagggtgaaatgccatcatcataaaaagcctgaagctcaccagcagatatatcttttccttcaattccctgggggtaaagcagcttgaattacatctagcaaatgtatttaagtacaactgcacaataagcacaactgaaaatatgcctctttcacagtaactgacacttccggggttttcatttttttctgcatactaatcattaacagtattataccaaaaagccatttta

SEQ ID NO: 218584 - DNA, 495 bp, Homo Sapiens; identical to SEQ ID NO: 141221

SEQ ID NO: 218585 - DNA, 451 bp, Homo Sapiens
tttgaccacagaagtttttattgccctcctgctccgcaaagggaccttgcttctgctggtttagcacctcaagacgtctgtgatgttggtctcagacaccactttgccgtccactatcctgtgggtgttggtcttttggatgctttacaggtatttgctgctgtccagaataccaccaagattgaagtcctccccatcttctagcaggcggcagtaggtggcaatctctgtgaaatgggacacagagatccaggagccccagaccccacgcctgcatagaagctcgccgcgctgctgacctgctgagcactttagctgggcgactggacagatcccagggacaggtagtagttgatggagaaggtgcggagcaagtggtgaagctcgctgtgtacggggaggaaagcgagaggacaggactcaggttttgccgaggtcctgaagataatta

SEQ ID NO: 218586 - DNA, 397 bp, Homo Sapiens; identical to SEQ ID NO: 59827

SEQ ID NO: 218587 - DNA, 419 bp, Homo Sapiens; identical to SEQ ID NO: 60664

SEQ ID NO: 218588 - DNA, 752 bp, Homo Sapiens; identical to SEQ ID NO: 135628

SEQ ID NO: 218589 - DNA, 1000 bp, Homo Sapiens
cactcatgatttgatgacaggcgggtcatttgttcattgacctgtactagtcaacggcaatgcaggggtttgccctatttcatctgaggactccagggactgcagctatcactgcatatttctaagaagcctcttcagagagttcatgacaacatcctcactgatttatgctgcactctgagccctcttctctatgatcggattcctgggattgccggccgttgttctcctttaggcgccaaagggaacttgactcttcctaattgcagttgagtgaaggatgaaacactcccagaggtaagcaggtcaagactgtaacaggagagttctgaagtctctaagagcaccctttatctctgacaggtcctcaggaagctaagttgaggtaaatcaagctgagcctgtggtccagccttgaaagggaggatgggtgggcagtgtggaaatgttctggtggaaagcaatgagcacgagacaaggggtcaggaggcctgggctgtgcatggcttgctagaagcctgtcaccctgctggacctcaggtgtgtcaccctggatgatcccagggtccctccattgccttcttggattctatgatgtggctggtcagagttttgtgaagtttcctggcagagcaccagaggggcaaagaaaacattctggggcgtccctcgtgcttggcccaaaagaggacagaggccatcataagataaaacagattttttaaaagaaggatgcactgctacctataaacaaccttaacgaaatactgattctgcttactaaactccccagatctgtaacaaacaatgcacattaaaaacatgtaatctgaaacaaagttctaaagatagatggtggtgatggttgcacaacaatgtgagtgtacttaatgccactgaaccgtatacgtaaatatgttcagacagtaaatttaatgctatgtatattttattacaataaaaaatcctagttaaaactcaaaaaaaaaaaaaaaaaaaa

SEQ ID NO: 218590 - DNA, 374 bp, Homo Sapiens
tttttacatttttctccaaataatttattaaaaattacacttgatattcatgtggaaattaagaccaaactgcaatgttttccatttccaatgtacaaaaagttttgttcctgagaatggcagattctaaatgataagtaaaataaatatggcatttatttaagtagactgagccacaggttaatcttaagtggtgtttggttgatgggagagaaaatcctccatcagaattgttgtaagaactttccaatgtgcttgacatgcatccggggacagtgacttacacctgaatcccagcactttggaggccgaaccaggtgatcacctgagggttgcgaggattgaccctggccaacatgggaaactctatctct

SEQ ID NO: 218591 - DNA, 482 bp, Homo Sapiens
tttggtttgaaaacatacattttatagaatggcatgatataaactatccaaacacaaaacacacatgaacacatcaaatgacaggtcatttccttttgcagaaactggcttaaaaaattgatattgaaatttcatagttgaaaaaaatatttctgaatgtacaaataaagcagcagttttgaatagaaacaggaagttaccctaggcacattcattagccacatggtagctacctcttagcctcattgttgattgtgtgaatgagactttctttgtatcacattaatacatgtttttggttattttttcacaaaaatgaaagaaagtatgttggtttcatattcaaatgaattatgcccaggataatccttatttatacaaaaagagtttagagagtgaaaaagagaaacagaaaatatggttctcatacatgtctttttgtaccccaaaaaactttggggcccacttttcaaagataaaaa

SEQ ID NO: 218592 - DNA, 522 bp, Homo Sapiens
tacattagaaggaaaagacactttctcttactaaggtatttttgcctgttaactaatatgcagttgcagaatgaaccatagtctgtctgcatttcaaagagcactacaagttctgatatttaaaatgagtgtatatgccagtggcccaaggttggagaagaaagttggtaacaaattggaaggtggcagaaagcaggaaaagaaaatgtaccatatatggcagatgaagggttttaaaatagcttttacaaatcagcacagaaaagataaacaccatgacataaaaatgagcaaaaaatatgaaccatataacccgaatggtccattaacatccatgtgttcaactttactgaacacatgaatgaaataaaataaaaaacactaataattttttcttacctgctaatttggccaagctgtttgttttgaaataatttctagctaaaagaaaagtggcaaaagtagtataaagaatccctgcattctcttcacccagattccccagtacttaacattttacct

SEQ ID NO: 218593 - DNA, 494 bp, Homo Sapiens
tttttttttttttttccttttaaaggtcctttaatgttgttatagtggatatgcaataaacacaaatggagggtaaaaggggggggaaattccttggtattactgtcgtttttgttttgttttacctagcaagaatataaacttattctcaaaatcctactgaagccactcacagtgacagaaccatttttagggtgcatgacatggatcaactaactacaagcaatgggccagtggcctgatttgtaaggcccacaaactaaaaatggtttttacatcttttttctttttcttttgaaagggagtcttgctctgtcacccaggctggagtgcagtggtgcaatctccgctcactgcaagatccgcctcccgggttcacgccattctcctgcctaagcctccggagtagctgggactacaggtacccacataataatatcctccattttatcctcttaaaccgcaaaggttacattatttattatctggccgct

SEQ ID NO: 218594 - DNA, 514 bp, Homo Sapiens
ggtgataaaaactgactaaatatttaaagaaatataaaataaaaagcccaatctacagttcatctcagaagttttcagatatgaagaaacctccccacctcaccaaatatttttattcttattttataagataaaaatataaaatttggtaagttctttacattaaaaacaaagtgagatttttataagcaaaaaattaatttagcatatccacatcaaaccctggatacctgcattgattatgaatcctttcggggtggatgctaatgtatggtgaaactgttttatcaacgtatgagccaaatccaagacgaaagtcacgggagaaaaatgccatttttctagataaatcgtttccaacggaatttaatttttctatattattgtgcattgatgctgagacatcaacaagataataaagatccacaggatatttcttcagaggatgaactttcagcataaaattagcttcggctcctagttcaatagaagaaaaacatcatgtagtcttcat

SEQ ID NO: 218595 - DNA, 606 bp, Homo Sapiens
tttttttgacatagttatcaagtgtttattcagaaactatttaaaaaattacatgtgctgggatacatatgagactgtaacaacagtagccccatcttacagatatcctgtttgtcattatcatcattgcttgctgcccacagggataaagacattgtatagagacttgtacagtccatgatttggtcttctgaggtgccagtacacgtggatctgtacaaatgcaactgggtttggttaaacaatcgaaaatcggctacaatagtagtcaaatgaacatgtcattttggttcattaataaaaatactttcaaatattttctaataaaacccaaaacttgcaaacaattctctcggaatggcccaatcaattgccctattttttaaaatacattgggatacaatcagctctgttttcttaaaagaaaatgcagattcaattgggtgggttgcattggcttttaaagatttagccattaaattctccacattttgaatgattgaaaatgccttcctgataccacgtcagttttagaaatgcagatcctaatacagtgtgacacctctgcaaaatcataggctaaatagtgaaggaaagaggaatgct

SEQ ID NO: 218596 - DNA, 544 bp, Homo Sapiens
aagcttttttggctggatgtttatacaatgcaaaataaccctctccaaatttattgaggtggccgaccatgtccatgaccaaattcgcctctaaactggaattcagttgctgacccagtcccagcctcggctttcttgtcggcaccagggggcacagcactccgtctgtaggtatctctgtcggctttccctcttgtgagtcttgcaggtcactcacccttcagacctttaggccgaggcctgccagtccctggacggctacggcatagagtggcaggcacaatctccgggggcagatgaaggtaatcacggagatactggataccctcattgggaaggtaccagtagaaatgtctccaggcaaactgtgccttcacgtagcctcgggacttgagagactgcatggcctttatgacaggaaggttggacacattcttgtctgacagctccaggtgcttaggcatgtggatgtccttggccaccatgactccctccttaaaaaggagtcataaatggcaatctggttcttcttaggcatcaacat

SEQ ID NO: 218597 - DNA, 573 bp, Homo Sapiens; identical to SEQ ID NO: 60087

SEQ ID NO: 218598 - DNA, 543 bp, Homo Sapiens
tttttttttttttttttacgttatttccagcgcatagtgtctttatttacaaaacagacggaatcaaacaggttggcgttattgctttcttgttctgtatattcatattctccacttgaaaaagcacacagtcaaatctatcttcatccattctgttgatgagggtaagcaaaaaagatcactggttacttcaaaagaaccatttagagtcaaaatgcaggaatcttagtcctgtttccatttttgtcccccttgcttcacttggtatgtcatgctctatctcttctcctatgcagactttaagtcagtaaccatcaatctgaagaattccttcctctgctgccacctaccagtttagttgtctgctgtaggcagactggggctgtgcctgaatccaaaccggtgcatttaccattcattatacagctgcattattgggggaaggggagtttagaagggcactgaccccgaaagttctcaatacttctcactcatcatcaggaagggggaagaaggaaagttttttctctgggtatttttttc

SEQ ID NO: 218599 - DNA, 555 bp, Homo Sapiens
tttttttttttttttttaggaatcaatgctttattaaatgataaatccatagtctgtcgggttcaccgacgccagccatcggtgccatattgccacaagtgtcctatggtaaagcagtttttcttggtccattcaaattgggatgggaagcagacgtttttgtagaatacacctcccgggcagaaatggaattgcctccctgtggtgcgcagatggagaatgtcctcgcattgtggtttcaagtcctggtttgacggccccacgacctggcttagacacaggagctgctcttcaactgtttctgtttttttgcaagttttgtgaaatttttttcttcagaattgtgccaccatgtctttccatccattataaaaatattatatgtcgtgtttgccagaggagatctaaaacaaaataacaaaaaccacagtgctcagctcagcgcacaggagtcctgctgtctactcgctgggcagtggtggaggctgacgcttcccagcgtgaggattctgcttcccatcagtaagggttgtcatctgtgaaattctttttgcc

SEQ ID NO: 218600 - DNA, 546 bp, Homo Sapiens; identical to SEQ ID NO: 60653

SEQ ID NO: 218601 - DNA, 424 bp, Homo Sapiens
tttttttttttttttttaatgtacgtctaactggtttattttaaaacctctcgaatctgcctcaaaacagtaacaatttactgtttaacaatttagggctagggttcagtttagggttaggtttagggttccgtaagacacccccaaacctcttctatcttaaccttaactgcatctgcctgtggggccccagctttccagggctctgtagcttctctcactatagaggcttcttccatggctgcggtaagcaggctgggacatctgcaggaaaggctttccagaaggaactaactgggcctttaataacctccgtctgctggctcaaaattaaccttagcttgcagtcattaggctcaagctttaatttaccatgtcagagtcattcacttagtttttgaaattgtgtttgaaaaatcccctc

SEQ ID NO: 218602 - DNA, 515 bp, Homo Sapiens
tttttttttttttttttgcatttatttaaaatttatttgttcatagctatacatatattatacatgtatacctgctcacagcataaagtatttcatgacatacttgtaagagtcagtgttctatgaattcactagagaagttacagcattttgattatgatacacgaaaagaaacccaagtcatttagcttaactccttaatttcataaaccagaaaactaaaatccaagatagattgggtgacttggtctagatcacaaaccaaagttagccataattcggtagtgtagtgcccggtccaaaacctcatagataatcttataatcaatggactctttctgaatgctagtcaaaatgtccttttgtgtgaattttaatgtaccgtcatcaactgcatgatattcttccccatacacaaagtgttatctttttgttgtccatttcagaattttccatgttaatattaaagttctaggaaaaaaggctaagaatcactgcacatttattgagtatct

SEQ ID NO: 218603 - DNA, 490 bp, Homo Sapiens
tttttttttttttttttaatagtttctttagtcactataatctattcagaaattatttctatttcttgaatttttaaaatctccaaatctgaaaacttagatgagtaaatggctttctgggaaaataagaattatcaaaacgaatccccaggagacagaaaatccaagtagataaaataacaaatagcagcctgaggaagccagcaaggggcaacaatccctgcaaaaaaagaacaagtgactttggccagacctgttaaggaccagctgcctccagggctaagttaactgttccacagcctaggaaaaggaggaaagcttccaaattctccatgaagccagcattctattaccaaagcctaaccctgagagcatgatcaaagaaaactacatatccgagtgaaacatcaggaacagactccacagcaagatgccacagacaaggggaatcaacgaaaaaccaggcagtcacgtccatgggaagcgaaag

SEQ ID NO: 218604 - DNA, 531 bp, Homo Sapiens
tttttttttttttttttccacagttggaagaaaatgtttatttagcaaaaaggtatggagtaaaattggtagaatagaaaggagaaattagaagtggggaattctgagaggctgttttaaaacatggtaactgggaaataattttgacaaaattctcataggtaatgaagcttcatatgcccttactgcctaattaaaaggcacctaataaccaattttatttgtattaattgtattgggaataattttctctaaccttctacctttcataaggaaaaatacaatccgtgaacacctagatggttctgttttcactgtatggcacaaagtatcaatgatttaactgtggagagtagtatcaagtagagacttgtcttcttgtgttcaggaagtattagcctttaactatgcattttaattgtcaggtatgcctttgccatttgaactgtgttactcttccctatcacagcataatggagataaaaccattgtttttcattacctaaccaagagtatcaactaatttaaata

SEQ ID NO: 218605 - DNA, 577 bp, Homo Sapiens
ttttttttttttttgttcttaaggttcatttaatgccacagacagagaacattccataaaagattaagattaattttatatgcaaaataacttatatctacaggtatagattatcactcaaactgttagaagaaacagatattcattcccaagaatatagttttggaaaagaatgttactaaatgcactatttttggctatatctatgtatagaatttaaagacatgccttgattgctcttatgggggcagtgaatataattttttaaatataaaaagtatatcaaatttgggcttgtttaacagctagcaatttaacaattatttcccttttgcatacttaaaaggcccttaaaattatctgaatcaaagcaaaaaaaatattcattgctccccaaactttataccatagaactttttaaagactgtttaaactagtaatcatttcttcataactattaactaccattgaaccaatccatctattaagacaacagtggatgttgtcttttttttttttaacccaattaaaagaaaaaatctgcttgctcagtctttaaaaagttgaactcagtcac

SEQ ID NO: 218606 - DNA, 510 bp, Homo Sapiens
tttttttttttttttttgtaaggaaagaggttctgattggaactgaaggcttcctttctaaatccacaaagctggatgaatctcctaaaagctcttgcccagcttggtaggagagatgcgcgatagagccccaaacacctcctggctaggctcactttaccctctatttaggaattcacactgcaacactgaggcacacagctctccccagtctttgggggcagcatatgagcttatggccaaacccatactttgtgctgtcttcttggccctgcctggagagccacgtggcagggctaccttaacaccgcagtaatccctctgatactcaattccacctttactggaaatagtgttataaggtgactccttgcagttttttaattgttgacaagttcaaagggatattttattctctgctgcccctgctttggtgcagcctgtgctcttttcttgtggctcctgggagtcctgctttttgcttgctatttctgacctctctttctctac

SEQ ID NO: 218607 - DNA, 603 bp, Homo Sapiens
  misc_feature (566)..(566): n is a, c, g, or t
tttttttttttttttttcatcttcagcagtctagcatttatttcattagtccttgaggattcattaaatgatctgcaagaaaccaaatgtccccacatcacaggttctgtgctctactctctgaccacttctctgagctgaggcagcctgcttggagtatgggcaccagcatggcttagctacttttaagataaaaagtggaggaaataaataggtagactaggtaaggcagaagagaaggctggcactttgggccctgacactagtgggcaccctgtggttctgggtgagatggaggacacggatggggtggggtgtgtggttggacacaatgaccagagctctgggtaccaagcagatccccatgtttgagattcaagggcacaaaggcctgctgtgaggcacgtgaacaaatgcaggactgagctccaggaacgcactctcccaactgtaccctcctgtgccagtgacagaaaaccagggaaaacaccaagtattgtcagagacaaatgatgggggcaagagattggcggaattggaggtggttgactaccgcttgcttctanaatcaaggagaactgacctaaatcaactgctcttcca

SEQ ID NO: 218608 - DNA, 567 bp, Homo Sapiens
tttttttttttttttttctaaattcactttcagtttttgctttgaatagcttgatagaaaagagaaaaagccagaaacccacaaagcgatctgacaaaatttaaagataatattcggggactgatagagttgatgcatgggaggctgttagaataagattaccattaatgacacagcaagatgaggcatccagatggggaggggcagacagatgcccaggatggagacgccttctgcctcaaggtcaaggacagctgcatttctccaaagaggattctgctctacagatgggagacacttctccaaagtgtcagcgcagcacagactgcaagggatgccaccaccgtccccctccatcttcccaaaggtgaagaaagaatgtctgggaagatcccgaactcccacaccattcgtggatggaagctcagacagcaagcgacggcccagctcctcaaggccacctccgacctcggcggggtggggcagtcgtgtccactgtggggatccacgtcctgactaaccttgtgttcctagaaaccctcactggcagatcggtgcctcctgaat

SEQ ID NO: 218609 - DNA, 449 bp, Homo Sapiens
tttttttttttttttttcaaagtaaaagattgcctggctttaatcctaaaccatgtaagggtagatactgtgatgtggaagccaatgttctcgggatgaatgaacagaagtccctcaacatttttagggatcatctttctggcatttgcagctgttttctagggtaagctactttccagaaaaccaagtgataacgtgttcagactttcctaaataaatttcctaagggcctaccctcagtgttaaaagaaaagaccaaatgtttgaaatatctcccgaggaagaatgaaacagaatgttaggaatggcgaacagacaggtgtggcacatgcagtagccagcagcatcagtgatggacaggaacacagacgtcatccttagccacggtgcgcagctagcacggctgcacttaggctcacaggaggaagacgggtggccactgttttggt

SEQ ID NO: 218610 - DNA, 548 bp, Homo Sapiens
tttttttttttttttttgatttttttcttttccttttttttttctttttccttttttaatgaaatcacttgacattatcgcccattattaagccctttaggcttaaaggcactagggagcaggtctggtgaagttcagtggtgcgcctttgtgagtgagcctgcacaggccacaagttcacaggaggagaggggcagggagcagggacctagggctccctgatggagtgactgaccgaacagctgacttatcctagatgcttgtttatgatatggagtcccctgtagcagtataaatgttggccaagaagacccgtgaaacaggaagctaagagacagtttttagatatttgctattccataatctgttaacaaaagaaatcactccctttcgacgcagctgatgggtagactggtggactccatatcctgagcatgtaaagttaaggttccctgatttccaaactgtttccagacagaatacggtgggcttacgtcttcataaaacacagattttatgttcacccctgaggcaagaactactgacat

SEQ ID NO: 218611 - DNA, 536 bp, Homo Sapiens
tttttttttttttttttaaataaaagggaaaatttacttggagaaggcgggcaaaaacgaggaggtcaatgggtgttggcagcggtaccagggacagtgaggggggctttcctgggctcaggcctcgccggccgcctcagggtgcttctgccgcaggtgtttgtccagggtggctcgcaggccgaagggcacatggcagtgggggcactcgaagcgggtgctgccaggcgtcatgccgtgcatgcggcggtggcggttgagcttactgctctgggcgcaggcgtagttgcagaactcacaggtgtaggggcgctccccggtgtgtgagcgccggtgcaccgtcaggttgctgctgttggtaaaatgcttcccgcagaactcacagctgcccccgggcccgcggctcttgccccctgacttgggcatctttttgggtgatgccttctggctgtttgcagggtcagttctttgttccgtggtgatggctccccaagtgtctccaccagggccggcacgaggcctcgtgccgaattctt

SEQ ID NO: 218612 - DNA, 775 bp, Homo Sapiens
cccttttttttttttttttttttttttatccgtaacactgtttattgatcaaacgaaggactcgctgctatctaaaatttcataaacaccattaaaaattcaaaattgatattatactgaaccttaaattttcaatagttcaaagagacagtttttacatgtatagcacacaatagatgaaacttaatagcagacatccctagaataccaatgacaagtccaccaagatgcatacaaaattacagataagcatttctttcactgtttttgttgtgcagggaaaaacatttatagaagaaatagaaactcagctggtgaatttcagatatcatcatcatcttcttcatcctgagaagatcccgcctgattagatgcactggctgaggcagcagcaagctgggcttgttgggcagcttgctgcatttgaagccattcctgttgggccaattctgcttgttgctgtctagcttttgcaaataattcttgttgctgtctcaataactcttcttcaggaatgccaaggttttccaaacgagaactggcctttcttctttttaatgctactgttttacactcttgcaagacttcttttacttcactgatgtaagagccaaatcccaaactttctagtgcttgtatgacatgctctggtgagatggtcttcttttccgatttgttacaaatctcattggcttcagaagatataaggtgaatgaattcagtgcagcagttcaccaccagctctcgagcatcgttggccacccggacattagga

SEQ ID NO: 218613 - DNA, 812 bp, Homo Sapiens; identical to SEQ ID NO: 43373

SEQ ID NO: 218614 - DNA, 830 bp, Homo Sapiens
ataatcagaaacttacagtttattgtgaataaaccactcaactttgagcagatgacattgcctcaattaactttttcgttgaagaaaaacaaagatatatggtaaattcatgaaaatactgtgtcctttctcttccaccctttgtagggcagaaaaattctgcctgacctttcccatcttcctgatgatgttaacaaacgacagccactgagggcacaggagggggctctacacaggccaagagctacaggctacagtctgagcacagaaaaccctccagctccagcatccagggccacagctggacacaagtacagaacctggcagccctgcagcccagacaatgcccagggtgtgatttagggtgcagagctgcaactcagatcctgtgccatggcagtatcacaggaaggacttgacggagaggtgaaggctccagacgccaggatatttattccctgtgccaatacagcattcacacctgacctccaggtcctgcagcaggtactctcctcattcacagttagctccccactgttccattctgggttcatttgctatactcctaatctgttctcccaatccaccccacagtctctcccttgctggggacaacacaggaagagacaaaacctgaggaaggaaaaagggaacctgcaaccagccatggacctcatgatcccatgagtcacagctatcctctgtctttaagaatgactgttttatagcttacatggtacctgggaaattgctgacttgcagctgaaatgtatgaataccaaagaatttctatcacaatattcacagatctctgtatcagctctacttgg

SEQ ID NO: 218615 - DNA, 411 bp, Homo Sapiens
caactgataatcttggattttctatgcagatgatgacatttacagcaaatgataacaggggcctatctttaaaaggacaagcaaaaagactagggaaaatatttctaaaatatattaaagacaaaaacaatcaatgtttacaacgtataaagagtgccaaggccaggagcggtactcatgtgcatgagtacctgtaccactaaaacagatttggggaggccgagcattttgggaggctgaggcggatggatcacttgaggtcaggagtttgagaccagcttggccaacatggtaaaacccagtccctactagaaatacaaaaattagacaggcctggtggcacatgcctgtagccccagctattcaggaggctgaggcaagaaaatcgcttgaacccaggagacggaggtt

SEQ ID NO: 218616 - DNA, 569 bp, Homo Sapiens
  misc_feature (510)..(510): n is a, c, g, or t
aattaaaaaaaatagtatataggcctattcacattcattcatctcacccctgattaaagttcagtaacctttatgaaaggccaccagcataatactctttcaagtcaccaggtatttgagaaccaccaaaataaaggctaacatagcctactgtaatgaaaaccaaaagtcattctaaaagggaaattgaaggatgcaaccggattgatccttctttgagcaccatttgtcacaagaagaaatttaaactggtatggcacataagattccagtaacaagcttcccctttttttttgaagcatctatctgaaagtgtgttgatacgaccaggtaggcccacctagctatgctatcttttgtggtatgactatcgtgattatttcatggatttttctctacagtctcaattttgagccattttgctagcttcaacaaaggtgatatgtattaatgtatttgtaagctttgatatttataacactttcatataaataaatacacagccagctnttaaaaaattacttttaagatcctgtgtcttaatgtggagctgggaaaagatgctgtgt

SEQ ID NO: 218617 - DNA, 465 bp, Homo Sapiens
ttttcatagaagaaactaaaaaaaaacttttttattaacaatttgttggtggcaaagaaaacaatgtctttacatacatgtttacaaaatatttccataaaataattgttttcctttccttttaaagatttgttttcacttggcaaaaaattaaaacattatttaccacaagcaatgaaacccagcacttttatataaatggttttatcttcccttcacccttttccttaaattcaatactcttacaggctacctaaattgataatgacatttagaaggatgaacatgtagtatgattaatggtagaactgttgtgttaggcaataatgctaaagttataagtgctacttgagaatatgaaggatttggaggattttttagggggtaggaacataaagcattctagaatatcactaccaggggataaaatgcccaacaccatccctgcactcaaacatgggactg

SEQ ID NO: 218618 - DNA, 631 bp, Homo Sapiens
taacttttattttaggttcgggggtacatgtgaaggtttgttacataggcaaactcatgtcacggggttttgttatacagattattttatcacccaggtattaagcccagtacccaatagtgatctcttctgctcctctccctgctcccaccctatatcctcaaggagatgccactgtctgtggtttcctactttgtgctcataagttcttatcatttagctcccacttatacgtaagaatatgcagtatttggctttctcttcctgcgttagtttgctaaggataactgtctccggctccatgcatgttcctgcaaaagatcggatctcattctttttatggctgcatactattccatggtgtccatgttccacattttctttacacaatctgtcagtgatgaacatttagattgattccgtcaatttcggttgattccatcaattccatcgtttacgtttgctattgtgaagggtgcttggttttttcaaaattggcttcctcagatatttgcaaaactttgttcacctgttcataagcactttgctctctttgctgggtatctggccagctggtccttaacgaaactagtgcagacattaaatcatcttctttcttaaccaccctttc

SEQ ID NO: 218619 - DNA, 622 bp, Homo Sapiens
tatttttatattgatgtatttatttcatgtatgtatatatatgcatatataaataaaaatagtgttgtctcatggtatgaataaatctagtcagtgaataacattcatacataatgcgaggtcttattgagattgaactgttaaatattttaaaagaaaaaaaatttttaaaaagaacacacataagaaagttggtgagaaatgtttaaaaatacagtatatatccctacatttgtatcaggaagttcatactgactgaaaatgtagctaagtatatccttacataatcaacatcatttgtcaacctaacttataatagtattattctcatgcagctaagtaactgcaactttgagtatcagccagtctctcatgatcagtacgactatctgtactgtacttttaaatccagttgtcatgggattgcaaactgcctcagcatcagaaactgctgccatttccagtacatgaactatgctttgggtttacttagaaactccttgttgaaaaatcttcttgcctcaacattactaagggaaacagagcaacgagatggattctgtcttctatattcaatgctttcaaccatggctttttttatcacattaatgttgttcagagt

SEQ ID NO: 218620 - DNA, 403 bp, Homo Sapiens
aaaaaataaattatttactttgctcccataatttttacaagtatttctcatgttttaccagagatcataaaagttgcaggtcaggccaggtgcggtggctcatcatgcctgtaaccccagcactttgggaggtcaaggcaggcatatcacttgaggtcaggagtttgagaccagcctggccaacatggtgaaaccccgcctttactaaaaataaaaataaaaaaattagccaggcgtggtggtgtgcacctgtgatcccagctactcaggagactgaggcaggagtatcgcttgaacctgggagacaatggttgcagtgagccgagatagcaccactatactccagcatgggtgacaaagtgagactctggctcttaaaaaaaaatttttttttaaaagttcc

SEQ ID NO: 218621 - DNA, 427 bp, Homo Sapiens
ttttgagacagagtctcactctgttgcccaggtagtggcacaatcattgctcactgcaacctccacctcctggggccaagtgattctcattcaagtgcctaagcctcccaagtagctgggattacaggatcccgcccccatgctcagctaatgtttgtatttttagtagagatggggtttcaccatgttgctcaggttgatctcgaactcctgacctcaggtgatccacccgccttggcctcccaaagtgccgggattgcaggcgtgagccaccactcccaaacagaacaacatttttttgatgtggattttaaaatgcctccccttctttcaacattaagtcccttctacatgccaggcactgtatgtgtgaaatagtcccaactctcaatgagtttaggcagatacacaaacaaaggcttaagga

SEQ ID NO: 218622 - DNA, 500 bp, Homo Sapiens
tttttttttttttttgatgttgtagaaaaatatttattgaaatggaaacatggatacactacgctgttaaatgggggagaaaaagcaggttagaaaaattgcaccagtaaccccaatttgcaaataagatatatgtgtgtataaacgaatgcctgacaggacacattccaaaatgttaacagtggtttatctctgggtgctgggattaaggatgaacttcattttcttctcctggttcatctgtattaaatgttttcttcataataaacatcaatcacatggattacttttgcaacaatacaacaaaaaaaaagtcaactgcattcaaacaaacaaacaaacaaagaaaaaaaacaccttcccatgcctcatgagtggaggccccaaggaagggggttatagaaagtcagatacatgttcactgcttggttttgcaacaagagctactattaagtacctactgcatgccaggcattacaacagatcccctttgatcttca

SEQ ID NO: 218623 - DNA, 445 bp, Homo Sapiens; identical to SEQ ID NO: 53790

SEQ ID NO: 218624 - DNA, 413 bp, Homo Sapiens
ttgagatggagtcttgctctgttggccaggctggagtgcaatggtgcaatctcagctcaccgcaacctccacatcccgggttcaagcgattctcccgcctcagcctcctgagtagctgggactacaggcgcacgccaccacggccagctaattttgtgtgtgtgtatttttagtagagccggagtttcaccatgttggccaggcgggtctcaaactcctggcatccggccctctgggccttctgagaaagttcttccaaacattccctgctgtggacagtgaacagcccaccataatgcagagccagaattaggataatgctaacaatatggatggcagagcccagaaacagagagaaacagtccctaaccgtcttgagaagcggaacccaaccctcactgaggccaacacag

SEQ ID NO: 218625 - DNA, 454 bp, Homo Sapiens
tgtagaaaacttagtttaattcacatttaatggagcacatgttacctacatagcacagtgctagacctgcaagggacacaaagatgtaaaacaaacacttcatcagacacttggaacttccctgaatcacagcctggattccccaaatgccctttgattttgatcatgtgactggtgttggcttggccttggctacatttaggaagccttggacagatggaaatatatactgcactcatcttagtggaataaaggacatatgggaattgttaaaagttatagcggctgggcgcggtggttcatgcctgtaatcccagcactttgggaggccaagatgggcagaccacgaggtcaggagtttgagaccagcctggccaatatggtgaaaccccatctctactaaaaatttaaaaattagccggacatggtggcatatgcctctagtcccagctat

SEQ ID NO: 218626 - DNA, 414 bp, Homo Sapiens
cgattgcctttgcctttaattgatgacagctgggggggccgccatgccttccaccccatcaggcccttgcgtcttccagcaagtgcactgggcaggcccctgaggacactgaggacctgtccccagcacaaggtgagccaggtgggggcctgagtccggggcttgagtccggggacctggtcagcagggagcaaagtgggcctcgctgaggtcccgcaggtcgagccccacgacctcgggcgggctggcacaggtgatgttgttgtaggtgtacgcgggcggctggcaatcgtccccctcacagatggcctggacgaagcggggcacagcactggggttctgcagggcgaagtcccgcagcgccttgagagggcagccacagtcccaggggttaccctccagccacaggcgctc

SEQ ID NO: 218627 - DNA, 562 bp, Homo Sapiens
tttttttcttaacagtctggctgttgtttgaattaaactcttaaacaggatgtttagttagagggtaattgttgagtaatgatgcatacaacagcatacttccctttcttgctgggggtgcagcttttcagttttcttgttttactttgacagtgcaaggggaactgaaaataatttccattgtattatttatcttagttcagctgagggctttatgagacaatggatggggaggcagtaagacggtgatgagataaaatgtgtgtgttgcactgactgtctataaagttatcctttcttcatgaaaaagtagcatttaaatctggatgagtttataaaggattacaaaatgctgatttatagagtaaactttaaaatattaaagactaaagactaaaagaagagtaataatgaagtaatgtaggctgtcacttctctagatttgtattgttgaaaatttaactttggacatctttatagattattattttagacctacaaaaactaccctcaactctgtggctacagctagaatatgaagcatcattgctacaccagttct

SEQ ID NO: 218628 - DNA, 546 bp, Homo Sapiens
  misc_feature (214)..(214): n is a, c, g, or t
tttttttgagacagggttggccaggctggcctctttatctgtttttgtattgttttctcagaggcgctgagtgaagatggtcagatatgtgtgtatttttttaaaaacgatttgaaaaaatatgatgttcctttgtcgtgggaacaagccaggttgcagacgcagaaggagctacagctgagagagggacggtgaggttcatgttcagtatgtntctgttgcttgctaaactgtatttttcttgcaaagtaaatagaaattaacatcctacatgccaaatccagtccactgtgggcagactgtgacaaatcctcaaggaacagatcattcccatgcagtagaaactattctagaacaaagttaaagcatctcacttcatttatcaggcatacctgaccctgaaatcatacctaaccaggagagtacagctgacatttcatctcacttccaaatttggttccaaagcacagtacctaaaaaagttcacaagtatgctttctcccaggataaacaataacagtgaaaatctattaatgtaatttgttg

SEQ ID NO: 218629 - DNA, 565 bp, Homo Sapiens
  misc_feature (476)..(476): n is a, c, g, or t
tttttttgctatccttgtctggtttggttgctgaactgttcccacaagctgatgaagcactgtcaggagatgtggggagtccagggagaacggtcactatccggccactgggctcagcctccagagaagcactggtgatgcttggggaagtcagtggagcagctgctgcacaggccagaggggcactggctcgactgatactgatggcagcagtgtgcgtggctgagcctggcatcagaggcgcaggttgtggggaggccagcgagtgatgggacaggcccacagatgcagggctgaggccggcggcattctgtacctggatgggtgtcactgctgccgtggggcgttcctggttgtgcgctgcaactgtcctcacagcattgcgggcctggttgactgtcatttgccccgtcatgtgcaacaagaccttagcctgaggacttgtctggatgtgagctgctgataccacagctgcngggacaacactgggactcccagccacgccatttccctggagcttctgggcaggccctcctgccgtggaaagactgaccatggtactccc

SEQ ID NO: 218630 - DNA, 478 bp, Homo Sapiens; identical to SEQ ID NO: 59451

SEQ ID NO: 218631 - DNA, 746 bp, Homo Sapiens
gccctgctggttcaccaccgcttcatcccaatgcctccagctccttcaagcccagtgctttcaagtttgccattcagtatggaactgggcgggtagatggtatcctgagtgaggacaagctgactattggtggaatcaagggtgcatccgtgattttcggggaagctctgtggtaatccagcctggtcttcactgtttcccgccccgatgggatattgggcctcggttttcccattctgtctgtggaaggagttcggcccccgctggatgtactggtggagcaggggctattggataagcctgtcttctccttttacttcaacagggaccctgaagtggctgatggaggagagctggtcctggggggctcagacccggcacactacatcccacccctcaccttcgtgccagtcacagtccccgcctactggcagatccacatggagcgtgtgaaggtgggctcacggctgactctctgtgcccagggctgtgctgccatcctggatacaggcacacctgtcatcgtaggacccactgaggagatccgggccctgcatgcagccattgggggaatccccttgctggctggggagtacatcatccggtgctcagaaatcccaaagctccccgcagtctcactcctcattgggggggtctggtttaatctcacggcccaggattacgtcatccagtttgctcagggtgacgtccgcctctgcttgtccggcttccgggccttggacatc

SEQ ID NO: 218632 - DNA, 648 bp, Homo Sapiens
gctgtctcagtcaagaaagaatcagaagatcctaattactatcaatataatatgcaaggaagccacccttcttccacaagcaatgaagtaatagaaatggaattaccaatggaagattccactccgctggtcccttcagaagaaccaaatgaggaccctgaagccgaggtgaaaatcgaaggaaacacaaattcatccagtgttacaaattctgcagcaggtgttgaagatcttaacatcgttcaagtgactgttccagataatgagaaggaaagattatcaagcattgaaaagattaaacagctaagagaacaagttaatgacctctttagccgaaaatttggtgaagcaattggcgtggatttccctgtgaaagttccctacaggaagatcacattcaaccctggctgtgtggtgattgatggcatgcccccgggggtggtattcaaggcccccggctatctggaaatcagttccatgaggaggatcttggaggcagctgagtttatcaaattcacagtcatcaggccgcttccagggcttgagctcagtaatggtgaggattctacaggtgagaagaacgttccggcaatgttgggccatggcaagtgtcttgctgggcgctcaccacgggggttttgcttcccg

SEQ ID NO: 218633 - DNA, 600 bp, Homo Sapiens
  misc_feature (3)..(9): n is a, c, g, or t
  misc_feature (14)..(15): n is a, c, g, or t
  misc_feature (30)..(31): n is a, c, g, or t
  misc_feature (34)..(34): n is a, c, g, or t
  misc_feature (478)..(478): n is a, c, g, or t
  misc_feature (497)..(497): n is a, c, g, or t
  misc_feature (543)..(543): n is a, c, g, or t
  misc_feature (560)..(560): n is a, c, g, or t
  misc_feature (576)..(576): n is a, c, g, or t
tgnnnnnnnttttnnggcccttttgttaannccntttttgtgtgggacgcttgctaagactttattaacgccccggagggcagggttaggaaagcaacaggagggagaccccgcgacgcgaagcgagtgctcagagctctgcagacacaaagatgaaaagcttggccacaaaggagctgacggtgccgtggcgagagagatccatcttgacggtcaggagcaagtccctgggctcggggacaggcttggtgagggccaccaccccactgtgggggctcaccttccgggtggtgaaaaagccctcctcattgccgccggtgatggccagctgcatgctgtccccggggacagcactggaggggcccatgcggaaaaccaccgcgggcgcttggatgttggtggggaaagagaggtggtagtaggttattctcagaggcagcttggagcactcccgattctcatggcaaggcaagcgctnacagcgggtggctgcggancggcggtagttctcaaggcactcgaaggccaagcagcggaagccgncctggatgttgaagcangtcttcgttgatggancaattggggatgccagtcacacac

SEQ ID NO: 218634 - DNA, 560 bp, Homo Sapiens
taaatctcggacctgtgtgagagattttccatttaaatgtatcaatttagctaggaaaattccaacattttctaaaggaaatatttttcaaaatccttttaaaaccaatcttacaatcttaattgtcacaaaaaacagatatcacagttatataagtacatagtataatctgcatttatttctaaatagagaaacaaagccaaaggcatagaaatgggatattcagtacctattttttcagagggttctattaaaaacaaagaaaagcagtgcccctttctcacttgggaaaataaatcaccttaggaaaaactgaaaagcattagcctacagttactacttaaaagcaaacaaacacaacatttaaaaagtgaattttattttgcacggaattaagtcaagcaacagtatgaattaataataaaataagaatatatagtcatccccctgtatccatgggggattggttccaggactcctctgcagataccataatccacggatgctcaagtccctcatataaaatggtgcagtgtttgcacataatctatgtacattct

SEQ ID NO: 218635 - DNA, 540 bp, Homo Sapiens
aaacatttgaagaggtatggggcggagggggaaatggaatttgaccgactcactattgcccagactggagtgcagtggctattcataagcacaatcatagctcactgcagccttgaactcctgggctcaagcaatcctcctacctcagcttcccaagtagctgggactacaggcgtgtgccacagtggccagctaattttttcatttttaaaagatgacatcttactatattgcccatctagtcacaaactcctagcctcaagcaatcctcttgcctcagcctcacaagtagctaggattacaggcgcaggccatcatgaccaacaaaaagaaattttttatattgattgcatgatgaaatattttgaatatattgagttaaatagattttctcatttgtttatttgtgctgttttctttttaatgtggctattagaaaatttacaattaactatatgggtcacatttgtgacctccattgtatttctattgggcaatgctgtgctagactcaccagaacgtatacatatttttattttt

SEQ ID NO: 218636 - DNA, 542 bp, Homo Sapiens
ggtaatttttcttttgtaccttaagagattctttttttgtgagtttgcttgaagttgaactgtccttctctgagccattataaagtttagattcagacttgctctttgacatagaaagtgaagattcatctttattttgagaaatatcttccttccctctttcaaaaccctggctatgaggacttgctggactaagagatggctgatgcaaatctttggttggcgttggataagcttcttttccttggcgctgactcatctttcctggtgtcagaagctgagattcgtcactgtttgctacaacagttgatggcccaaggacatctttgctatcaccaagaagcgaagttcgatcaggttctccatctgccaaacctccctccataatgaaagaagataggtttatgcttctctttccattaatgtgcagccattctgtaaatctgcaaatcccgtgcggagctcccagggaggcgggacgcaaggagccggttcctccgaggtcgccgcggcgccggggtccgaggccccgtaagcgtcta

SEQ ID NO: 218637 - DNA, 561 bp, Homo Sapiens
tttatggttctcggtgtactttattctcctgctgtctagctaagcagcccacacaggacagaaatgggtagcactgaggaatgatcagattttttttctatccccaatatttctgccccctccctaagccctgacccaaccctatcttaataatcacgaatggttagtacatcattctgtctctcaaagaacaactgaaatggaaacaaggcattagaggaccaggcctcttcttaatagggcttaggagctggtatgagctctttattcacaatggagcgtctctccttcaaatacctggatttttttttttgtacactggttcatagatcggcacttgactttgaacctggcaccaaaaggcacaatatctgataccctgtacaagagctattagagatgctgccatatggatgggcaaaactgagccaatcccacttaggaatggaaggcttggacatggaagggaggatataaacgaggagttggagaaaaacgcaagcccagtttttgctagagtggaaatgaaagtgggaatgagggtcttgtttttagtcctct

SEQ ID NO: 218638 - DNA, 560 bp, Homo Sapiens
tttttttttttttttttttttttttttttttttttttacacaaaaacttttattaagtggaagttagacttacttcatggtaattaaccagttacaagtgcatttaaattcatgtgtgtggacactgtagaagtcaaaatggtcttttgaaagtccagtgttctggctctgtttgtgccagtgcaaccccaggtagaaccatccacaaagtaagtacaggtcaacaatgatatcagactagattggcaacaccatattcattgttacaagcattacagaacagaaaagtccaaggaccagaagacgattactaaagtgattctgactataagccttttcttctacttaaatgcttccagaggaccagtgtagcaaatccttaactctggggggacagagccacttctgcattttacacttaaacgggccacagaaactgtaaacatttggtggtctcttgatgcccatttcaagtagatgccagctgtccccttgggaaagtgcagtttaactggtatgaacatttaacattgtacatcttcgatctgaaaatttccttc

SEQ ID NO: 218639 - DNA, 560 bp, Homo Sapiens
ttttttttttttttttttttttttttttttccaactacaatacaaatgtttatttaaataaagaagaaagctattgtacaaatatcactcttcaggtttagcttacagagccatggctatggattcttagctctgtaaggaagtgcttctataaattcttaggtttagagatgataccatctgggtacctttgcttgaaccgtgcaaccacatctgggtctagtaggtggatcccatccagttggtttccaagggtgatccagttgggttgcacattgtgtggtcgtccaaataactcaatcttgcgagtgccaggagatagtctttcaatcatgccatagatttcatctggtttatgactggtggaacgaacctcagctacgatcacatcacaatccagaccctggttgaagccttggggatttcctttgacaccaaccaagcagtgttccttcccatggttcaaccagtgacctgtacggcctgtccgaatgatgcgttgcagttgatttgtcttcacccaaataatttcatctacccgttcatacccccagaggttt

SEQ ID NO: 218640 - DNA, 577 bp, Homo Sapiens; identical to SEQ ID NO: 41539

SEQ ID NO: 218641 - DNA, 549 bp, Homo Sapiens
ttaagtcaaaggtttaatcatgatccaagagcccagagagactttaggacaataataggaataaagcaaggcccacaggctccagctcctgatgcccagatgttcggcaggatccggggacagggcagtgcaggcagtagttttccatcctccactcagaggaggagacgagggggcaggagccttcttcacaaaggagaatgactttctaggctgcctcagaacacccagtcctccctaccctaaccctaatctggaatgcaatagagaatggctaacttattagattctggtgatcctggtagtcaagaggaagggctcagaaaggggcttggtggagctggtcaccaccagatgacatggctaaattgtggccaccaaggaggggcagcatgaatcagaagtggagatggggtggagggaatgaggactggaccagtaaggatctggaggtcataacccttagcttctcctgtgccctcatctgcgcactgcacctccttcctgctgctgtcctttcctcaccccttgtgggctgcaagtccacct

SEQ ID NO: 218642 - DNA, 550 bp, Homo Sapiens
aaatactcaatggtcatttattatataacttaaactcattcaatacattaaataactgttttaaataattacaattttttaaaattaaagaatatgtcactgatcttaacgagacttccaaatcgtctcagcaggggctccagacttccccagcaggcggcaggtttcctgtcatgctttcgccttccttctcatatacaccagtgctagagttcatcatgtgtcaaaattgtatcttgcttcttgttttcaagatgatctaatagttgtcttatctcagcatcatactccacccattctgggacaattctggcagcagcttttagtttggattcttttgttttgggattattgcacagatcaattgttttggctctttgtttggattcatcatcacaccaggtttcacaccacagccagtcttgaggaagagacttaatggcgacttggtaaatcatattattggggagatcctgatctaggtttgaaagactgtttggatcttgactgagagcttgatactggctcctgagcctgtcacctgctccaa

SEQ ID NO: 218643 - DNA, 551 bp, Homo Sapiens
tttgtttttttttttcttttttgataagtatccatttattaacactggtaacattttcagggcacacagaacatgcattctttggtagcaaaattttaaaatcacagatatatttcttttatatattatgaatatatttctagtaaggaatatataactagtcttcagaaactgaagatggaaacatagctaagcctcaacttccggtcaagcagaaagtaatgaaaagtgccgaaaatgccacagtcacatgggccactgctccttaaatgccacaatcacgcgggccactgctcctttcattctctacagacaacctgagtctcacactgtcatagcaccaagaagaaaacagttactttcacttttcttatagcaacatagggatttgtgtacataaaacatgttggacaggttctccttcaatcatggtttgtatgtcaacagttggtttcataaaacagagaaaggtggaaagaagatagaagatggtctctttacaaaagaaaggtgaatacatttcgatgcaccaggttgtttaggctaagtca

SEQ ID NO: 218644 - DNA, 552 bp, Homo Sapiens
ttttcattttgcaaatttaatgtaactctgataccaaaatatgacagcacacagaaagcaaacaataaagcaggaacagcaaacagatttttccatcacatgacaccctcagctgattggccataactgccttgactgctgtgtggacaaagattccaaggatgtactttggctccatgggaaggactactgcaatttattagcggtatctgtaaacatggggaataaatctgaaacctcactagccatacgagaagccacaggcaccaagactggcggctccactgccaaagccagcactggtgctcggtccaccaccaaagccagcaccagtgtttggtccaccgccgaagccagctcctgtgctcggtccaccgctgaagccactggtgcttggtccactgcagaagccaacaccagtgcttggtccaccgctgaagccaacaatagaactgggtccactactgaagcccgtgctggtgctgggttcgccagtaaagccagtgctggtgttggaaccactcagccctggcttcagcctcagccacagcc

SEQ ID NO: 218645 - DNA, 545 bp, Homo Sapiens
gtgttcaaatccactttatttaaattatttggtaattttagcagtacaaaatctttgactatgaccatgggacacagacatgagtttatgttttggtttgttgtggtctggggatcatgtacttttctaaatcctctgcacttcctttcattaacaaatggcagagtgccgtaagttcctctattattcatagaaaagaaatttgtaaggtaagactgaaaaaataaaatctacagattcacaaaattatcttccaatattaagaacatacaaagtatactaaagacatctacatttagtcctccaggtaacaaagcaaacatttgacgtttgacgtttctgtttttacttcttgctaattacagttcagagaccaaagtatttccaaaagctatgaaaaccctcactgacgctcctagtatggatttaatggaattagaggatagaactatgagagcacttgaaaacttgcctttaaaaatcacaagactttcttttcctcagtgggacttttcttctgcagtagctgagggcactatttgctt

SEQ ID NO: 218646 - DNA, 542 bp, Homo Sapiens
tttttttttttttttttcctggtccacagaagatgtttatttgatgtaacaaaacaatacagttagtgttagatccaaccacaaagagcaaaaggaatgaaaaatttgtacaatgtacatagaaaaaacaagatatttactgtgacaactatatattcctaaaataatgcttctaaaattactcaattattgaaatctacatgaaaaaaaggatgttaatagcgacaaagtgcataaaatcaaacattgtattttgagcaaattaacatactaggcaattttgctaagaatgcatgattttttttttcttgtttacagtctgctcaaaatatctttataccaacagggtaggcagaacatttaggtttaatatcagttacacaatattagcataaacttccacaactacatagggtattgttttcttttgagctggcaaagtgactatagaaacatcagatgatttctctgaattgagaattttatccaaataaatgccacataccttctagatatatgcatatctttctatattatgtaaa

SEQ ID NO: 218647 - DNA, 545 bp, Homo Sapiens
ttttttttttttttttttttacgtattttatcattttattaggaataattccaaatgggttatgaagaaaatgtattcatcgaatttgatgagttttccaaaaactcttaatgaagatatgtctgcccaataaacaaaacatcagcagaactatcatatactgagcaaaaaatcaggctgataacaaaagcaacatgcaacataaaaaagacacaatataaaggaagacaatctgctgagtattaaaaaccatctaaatatcaattctttgcaaccagcacagaactaattggctatcaaatccaaaccccaccaaggttaagtttggctgatgtaggccaggagtcaatgtagggggaaaaatttcctcagtgcaagagagctgagtagtgttttggatctttctctggctggtacaagcagtattagaaaatctttttggcaagggagagaaataaatacaaatggaatgctacatttttaaattagcaaactgtctcaggaatgataaaggtatcagtaaagtagcaaggggataactttaa

SEQ ID NO: 218648 - DNA, 554 bp, Homo Sapiens
ttttttaagtcctgttgatgttaagtcctgttgagagcaccaggtaaacactctgcaccccttctcttagtagtaataggtttttcactccttggcctcagctgtcctcacaggacagtgggggcagatcagagaacacatcagaaatacatacaaagaaatcgtacaaactggacaggttcccctccccctgccacaactggcatcccaacagagggaacaagtactaaatcatttttgacgacgtaaataagactgaaaacaggttaaacagttgctgaacttaagggcatgacaaaaaggactcctctctctgacccaggtaggcaaaatgctttgggtgtgaggtaaaaaaaatgggtaagagcagctgtacagagtggggtgaaatgttaaacagggtgcagtgcccaagggctaagaaccaggtccagcgcaagcctgagaccacaggaggcactcacagctcacaaaggcgtctcgcctgattggccagggcaggacctgccgcctcttctcggtgcacagacagtcatgccaaccctgggcagggt

SEQ ID NO: 218649 - DNA, 551 bp, Homo Sapiens
tttttttttttttttttttttttttttttttttttttttttttttttttttttttagccttgacaaaccaaggttttatttccagcaacattcagctgatacaaacacatagaaatacaatctcaccaaagagctaagaagccctccaacacacgcccaatttcagcatacagctaagactacacaacacacacacaagctcaacaaagagctaagaccactacacacatctccacagcaccacaggcacatctcaaaagggtctgtccagtagttccagccaagggaagggtgatggcctaagccaccagctccagctttcttttctttcttttttttttttgagctggagttttgctcttgttgccaggctcctgagcagctgggactacaggcatgcaccaccatgcccggctaactttgcatttttagtagggtttctccatgttggtcaggccgatcccgaactcctgacctcaggtgatccgcctgcctcagcctctgggattataggcgtgagccactgcgcccagcctccagttttcttttct

SEQ ID NO: 218650 - DNA, 555 bp, Homo Sapiens
tttttttttgagttatttacatttttaatgtaattttaaaatcctggatcccaagaagtcttggcttgaatttgcttttcttcataacaaacaattctgtctcccacttgaaattccatattgtcttcatctaaactgagaccacaatccattcccgttttgacaattgaaatgtcatctttatggtgtttcaatgaggttaatgagcccttccaaattacatgtccattacgggttagtttaaattttttttgtttttctaactgtcccttttggactctgcagccagccacaggaacttttttcttcccttctgttacagagaaggtagctagtatagatgcctcacctactgggtgctcttccacagcacagggtaatctgctgctcagttcctcttgcaaatcttcaacaagacggtaaattattttgtgaagtttaatttttactcctttttttgcagctgactgttggataacattgcctgcattcacattaaagccatatataacaccatcaaatgtttcagcaaggttaacatcatttgcacttaca

SEQ ID NO: 218651 - DNA, 545 bp, Homo Sapiens
tttttttagccagcaacttttttttaatgttacatatactattctcaaggcacatctgatgatatattttataacacagtaggtgtcaaagtatgtttaacatatgatttcttcaggatccctcccctttttgaattccaaatggaggaactgaaagtgcgatgtaaagactggcgatccatattctatctttggcaagcttgtacaagcactattgtaaatgtaatgtaaaagaactgtaaactaggaacttcttcagtttatgaaacaccattcaggactgctgcttcttgagtgttttcttcttttaaggtattaatcttttcttctcctggagtacgctgtagcttagaaatgtcatcgccagaagcactagttgggccgtttattgccttttctgaaggaccatgctcttcaatcacatcttttgccatttctttcttgtttttagccaaagtttcccttgggaggtttctttgtctgctctgagactcagctctagaaatataatctgcaactgtgactagcccattttcattaactga

SEQ ID NO: 218652 - DNA, 557 bp, Homo Sapiens
ttttttttttttttttttttttctttgaagtggcatctgagccatttttattgtgagctctgtctccctggcaggttaatccacaccagtgtgtccatctcaaacccggagtccccagagtcaaggggccgctgatacgtacgtctccccgtgcaatgcctcacttccaaaggagaagccaggccaggactgggcccctttctacttcgtttctgtccttttctgggctttccctcagaggcagaaactgggcataatattcgtgagtggggatgtcagatcaggggtagagggccagagagatggagaagggaaggaaaaatgatgacgagcagatcccaggagggacacaagcagctgggggtggagatggccagtggcggtgtctggggaaactcggggacttccctggcccccgctgcccccagtgcctctgctgcagcccatccagtgtcaatgtttgaggatcacatagtccacattttcttgtgcctgaggccgctccccgaccccaaactggatcagctctgagtaatgaatcccctcatcttctggaa

SEQ ID NO: 218653 - DNA, 543 bp, Homo Sapiens
ttttttttttttttttatgttgacccacttccatttaatgaatagtaaatatattttctctttcttatgattttctaaataacattttctctagcttactttattgtaggaatatagtgtataatacatataacacgcaaaatatgtgttaatttactgtttatgttatcagtaaggtttatggtcaatagtaggctattaggtagttaagattttgcggacccacgaattgtcagctcccctaacccccatgttcaagggtcagctgtagatgtaatagatgggccaacaagttcatttcaaaatataatctaataattagttaatatttggagagagaattcatatatttttaaaaaatacttgagataatatatttttctgtcactggaaatcttttattttccttgcctgcattggatgttaggctggaatggaagacaacctgcaaaatcattctgaagtcttaaggtttcatgattccaaagatatagtatggtaagctaggtaactctagctcagataattcactacagtgcctta

SEQ ID NO: 218654 - DNA, 552 bp, Homo Sapiens
catatgctgctttatttctgtaaggatacactgaaacgttagatgataatagctaatgacagaatgtagaaatgaggcatcagcttctctaaccactcctacaagaatgttagtatgtattgtcattacatgtttacttttgatattgtctcattatactatgtcatataataatgtagaatacagtaagtaggtgatcctgcatttcaggtaagcggtaggtggaaatccagatttcctcttgaggaaaagtcctaggaatcacaacagaagggactttgcagtcctcattaacacatggacaaagagcagacaactactacgttacaagggattcaactagtcactgttgtgaaatgtcatatccatgttgatgacagccctggcgcctgctcaactccccctctagagttttgcggttacttctgtaggatgaatttcagcactgcaggaacatctgagggggctaaaatattttcatgcaagtttccaaacccataaactattttgctatcaattaaaacaaaaatattaattaaaaacaataaaaag

SEQ ID NO: 218655 - DNA, 550 bp, Homo Sapiens
ttttttttttttccattttaaattattttattgtatattaaaaaaccaaataaagcaataactttaaagacctcagacacacacagtataaacacctgggtaaggttttgttcgtgtccatgttgacaccggaactaccgttaaagtgcaagttttgttttgtgttcctttgtgcagtttcactcacatgtaaacaagtcacttggctatgatttgacccacgcccccccgcttagtttcgggagggcagaggctctaccggctgtcacagcaacccggaatcacagacaagataatgccccgtgggtcctgaccctcaagcgggcatgacggtttcttgaagcctagcagaggctggataacttcacatccctcccccaccccgcgctcactcttaggtctttgagaagataaatccaccctcggctgggccctcgctcccaaagttatgggggtggcgggcctcaatgggggaccgggggtggggaatagtcccagtcttggcccgttctctttccttccggagcagatgaccgtcccttctcggttc

SEQ ID NO: 218656 - DNA, 545 bp, Homo Sapiens
tttatatataatatatatatatacttttattattcacccgttaactccattatatgccaatcacgagctagttttcagcagttacattcccttgatcacggctgcatgaggatgtaattaactggaaaacacggagaccagagacacgaccggaggtgacgtcacgcagcccacgccatcgcaatacaattgtcaagttcgctggcggtttggtaaagccggttcagttctgctccctttgccagggattctcacgtgtgtgaaaattggaccaacagtggtggggttccatttcctggttcgaattttcagtggctttatccagaatcgcactggtgactggttattgtagcaccagtccaaccttctctgcccccatgctggggcatttccaattgtaaaggtaatactgcaggttgccgtcccctatgccaaacttgagcttctccaggaaggttttgttctccatgagatccagtgcattgaacacatcaaaccctttcattttggcgaggacaagggcgtcgctcatgaggtctagaaga

SEQ ID NO: 218657 - DNA, 562 bp, Homo Sapiens
tttttttttttttttttaagtaacaggcattttattgggtggcatctgagcaaatcccattgccacctcacagtgtagaaccagtagaactaagaatactccagcctgtgcccccacccagccacctgccccggcccctcatgggaaatgacacatatcctggaaggacacagaacccacacccagcccagctggcaccagcacccacccccatccatgggccagtggcacttggggaatggtcacaccagctccgggtggggtcccatgcaggcatcctggaggaagacccaacactttcacagtcccctaagaaccatccttgaaagtcatgctttacagatctctgaccactcagaatccaagcaggaggcatctgtgggaggaatcgtggtcacagattggctgcgtcaaaaaaagaatgggccagtgagggactggtccacacagagccactcccaggcagaggaggattctacaggcaacgtcctcggcccatgctgacgaacccaaggccaggcctctgggggctgggagaaaggagggccaatgtctgccttgg

SEQ ID NO: 218658 - DNA, 557 bp, Homo Sapiens
gagacagggtcctcactctgctgcccaggctggagtgccgtgctgcaatcataactcactgcaacctcaaactcctgggctcaagcgatcctcctacctcagcttccccagtagctaggactacaggcgaaagccaccatgcccagccacaggtacgtctctttaatggttagcaacgtcttctgacaaagtttttcttgaaattatcattctgactctaaagcagttcctcttcctttctccctatctctgcaacagaattcactaatttattaatatataacattctggatactggactggtggaaaggcaaatcaaagatttttacttttactccaaaagagtagctatattcttctgtaaaattggaactgtgtgaaataagtaggccactggatagactggaattctgagatatctcttatagaggtttgtgttatggcagaatttgacattatccttcctcgatccctgccttttaagatctatagcccacagtttatgaggaatcctaagaaataagcagtccctacttttatacatacaatatatttct

SEQ ID NO: 218659 - DNA, 552 bp, Homo Sapiens
ttttttttttaaccaacaagttatattattttttattcatgttagaatttctatcagtgtttgaacattaattatttagagagtttgtacattttcaccttccaaggtttgaaatgagaagcatgctaggtcgccaatggtaactaataaacacttcataatcgcatgaatatccactctgctctgactctcttaacactgttaaacattttctttccttgctgtaatttacaatgaaaactgtgcccactcatgtctcagcaaagttccagacattatggattcatcacatataaattctttaaaaatatacttctgtcaaaagacttgatgactactatgtacactacaaaaataaatcttcatataaataaattatatggcatacttttatctttgtaattgaaatgacacaaactcatttccaccaaaattggcaatgagacccagtttgaatatttatttcctttaaactccttaccctaaaacctaccatgagtccttaatgtaaatgttatatactctgaactatttaacattagtaagcactct

SEQ ID NO: 218660 - DNA, 600 bp, Homo Sapiens
  misc_feature (2)..(3): n is a, c, g, or t
  misc_feature (7)..(11): n is a, c, g, or t
  misc_feature (593)..(593): n is a, c, g, or t
gnntggnnnnnttgtggcctttttttttttttttaaggaactggcaatacagctattgcagagctaggatttaaacccaggcaggttggcttcagttatcttcatggtacacataatagctagacgaggtggaagcagggataccagtaagaaagttattgatagtggcttggattagactgatagcagtgagtttccctaacgggttcattttccccagtcatgggatttttatgaataggatgattaataagaaagtataacaataaaggggagttaacatttgccagttcaacagactgagtaaagctacacgatttagctttactaaataaacgcccatgcgttttattttgactgcatgcttcaagaagctttcactttcaaattactcattacaaaaaagaagaccttaagttgggttggctttccaacgtgttaaatactcaaatgcaggtgatttggttctattagcactaagaacaaaaaactcagtctttgacccgagagaattctgacaaatgccaacttattaactcactgggaaactttctcttcacagctgtgaatttctacaaaggaaaatatgcctncattatg

SEQ ID NO: 218661 - DNA, 600 bp, Homo Sapiens
  misc_feature (3)..(4): n is a, c, g, or t
  misc_feature (6)..(6): n is a, c, g, or t
  misc_feature (8)..(12): n is a, c, g, or t
  misc_feature (25)..(25): n is a, c, g, or t
tgnntngnnnnnttgtggccctttnttgattcctaatgcagaatggtctagacagtaatttacaaaaactacttagctcaaaagactgtggaagtgttcatcagcaagcaagctgtccttccaaacccaaacatgccacagatggcacccagaaacagacagtctgccttcaatgtgctaagcattctaatgccgtccgcggctgagtcacctcgcccaccccccaacccccaacacacagtcgtgtctgctgaggacacacgggtgaatcaaacagggctttgctgggagagtgtgtgtctgtgatttggttcccgccacaccaagtcttcctgcttctgacaaactccgcacgtgttcccaggcagctgggagccaaactgcctctggtgcaagtcagtacaagaggcggcacctgcatccccaccccacctccaccccaagaccccagctctgccctccctctcagctctggaaagcgcagccctgaggggtgctgctgtgcttaccctcaggcgggccccaccctgcactctccgctcagcctcatggggctggtgcaggtccaccaggctctgccaagtgaaggcaccttcctct

SEQ ID NO: 218662 - DNA, 600 bp, Homo Sapiens
  misc_feature (2)..(3): n is a, c, g, or t
  misc_feature (6)..(12): n is a, c, g, or t
  misc_feature (509)..(509): n is a, c, g, or t
  misc_feature (550)..(550): n is a, c, g, or t
  misc_feature (586)..(586): n is a, c, g, or t
  misc_feature (597)..(597): n is a, c, g, or t
gnntgnnnnnnnttgtggccttttttttttttgagatggagtctcgctgtgttgcccaggctggaaggcagtggcaccatcttagctcactgcaacctccacctcccgggttcaagcaattctcctgcctcagactcctaagtacctgggattacaggtgtctgccaccatgcctggctgatttttgtatttttagtagagacaagatttcaccatactggccatgctggtcttgaactcctactcctgaccaagtgatccgcctgcctgggcagagtgctgggatttcaggcatgagccaccacacctggcctgtagtaggctcttaacagatgtttgatgaataaagctggatggtgccctgactggagatgaagaactctattaaactaaggaagcagtccactgtaagatgacacactaggccacattcaggacaaatacaagttacatacattatgccctgaagaaggtatttctggaaagtataccattcatagagctggatnaatgcaaacaggctgaatttcacaagaatttacttatattntcttttctttatttaaaaatgcttactttggggaangaattaattcngat

SEQ ID NO: 218663 - DNA, 716 bp, Homo Sapiens
tggccctctctggatcgtcaaggtgaaccagcaactctcggtactggtactggacactgctctgatagtaggattttgcgttggcacccttgacacactgcagccaggtgaccaaggtggaggcggctgccatcctcacatcgttggacacgtcatctaggcgttttaagagttcaggataaatcttgatgagtttctctggatccgtcatgccgcccgaggtttttaagaacgtgttgataatacggcatgagatcagtcgcgtcatcttcgaatcctcctccagggtggtcaggacctggggcatcagtgtttcctgcacgtcccgtatctgctctgccgacaggacctcgctgctggtgagcgcccagaggcaggacacggcagccgtgcggatggccgcggctgtcctccccgcatgccactgcagattgggggccaggatgtcctttgtcaccgtctcgaggtagctgggaaactgcccctgggagttgatggtgtccgtggctctgagcagcacggtggacaggatggagaacagattcaggcgcatctgcgggtcttgggagggctgcagacaggccctcagcgtgggcacgacgtgtggcagggcttctcccagggcagggcctgactgtgcgacgatgacactgaactgcaggagctccggcgagtgtgcggtccagtcaaggtgcgacgcggtcacccgctccagg

SEQ ID NO: 218664 - DNA, 500 bp, Homo Sapiens
gaagccgatgaagcggagttgcagcgcctggtggccgccgagcagcagaaggcgcagtttactgcacaggccacgtgcccgtagaaaagatactcatccactgtgggttttggtttcgccgtcaccccactgcctcactggattgtgaggatcatatgcgacaatgtatttgaaaacgactagaacattatcggaggaaggtggactctgaagtagtcgctgtagactatggatgtagaacaagggtttggagcccttcggacatggttctaacgcggcctgacttcttgctggctacatgaccttggactacataatcacgcctcttaaatgggaggtgatgacagctatccttgaggaccttagagagaactgatttcttagtacccagcctcacaaatagtgcatcacttcatggagttatgttgggataaatgtgtggagaagccagggaatcgcctagactctcgcactgaaaattgtctctccagctgtgtaga

SEQ ID NO: 218665 - DNA, 515 bp, Homo Sapiens
tttttttcaaggtgatctcaggaacctgaggatggtgggggatgcaggtaaaggaaaattgttactggagggtcctggggagtcattgctacaaaagaggccaaacaagaaagactctatatatgaaaatgacttcctccagccctgtaccactgagctctgagcttcccagccttcattaagtgaaaagaagctctggaagtactcccacctcccaaataagggatccagccctcaagcatgttaatcagtgactccaaatgtttccatcactttgccctcgctgatggactatttgggatgcttcatcgaccaggcagcagagatgctaatctttgtggttatgaccaaaaactgtagaaccatatccccaggccctccccactcagcaatctctggaagatccttctctgaccccttagaattcagaagtctttttcttttttatttttcttattttagaaaattgatttcaccaggtcccaggtcagccacaccggggggggggggggggg

SEQ ID NO: 218666 - DNA, 457 bp, Homo Sapiens
  misc_feature (415)..(415): n is a, c, g, or t
caggggcaaatcactgtcaatgttcagcttcagtgctgggtgcaggaacactggcatgaaccaaggagtacaatgaatcaaattctgggcccctgtggcccaaaagtaaatcaattaaattggaggggcaactatttctccatgtggagttataagtgatatctattttcatctttaaagttttctacattaccaaaatagtacctaataatcacgttagttttacaatcagaaaacggtggcagcaagcaatgacattaaactgaacatttttattccaattattcaagtttttgctgcacagtattttcaaatgttttattttcaaaatgactattacaaaaaatgtagtttccagaatgtcatggctacacctcaacctactccactcttgcagtgggggcaacagctttangagcagggaccgtgtgtggggctgcacccttgcagtgcgtgg

SEQ ID NO: 218667 - DNA, 1000 bp, Homo Sapiens
tgtaggcttcctgtttgttgtgggtttttttgtttttttttttttaacaacttagtagcttactgagttgatatacacgatccacattttagacttggaatcttcattatgaatttgctgtttcaaaatgaactagagtggtagaagacataactggtgtatatgtatgagatgattttagatggcatatagatgcccaatttttaagttatgtattatagtgtacattggaaaagatgtaattatggtatcaagcctgttatttcacggaaatatagtaaggacaaagctgagcaaaaataattgatatgaggaaaaataataagtaaacagtagtacaggttgtaggcagataaggaaagtcatgaaggtggtatgtgagagactgcagtttggggaacactaagctagagcactaatcatgtttgcatcagaggatccaaaggcagaaggggacctgtggcagtcacctgatccagatccgttatttgcaaatgacgaactggagatctgtaagattcaaactatttgcccaaagtgatacagctaatagaaccaagattggaacctctgtggcagatagaacagttgcttagtttgtattctcataaaacaagtttgaagttatcattccgggttcttccagtctttgtatgtcagagggtattaagttctaaactttttagagaggactgttatgttgtgggaaaagtccaaagaaagctagcaaacataaagtgagggatctcctttgatcctcacagccaccttttgaagtcaaatagatgttttgcagatgagaaactgaaattatactctgaaagcaatatttcatttagccctcataataaccctgtaaaataggtagggcaggcctggcacagtggctcatgcttgtaatcccagcactttgggaggctgaggcaggtggatcacctgaggtcaggggttcgagaccagcctggccaacatggtgaaaccctgtctctactaaaaatac

SEQ ID NO: 218668 - DNA, 1000 bp, Homo Sapiens
tcttcatcgcgataacgaagaaacctgaggttccattttttgggcctctgtttgatggagccatagtgagtgggaagctgctgccaagccttgtatgtgccacgtgcatcaacgccagcagggctgtgaagtgcctcatcccactctaccagagcccacgcgtccggtgatgaggaggtgtatagagggctgaccctccaggaggctgttgccacagtccaggtgtggtatgtaccaaatacctggatgtggaggaggagagacatgggtggatgcttttccacaccaataagtaaaacaactgaccaatctccaagcaaaaaaaaagtgatcatccatcagtattattttctaattgccatcaaatgtctatgaccctcagaaagcatgatggttaacaatacagactttggagtgagattggctatgtccagatcctagcttttgtatttactagttgcatgaacttgtgcagtctggccttcagtgcatatacctgtaacataagctgcatagacatgtctgttttatagggttagtgaaattatccaaatggcgattatccaaatcacgatggtgatttatggaaagacatcacaggcaaagtatacaagtttctttaaagaagttaacaagaactgaactgggtagaaatggttgtacaaagccagaagctttccacattattcctattagaggagcaaatatcccatgccattcaagtatgtcaaatgtgccctagcatttattggaccattaggtttttcttggtgtttctttatcattcttctgtgatgtcttaaacccttttggtttgttttaatatttatgtatttcttaagaggtacatgtaactggtaggcgcactgccaacacattactgaatttttctcaaggttaccataccaagtgtactatcctttagcaggccaaatattaggttttcttgaagtttattcctgcaagtttgtgcaacaatttaatgacacattttaaattt

SEQ ID NO: 218669 - DNA, 639 bp, Homo Sapiens
  misc_feature (271)..(271): n is a, c, g, or t
  misc_feature (460)..(460): n is a, c, g, or t
gcagatttttggtttctgtaactaaaattcttatgaaagagtgatgttaaaattcacttaaaaacatgaagggacaagaacagacaaggaaaatttgaagaactctctgggaacagggcttccctactagataccaagacagactaaagttacaatggttaagacaacaggatattagagaagccaatggaatagaagagcacagaacaaacctacgcaatttgattacataaaaattaaatttttaattttttaaattaaaaattaaacnacaacaaaaacaacttccatttaacaagacaggacaaatagtgtctttgggaaaagcctttgtgaacctaccttatttaaaaataaagctgcttctaaactaataacatttaggtcaagctactcaatagtagaaatgattatacagaagtagtatagcttggtggttgaaatacagatgctggcatcngacttactgggtgtgtgtcctggttctgttacctaattgttgtgtgactctgatgagcaagttattctgcttcagtttccctatttgtcaaatggagacaaatactgtggcattgtggggattaaatcaattaacaactgtaaaagtgccctggtataatgatgatgtttttgtttatc

SEQ ID NO: 218670 - DNA, 706 bp, Homo Sapiens
  misc_feature (673)..(673): n is a, c, g, or t
gctttttttttttttttttttttgagacagggtcttgctcagtcactcaggctggagtggagtggtgcaatcacaatcacagctcactgtagcctccaactcctgggctcaagtgatcttcccacctcagcctccgaagtaactgggaccacaggcatgtaccaccacacaaagccaattttttattttttgcagagatagtgtcttcctatgttgctcaggctggtcttgaactcctggccccaactgatcctcccacctcagcgtcccaatgtgcttggattacaggtgtgaaccaccatgactgaccctagatgtttatctttaatagaaaaaaaaataggttaaaaaaagtcatgcccaatattaggggaacaattaagcaagaagccctcccttactccaccaatcaccaatcagatttaataccttcctttgtgggtggttagtgcttacatcttagcatttcgactgagttgtactatacatagtcatacccaagtctgtttcccttgctggactgtaaactctctgagtataaatttgagatcctattcagatctgtattatatcccttaccatcttttgggtcttttaggcccctcctccctaccctcagcatccagcacaatatttcactaacagcaggatatgaaaaaatcttaaggtgaancactataaaaagcaattaatcaatgactttaga

SEQ ID NO: 218671 - DNA, 599 bp, Homo Sapiens
ccgctttttttttttttttttttttgaggagtctcgctctttcgcccaggccggagtgcagtggcgctatctcggctcactgcaacctccgcctcccgggttcacgcgattctcctgcctcagcctcctgagtagctgggattacaggcgcccgccaccgcgcccggctaattttttgtatttttagtagagacgcggtttcaccgtgttagccaggatggtctcgatctcctgacctcgtgatccgcctgcctcggcctcccaaagtgctgggattacaggtgtgagccaccgcgcccggccagtaacagcattttttaattcagacaccaggaaaaaaaaaaagtaaaagaggactttaaaggagagttaaaatgaggagaactgagataggtgcaatggtcattttctaccaaggaattttccttcacagttatctttagcagtagttttcaacccttttttcactatgacacatgtgagggtcattcacatacaaagcattctcatgtatatactcatttagcaacaaagtgaaaaaaattaaatggattagtaaagctccacaataattgacaatcactaccacactggtgtac

SEQ ID NO: 218672 - DNA, 637 bp, Homo Sapiens
  misc_feature (602)..(602): n is a, c, g, or t
ccgctttttttttttttttttttttaatttttgagataggatcttgctctgtcacccaggctggagtgcagtggtatgatcacagctcaccatatccttgacctccaggactcacgtgttgctcccaccttctcagcctcccaagtagctggggactcaggcgtgtgccaccacacttggcttttcttttgtttttttttcagagatgtggtttctgcaaaaccccatctcaaactggtttcaaactgccaggctcaagcaacccacccgcctcagcttctcaaagtgctgggattacaggcatgagccatcgcacccaggcaaaccctattttttatgatatgcaaaaaagtcctgtttcttactttcatatggagatggcagtttcttttccctttagatatctaacaagtaaacttcctgaaggatatttggctacagaagctcagaaagctatgagctgaatgtctggatactacttgtttcacttcatggttcaattaagaagaatagtcacaacttagaccagttatttttaatctaggaaggatgaactcttaaggaggccactaatgggcatgtaacaaagtaattcatataanaaaagtttaagtataacattctggttaggggcata

SEQ ID NO: 218673 - DNA, 594 bp, Homo Sapiens
  misc_feature (411)..(411): n is a, c, g, or t
  misc_feature (569)..(569): n is a, c, g, or t
  misc_feature (575)..(575): n is a, c, g, or t
gctttttttttttttttttttttttttgagaaagggtcttgctctgttacccaggctggagtgcagtgatcacagctcactgtaacctcaaactcctgggctccggtgatcttcctgcctcagcctcctcagtagctggcaccaggggcacatgctgctgtgcctggctgatttttttttcttgtttttgtagagaccagttctctctaagcacaaagacttatttgtgctttcaacatcaaaacttataacaggcctgtaatcccaacactttgggaggctgaggcaggtgggtcacgtggggtcaggagttcgagatcagcctgggcaacatggtgaaacccctatctccactaaacatacaaaaattagccaggcatcatggcccgcgcctgtggtcccagctactanggaggctgaggcaggtgggtcacgtggggtcaggagttcgagatcagcctgggcaacatggcgaaacccccatctctaccaaaaatacaaaaatcagccaggcatcatggcccacgcctgtggtcccagctactaaggaggctgaggtggaaggatcncttaantcctggggtcaaggttgca

SEQ ID NO: 218674 - DNA, 734 bp, Homo Sapiens
  misc_feature (643)..(643): n is a, c, g, or t
caccatgcccagctaattttttgtattttttagtagagacagagtttcactgtgttagccaggatgatctcgatctcctgaccttgtgatccggccacctcaacctcccaaagtgctgggattacaggcgtgagccaccgcgcccagcccctctcttctttttttaagaggcaaggtttcgttctgccacccaagctggagtgcagtggctcaattagagctcactgcagcctcgaactcctagactcaagaaattctcttgcctcggcctcccaagtagctgggactacaggtatgcaccaccatgcctggataactttttaattttttgtagagatggggtcttgctatgttgcccaagctggtctcaaactcctgccttcaagcgatccttgaggcctcccaaagccctgacaatataggcctgaacaactgtgcccagctatcttatgagataagatatatcctcctcaaaaggcttgcaggaattatgactttatcattaaatctgaaagagggaataacaaaatgctcctttttatagggaggaaaccaatccattgagtagaacgtcctattaaacactgagaaggataagatacacattgaagaaggatggattttttccccccttgagacggantttcgctcttgtcactcacctggagtgcaatggcgcgatctcagctcaccacaaactcctcctccctggttcaagcaattctcctgcctca

SEQ ID NO: 218675 - DNA, 691 bp, Homo Sapiens
tttttttttttttattattttataatatactacaccgtcatcaaaaataaactgtagatttccttgaggaggtaagatgtcctgtataaagaacattatttccactgggaatgttttcctaccctcagatttaaccactgtattgattttatgaatcagtaagtattatgtttctcatcttgattatagcggttctattatgattctttttttggcattggctaagtagtaaaattgtaaagaatggagtgaagttataggaggacaaaatcagtttaacaaatgatagcaaatttttaaaatgcaccaaacagatactgagtccctagtcttagtgctctgaatatgcagttttaccacgtcgtagtaatagctggtttttctttctcaagctttagaaaagcattttacatccaaaccagacaaataatagacataccagaaccacctttggtgcagagcaacaaaataaattatgttaggatgtcattccataagttttcaggaaggttatgtacctcctacatcttaatatacagaaatactttctataggttagaatagttagaatatagagtagtcccctcttacccacattgtttcagttatccacagtcaactgtggtctgaaaataggtgagtacaggacagtaacatattttgagagagaccacattcacataacttacag

SEQ ID NO: 218676 - DNA, 712 bp, Homo Sapiens; identical to SEQ ID NO: 51150

SEQ ID NO: 218677 - DNA, 724 bp, Homo Sapiens
  misc_feature (707)..(707): n is a, c, g, or t
cgtgaagcagcccacagggttacaggccaatgattcgaacgctgaggtgaacacttagtactcgcatttgagcttcaaagtaaaaataaagcagaggacaaacgcctgtcacagcgtggcagcccggttcatttgataacagaacaagtctcacacgtcggctgagcccaccggagagaagcacacaggccagcttccttctgaacacagccaggcacctgttcaaaagcctctctggtggtggcggtggaccccaaaacccacgggttggaagagcctttgggaaagcaaattgatacgctgattgcagtccttgaagaaatcacttagggttagtttaataaacgaacattaaaaaatcttccaaaaattgcattcaaatgtattttacactttaggcagttcttaagaagggagagtgcagtttcttgacacttaacatttaaaggttttattggccacattaatcttcctcacaaaagttttaagttatctataagttcttagaatgtcaaagaagagaagaaaaactgactaactttaaggggcggtggaagcagcaaaaaaacttggcaataattctgcagccgactttgcgtgttcaggcatcctttttctccagtaaaattttgtgcaactcgtctgcatcctcgctggtttttacccgaatcaacatggtgactggcatggtggcattcttctcgtcnattggtggatttggaac

SEQ ID NO: 218678 - DNA, 656 bp, Homo Sapiens
  misc_feature (607)..(607): n is a, c, g, or t
  misc_feature (616)..(616): n is a, c, g, or t
  misc_feature (619)..(619): n is a, c, g, or t
  misc_feature (633)..(633): n is a, c, g, or t
gctttttttttttttttaataggaagagagtcaggttgtgaaactagactgtgcttggaggcgatgtattaaatattctgaagcattttctaattgtcagtccttaaaatgtaagaaaatctcaagtgttaaaattgaagactgggtgtgctctctgctgaaagttcaatcaaaagcaactgtaatttcctacaaaggtaactaggtcaactcagcatttgtccctgcttactggaaacaacaaaatctcaacaatcaggccattaacttatcatgtcctatatatagtttcaaaagaaatctaaattcactcttaaagaggtactagtacaattttacacataagatgtctcctagttatttttcttagacttcaaaaggaaattaccaccatttagactacaacaatacaaccctacagcaaaagtatcttccccttcttcactagcatgtatatgcactcatctacccaacatcagggaaaaaacaaacagaacctagacacctatgtacaaagaatcacattctctccataatggcgaatcattcattcttccttgtgccaacatttctcaagaatgctatcatgcatgaagtctactcccangggttcatnacnccgctcgggatcanctctgggtcagttcctcctcctc

SEQ ID NO: 218679 - DNA, 686 bp, Homo Sapiens
  misc_feature (651)..(651): n is a, c, g, or t
  misc_feature (659)..(659): n is a, c, g, or t
  misc_feature (664)..(664): n is a, c, g, or t
  misc_feature (674)..(674): n is a, c, g, or t
  misc_feature (677)..(677): n is a, c, g, or t
gcttttttttttttttttttttttttttagagacagtgtctcactctgtctcccaggctagagtacagtgtgcaatcatagctcactgcagccttgaactcctggcctcaagcaatcctcccaccttggcttcccaatgtgctaggtttacaggcgtgaaaacattgtgttgtgtgtgtgtgtgttttttttttttttttttttagacagagtttcgctcttgttgtccaggctggagtacaatggcttgatcttggctcactgcaatctctgcctcgcaggttcaagcgattctcctgcctcagcctctggagtggctgggattacaggcgcccaccatcacgcccggccaattttttgtatttttagtagagacagggtttcaccatgttggccaggctggcctcgaactcttgacctcaggtgatccacctgccttggcctcccaatgtactgagattacaggcatgagccaccacgcccggccaaaaacatttaaaaaatgactgtccctgctcaaatactgcagtaggaaatgtaatttgacatatatcacttccagaaaaaaactttaaatctttctataaaatgaatttgatacatcatcagcatgaaatgaagttaaaatctcttacaaagtaaattcaggtntatcaacnatganatcaaaagtntcngtccagatc

SEQ ID NO: 218680 - DNA, 732 bp, Homo Sapiens; identical to SEQ ID NO: 40284
  misc_feature (543)..(543): n is a, c, g, or t
  misc_feature (564)..(564): n is a, c, g, or t
  misc_feature (567)..(567): n is a, c, g, or t
  misc_feature (605)..(605): n is a, c, g, or t
  misc_feature (618)..(618): n is a, c, g, or t
  misc_feature (671)..(671): n is a, c, g, or t
  misc_feature (685)..(685): n is a, c, g, or t
  misc_feature (698)..(698): n is a, c, g, or t
  misc_feature (716)..(716): n is a, c, g, or t

SEQ ID NO: 218681 - DNA, 695 bp, Homo Sapiens
  misc_feature (668)..(668): n is a, c, g, or t
ggtctgtgcaagaattatcctgactgtaagtgtggattaaaatagctgttaaaaattgtcatcatggctgggcacagtggctcacctgaggtcaggagttcgagaccagcctggccaacatggcgaaaccccatctttactaaaagtacaaaaattagccaggcgtggtgggggctcctataatcccagctactcaggagcctgaggcaggagaatcgcttgaacccaggaggcagaggttgcagtgagacaacatcgtgccactgcactccagcttgggtaacaagagcgagactccgactcaaggaaaaaaaaaaactgtcatttggggtgtaatctaaatagtgaaaacccaattatggcaaataaacatacaatctataaaactgatatctctacatcatgatgaaaactgaagttgaatcttaaaatttaataaaggcatcgatctagtcggaacatgtgggcagaaaaaaataatacccaaatatataaggctgtgttttaacagttggctttaaacgtatacattaatttcaactttctattttatgagaaagaacaatagggaaataaagtacagccagccctctgtgtctatgaattccaccaattgtgggttcaaatacactgggggaaaaaatgaatttctgtactgaaacattgtnccaaacttcctttgggtcattaatccc

SEQ ID NO: 218682 - DNA, 662 bp, Homo Sapiens
  misc_feature (642)..(642): n is a, c, g, or t
gaattccaccaacgatctcccagtgggcccaagcggagggtttcttccacgcttcggcccactgggagatcgttgacgctcaaatgcttgatgactccattggggtcaattatgaagagacctctgcatgatcatttatcctcatcagtgcctcaacagtaccagaactagaacagtctaacttcttcccttttaggtctttaattttccttttaataaaatatttattaagcgtaatcatatgcttaaaggtggggttttcactgttgtgcaaaaaacttatcatctcttactgatgacagatgctttaacaaaggcagtactggaccaggtcaccataaaacatgcagtatggtcacacttacaagttcacatagtgccctgaatgttacacagtatcggaaagtcactgaactagagagagcaaagactattagtgacttggcaagcattctttgagctgctgtatcacatcttggcaagaaacttataggcaaatgggaagagacagaggtgtattttatctaggttcaacaactgtttattatgaatgaattattgggtaaatggggggaaatcccacgggaaaaatcttcatagaaagaatgttacaggctctaaattctatgcaaaacagaaaancatgcccatcacttttaatc

SEQ ID NO: 218683 - DNA, 806 bp, Homo Sapiens; identical to SEQ ID NO: 53731
  misc_feature (622)..(622): n is a, c, g, or t
  misc_feature (694)..(694): n is a, c, g, or t
  misc_feature (734)..(734): n is a, c, g, or t
  misc_feature (769)..(769): n is a, c, g, or t

SEQ ID NO: 218684 - DNA, 675 bp, Homo Sapiens
ggatcaggctagtctcaaactcctggactcaagcaatcctcttgccttggtctcccaaagctgggattacaggcctgagacatagcacctcgcctgatgatattctcttaaaaaaacaaaatataaccttgcaaaggttatactgcctcttcaagaaacatttctttcaccaataaataaaagctacaaactttcccctaataaattatattacgactaatgtcacaggaatgacaatatttttgagctggaagagacctttgagagcctctaatccaatgctctcattttacagatgaaaagaggctgtaaagtataatggaaaaaaaaaaccaacctgagagtcagaaaactgaattttgggcccaactgtcttacagtgaaagcctgtgcaaattatctgcttcctcatctgtaaaatgagaggtttgtactagattgcttccaagatccggttcagctctgtaattcttagtttatggaactgaagcagagataagcaacttgcccaaggtcacacagctagttaatagcaaagtaaagactatcctcagatcccaactacaatcactttctcccctataccatactgcttctactacttcataacaatattcctgtaatttattttaagattcttgaaaattattaacaagcatgaaggagtttatgaaa

SEQ ID NO: 218685 - DNA, 700 bp, Homo Sapiens
ggaggcaggagaatcgcttgaaccctggaggcagaggttgcagtaagccgagatcgcgccacagcactccagtctgggcgacaaagcgagactccgtctcaaaaaacaaaaacaaaaacaaaaaacaaacaaaaaaccataaattcacagttcagtggcaattttaaatggaaagacacgccttattcactatgatgcttttattgctaattcattcagtgaagaggaattatgcaaggtttaaaatggcttgcctgtcctggtatatccaaaactcttaattcagaagattcatctatttctccaagagaagaagctcgtggtggggctggaggaggttcaggctcaagatcaaagtccaatttggttactgtagaatcgcttatagaagataaagtaactcaccaaaacagtaatagaaagtctgtattttaaacagctttaaaattaaagcaaacaatttactttttaagtaaacagaacactactttcaaaatactacttgggaaaaaagcaagactcagtacacctgctataatcagtacgtaagaatgtcccaataactttgtataagagatgcttaaaatctcagacacatacctagctggaggtgctagttgagggatgcgtacatcaaccactggcactgtagtaggcacaggagcttgagggctgaaggtgccagaatgatttactgtag

SEQ ID NO: 218686 - DNA, 684 bp, Homo Sapiens
gccgctttttttttttttttttttcccatgttcacctcctatggtatttttaaatcaggggttaaactatcaaaaaaattgtgaagattaaaaggatgttaagaatatacatgcagcttccccaggggaaacaggcatagacatcattaaagtcaggaaccaaccaaataaaagggaatctacaatactagtcatgaatatttgagttacaagaactgattttgagaaaaatactattttgaaataaaatttatcaaagttttttaaataaaaaaatacatagattattttcaccctcataaatacactgagggtaaacagctacatttgagttccccttccaatcagtgtcatttgtcagctattaaaaaaaaatttcaaaagaacaggaatattttatgatcgactaaatgacttacttctactaaagaaaaaagcatttaaaaaaattaatgtgcatgtagaattttacatgcaaggaaactagttctgaatacacttagaagagtcattacctttgtcaagtactccttcatgacctggatgaaatagggcatggcaaaatccatgatattgtgcctccatgcagtttctaggacgacatctggccttaaaagatcgtaacaggtaaacagacaagctccaaagcactctcttttttctcctgcaaaaaccactgccgga

SEQ ID NO: 218687 - DNA, 616 bp, Homo Sapiens
cactttttaaaagcaagccattttctcaaatatatcaaagaatataatggaaaaagtaaaaagactaagaaaaagttgagagcaagagctaggttgaagacttcaaggttccccttggtaatgagatgaagcgtagtgtttagaaatctgaagtggggactggttgaggtccttaaccagtagataagagttttatgagccagcagattgctagctatggtccatgtcatttggaagagaagaaaaagcatgaccagaaccccaaatggtatttctggtggcgcagcttcaaaggcagagccagagtatagccacattttaggaatgcctgcccattttccaagcctggttctccaggctccttgtcaagtctgtgcttttctcaacatcttttcgatcaaccctttcctctatgtgttagagtcagtttctgcttcttgcaaagaagactctgaactaatataaatatccaaagggtggtttttacttccaaatgtatttttttctgtttggtagtctcggggctcaaaaatatacactgccacacaactaagaaaacatcaatttaggtaagatggtcatatgtccttccatggggctattaataaattagccc

SEQ ID NO: 218688 - DNA, 650 bp, Homo Sapiens
ccgctttttttttttttttgacattccagaaagttttctgcctccacaatctttcaaatgccaacacaaataggaaaagcagaaccccttaaagggacagctcaggttttctctggagcaacttgaaattaacagatttgctgttccaacagcggaaaatgcccatttcaacgttggtgagtgctgtatgtttaacatacggaagcaaaacgacgagaaagccgtaacacctaaccattttctacttttaagttgtttctatgactttcaagacaacagaactcctgggatttttctttaaccattttttatcatggaaacatttccggccttttgttctctagtgacattccaactccccaagcttcaaactcctgttccccgactctatttttaaaatctcgaaattcttgcgaaaaatctaaactccattgttcatctcttcaacctgtagttttcagtttcctttacacagtcctccggtggtgcctctaagcaggaaaaaaaaacaaacaaactcctggccagtcgattttcgaaacagactttttttgtggtcttttttttctctaggcgtccacagaaacccacagctactagaaattaatacttcaggtactgctatgagaacttcttaaggaaattccaaa

SEQ ID NO: 218689 - DNA, 612 bp, Homo Sapiens; identical to SEQ ID NO: 58054

SEQ ID NO: 218690 - DNA, 653 bp, Homo Sapiens
gtcaaagatatatcagacattagtcaaatcgatgaaaaccaattttattcagtaactactgaccgtagaggaaggggctggttctgttcgcatttgtgcagaggtgatggcattctaatgggagagagaggcaggggagagggcagggggcagggcacaagtgaaacattacaaaagattggtcattttaaatgtctgcctcatcaggacagctgtgtctgccagctggcaatattagaagttaggattctaacctcccacagagactggaagacagaggctcagtccttcctgagaactacacctcaaaagtattgcctttcagatcctgggcaaagatacattgaagtccctaggagatacacacatatatcaaagggatggaggaaggattcccttcttagtaagtgctataagaaagaaagatcctgaaactgccatcatcaagtattggctagactaaagtaagttcccctggcagccttgagctttcttaggtaggcattgtcatgggagcctagggtcattcgtgagacatggtctcatgctactagaagccatgatagactctgatcatctcttagcacagaggtttaaactcagtcgttttgtgctgagtttggtggttctcactttctctctccccattccat

SEQ ID NO: 218691 - DNA, 633 bp, Homo Sapiens
cggccgcttttttttttttttttttttttttttttgtgttggagtctggctctgtcactgagtgcagtctgttaactcctgggttcaagcaatcctcctgcccccgtctccccagtagctaggactataggcatccatctccatgcccagctaaagatggggtttcactatgttgcccaggctgatcttaaactccggtctcaagagctgcatcgttgtaaacctaacaatctctctttccattcactcaacaaacataatccactgtatgtctgtgtaccatcaatgatctctatagaatggataaaatatcaggatgttctagttttattagaaacaatgtttcaaggaaccacctgtactgaggacaaatgctgaagaaaaattcatagcagaaattcaaatagaaaagttttattaaagtttagtaaaaaatactgataaactgtcctcttaacagtgtttaacactgcctctttccttacatccttttgaaaaatcttctttaatctggtaacatttttcatctttctcccttatgaattataattttaaataacacaacttatttgtaatgattctgaacagactctttaaagcttgtattatagttcttcctcagagcagttgcta

SEQ ID NO: 218692 - DNA, 654 bp, Homo Sapiens
gggatgggctgaaggcagcagttcctttcccgaggtattcaggttcttccgggtgcaggtagtgcctgtgacagccttccgccggcagctgcacggggggctgcagctcagccagggtccctgcagcagggctgcctaggaaactgcgtttggtcgcgttggagatcggtacaggaggccggctgctcttctggtgtaacactgttttcgcgtctttcagctcctgaacatccctgggctgaacaaaatctggcttgacattctcgaaccaccaaaaaagctccgcaataaaaaccataacattcggcttcaacactaatggcgcatacagcatatcttccaaggtgagataaaaacatttattaagatattcattggagaattctctcagaagccgaatattatacagactgtcggccatcgacgttacctcctttaagcatatatcatccagtttcatctgctctgggcaataatagtgaatcacagctaagagagcagcaccatcactgccgtctctcatcaaatcctccaacaacgggaagtagggtgactgcctatcagaaaggtgctctcgtcgatagcggaccttttgatgagctggactttccaataactgttgttttaatttaacttctttctctgttatctctc

SEQ ID NO: 218693 - DNA, 708 bp, Homo Sapiens
gagtttcactcttgttgcccaggctggagtgcaatggcacgatctcggctcactgcaacctccacctcccaggctcaagcaattctcctgtttcaacctcccaagtagctgggattacaggtgcccaccaccacgcctggccaatttttgtatttttaatagagacgggtttcaccatgttggccaggctggtctcaaactcctgacctcaagtgatccacccacctcggcctcccaaagtgctaggactacaggcatgagccaccacacccggcctagtatttttttttttaagagatggggtcttaccatgttaccaaggttggtctcaaactcctgagctcaagcgatccacctgcctcagcctcccaaagtgctgagattacaggcccgagccaccatgccggcccaacataacttttatatgcactgcaaaacaaaaaaatccctgtgactcactttattatgatattggctttattgtagtggtctggaacccaacccacagtatcttccaagtttgcctgtacattttagctatctattattaaacaacttagtggcttaaaactacaataattttatttatttgcttgtaattttgcaatgtgggctcaaatagcctttctttgcttcacacgcagtcacctgaggtggcttcagtgggctggagaatccacttttttaaatgggcttctttacgtggct

SEQ ID NO: 218694 - DNA, 577 bp, Homo Sapiens
aaacgttaattttaggttcaatggtacacgtgcaggttatagggtacatgtgtttgttacataggtaaacttatgtcatgggggttgtacaaattctttcatcacccaggtactaagcctagtgccccataattattctttctgatcctcttcctgaaaatcttaaaacacatagaaaatgataatttttttaacatcaaactggagtaaatacatgctgtttgcagccagagctacccaatccaaagactcctgccaccctagtccctgcctggctgccttagaaatgaaggtgttaatactgcagcacatctgtggaaaactagaatgcatgacgaggtgggaggccccgggttagactacaaacaactctaccatgcctgatctcattccatggtgaccccaaaagaagtggtcacaaatcagacgttcttaaacagacaattgtgttgacacttacatcatccccactccgagatgtcacaacagcatcaatcatttttcggggattattcacactagaaacggtaagcttcccaaagagccctcaaattgcgactgtaaaaaaaaaaaaaaa

SEQ ID NO: 218695 - DNA, 722 bp, Homo Sapiens
ggagttttgctcttattgcccaggttggagtgcaatggcgtgatctcggctcactgcaacctccacctcccgggttcaagcaattcccctgcctcagcctcctgaatagctggaattacaggcgtgtgctaccatgcccagctcattttgtatttttagtagagacggggtttctccatgttggtcaggctggtctcgaactcctgacctcagatgatccgcccgcctcagcctcccaaactgctgggattacaggcttgagccaccgcgcccggccaaacagggtatttcatatatttatacattatttattattagtcatatggtctcacacaaacctcacaataatttaatgaagtacttattatcatacccattttacagaaaggcaaactgagatacagtaatgttaaggaatgtatctaaagttccacagctcttaacttaattaatataaagtcaggtttccaactccatctcttttgaatgcctccttttttccaccacaccatgaaggtatgtgcaatttcctaaaaacagactggatttatggtttgggagttattggggaagacaatatgaagtaatggttcttcctcgtggatgcatttcactgcccatattttgctgcaaatagrtggaaaatcagcatcagaataatgtgcacaatctacagtggttccaagtgtaattttcaacgtggaattttagcatgaactttt

SEQ ID NO: 218696 - DNA, 806 bp, Homo Sapiens
  misc_feature (567)..(567): n is a, c, g, or t
cttgtccttggctggagtcaaggcagggttgactgtgaaaggttctcccataacagtgggcttgggctgaatgggcttgagttggggactgttgggcatggcttgtgccactgtggcggtcaagcctgaggaagagcctgggctcgctgctgtgaaggtggctgtctggaaggtgtagatttgctgtggggggatggcaggggcaatgggacgggctgactttaggctcttggaaggaaatctttcaagggtttaaactagagggttttttacatttttctttttccatacacttcctttctaaagaatcaaaggcatcattgcttgtttcatccatcactgagggtccatcatcagagccatcattggataaggccccaaggtctgtgtccccttccccactcaactttttcttacagaggccttttgtgctgaatttgcttgaaggagaagggctatggggctctacaagtcgaactttgggggtagctgagcgggcaggggacaaggaacctttttgtgagacaaatgcaccgttgcagctcccaagatctgcatgggagatangttcctctccgtactcactgtccccatccgcttttcgcttgctgtcatcatctgtattggcatgagccttgtgggtactaagttccatgatgtgcttgtacctctttgttgcagtttgggtggggacagtcattatggacgggggaaggggcagttctgtccaaaaacagtggtctaccttttgcccaagaaggggccagtgcctgaccccaaggattagtacgaaacgctttgctccc

SEQ ID NO: 218697 - DNA, 484 bp, Homo Sapiens
  misc_feature (347)..(347): n is a, c, g, or t
ttacatcatacaactttaatgttacaccatctacaaatctaaattacatttaaaattatcagttgacagttgtactaggatttacattaggaatcactacatgatcaaatagattgtttttctgtgttttattgccaagttatttttactgagttaactactccagtttcagactcttttaaatgtttttatgctaaagtatatgtattagtccattgttgcattgctataaaaagtgcctgagactcggtaatttataaataaaagaggtttagttggctcacagttccatgggctgtacaggaagcatggcactggtatctgatgggcttctggggacgcctcangaaacttacagccatggcagaaggcaaaaggggagtgagcactccacatggccaaagcaggagcaagagagagtgaggggtgaagtgccagatctcatgagaactcactatcatgagtgaagtaccaagaggggatg

SEQ ID NO: 218698 - DNA, 718 bp, Homo Sapiens
tttttttcagcaacgctttttatttttattttatgctttgatggtgtctagatttaagttacatatataatgacattagctcttaatactttagtttgcatatccaaataattgagaatatggtcttgcataataccattatcacagcaaaaatagcaataactccattaatataacattttggccaaataaatgaaaaaccagaaaacacagattacatttccacgtcattatagccactaataaagatttttaaagaaactgtgagaaaaacaagagctataatcatgcatgcaactacagtacaaccaagaatccacaaaagattatgcaaaaagtaccatcagcttgccaagaataaccaaaaattagacatttaaaataaattgttttattgaatgttaagtccaaagctatttcgaaagttctcgatttcccccatattcctaccagtgtcatgaacttgaaaattggggataatcggcttcagaaatttgaactcatttgtcccggaacctcctgtcagacacacctcgtattggtagctctgggacaggggtccggtggcggtcacgtccacagatgccctggaagggaccctcggcaccgaacacgacccaccgagccgcctgctcctctgccaggcgcacggcaccgacagaaccccgggagagaaaacgacgaccccaggcccatgcacacaggtaacgggggggag

SEQ ID NO: 218699 - DNA, 483 bp, Homo Sapiens
agtagagacggggtttcaccgtgttggccaggctggtcttgaactcctgacctcaggtgatccacacgccttggcctcccaaagtgctgggactgcaggcgtgagccaccgcgcccggccaacatggtcttctctttgatgaaggcccagctgctgaaataccgcccacgtttgccatgctgcacccagagtggccccgagcctccactccctcttaggaaactactgactcccaggcctgagcctctcctggcgtcttggcttcctcagaaggcctgtcaggtacagctcccacaacgccctcatcaggacctgagtctatacggcctgcgccaggtccaggacccagtggggaggccgggcctcgggaagccacacttctggcaccacacacagcagatgagtacagccattaggaccaggagcagcgtccgcagtgccagggccaagaagacagggccgccatagacaggaaagccctcg

SEQ ID NO: 218700 - DNA, 505 bp, Homo Sapiens; identical to SEQ ID NO: 50504

SEQ ID NO: 218701 - DNA, 505 bp, Homo Sapiens; identical to SEQ ID NO: 59782

SEQ ID NO: 218702 - DNA, 620 bp, Homo Sapiens
ttgcctgtttttgtttttactggaggctcaggtggcacatgacagatcataaaatggcttcagaggtagggggccgggggaaaacaaaaataaacttggggtgggggcaagaaaagcaaccaggaggaggtaagagctggctggttccttctcagcctgagttacgggagggagttgctgtctctgaacagtaaggatggctcccttccttcaacccttgataaggggagggaagaaaaaagaaaaagcaaaaggctgctgctttggtcctcctgagtctcaaggaaaaggtgaaaagctggtgttttgatgtcatgaattatgggaaagggggagcagggtactgggtagggtacaggtcatttggaaaaactggcagataccagatggcagctctgggtgtcctttgagttgagttggaatcactccaggatggtggtggtggggtccccactgttgacaggggctgaggtctcaagagctgctggccttctggggctatgggcctgctgagggccagggacctgctgccatcttccgttgaaatagggcaggttaattgcgctggggctcaggcgggatccatcaatcggacctttgttgggcttgtcttcaccatc

SEQ ID NO: 218703 - DNA, 516 bp, Homo Sapiens
taggtataccagatttctttattcttaaccatgtgtgcacatacactcagatttttttcttttggtagtgatttggctttttgttaacaacgacacaagttttatgtttaatttaaatattacaatggctaaactggttttggggaagattttccagaaatttattaaatacaaagttccttaactactgacttagagaaatgagtattgtttaaccagggaaaaagttgtcaaccaccaccagcttctcttcctacttttttttagaatataaaagataatatctcaattactttttcctctctcatcattacttacaaaaatctcaattatttaggcatatccttggcatgttcataaaattgttccataggcattctataattatagtcatattatttttaatccctactcatctcacctataattttcaaatgttttttattcaatttttatatcctgttcatatatttttcagctacagtaaaacatgatttttcgtgtgtattattatct

SEQ ID NO: 218704 - DNA, 412 bp, Homo Sapiens
tttaatgttgagcagatatgagcagatagtagctctggagtcctcaggtatccagcatgtgttgggaaatgtggatttccctgggtcaatgctcccaccatggccacttgaaggctaccagtatgattttcctgaaaacagatttaagaagagatgtcaccatcagcttcctcaaaccatgcgatcaatcctgaaaatgagtgtcctgtgttgactttgtcctgccaaatagcatgcccacccagaacctcagaatgtgggtttatttagaaatagaatctttgcagatgtaatttagttaagatgaagtcatcctggattaaggtggtctctgatccaatgactggcatccttttacaaagaataaaatttggacacagagcatctcagaaggaagatgacgtaaaggaag

SEQ ID NO: 218705 - DNA, 437 bp, Homo Sapiens; identical to SEQ ID NO: 143387

SEQ ID NO: 218706 - DNA, 446 bp, Homo Sapiens
tttccgaggtggagtctcactctgtcacctaggctggagtgcagagcgagattctggttggattgaatgatgtctgctgcatcatcagggtagatgggaatcctgtgcagctttatgcaattcgtgaacaagtaattcttcacactgttattttatgtctgtaggcttcaggaagaaatcatgaatttttcttctaaaataagtattctgttgacacagactattggtaagattttcaacataaggtgatgctaggactggcctcctagcatgagttgtgagtaaagatctggtctgttgtttctccaaaagaagtttcttactgcttgtctctcatgagttttctgtttctgctttctctttttcatattgatatatacggttttttaaatggttattgtaattaaatatctcctcatttttctcttttaggagatgatgttgca

SEQ ID NO: 218707 - DNA, 536 bp, Homo Sapiens
  misc_feature (213)..(214): n is a, c, g, or t
tcgtagagatgggggtctcactacgttaactgggctggtctcaaactcctgagctcaagcaatccttccaacttgacctcccaaagcgctaggcttacaggaatgagccaccgtgcctggccagaatcggttacatatatgtgacatatgtgtaatacatgtgtgcctgtccccaggtatcagggcagagagaacacactttcccctactatnntaccacacccttcttgctgggaggctattaaacctgaaggtctggtactatgtagtggtgagggtgagatatggattcagaccacactgggtttaagtccctgctctgtcatttatttttatgtgaccctggggcaagtgatacaccctctctgtgccttggttccctcgtttcaaaaatggaaataataagagcacctatctcccagggtaaaacagaaaaaaacaaaatcaactgtgcttgctagcatgatgtctcccaccaagaaactcaatatgccttaactattatcattaagccggctaataacagaaatccctcc

SEQ ID NO: 218708 - DNA, 477 bp, Homo Sapiens
ggtacaagaacactcacagaatttttatttataatcattcaaaattagaaacaacccaaacgtccatcaacagaagaataaacaaactgtggtacatctctacaatagaatactactcagcaatgaaaaggaacaaactgctgatacacacaacagcatggatgaattacaaaggcattatggtgagtaaaagaggccagtctcaaaagagtatatttagtaggaccaaaacttgatttggtagaaatcacatcagtggttgcttctaggagctaggggagacgaagtggaagggggtacaaggggagtttctggggtgatggaaatgttgaaacattctatgtcttgacctgggtggtggtaaaacatgtacatgattatttattatacctcgatgtaaaatattttacagctcagctttttaggaaagagcccgatgaaaaaggaaaagaaaagttaaagagctgagtatggagg

SEQ ID NO: 218709 - DNA, 462 bp, Homo Sapiens; identical to SEQ ID NO: 58078

SEQ ID NO: 218710 - DNA, 474 bp, Homo Sapiens
gtcttccctagaacaggagcttaatgtgggcaggtatttttgttgatctcatttatcaccctctccccagtgcctggaacagggtctggcacatgaatggtgtgttctaaataaatatttttaatagataaataaatgaaatatcctacaagagaaagctatatctggaactcacccatcaacagaacctaaaagccaaagaccttgagcctgtctctgcctctgaacacacccaaccccggaggagccagcagaggaaaaagaggacaaaggcggggaagggagcaggtggtgcccaccaagtaaggaaccctgaggcttaggccgaacctgagctggagaagggactcatctaggaaccgggtatgagattaaagtttagattggtctggcctggattttgtaacacctaaacaagggttattctattctatttttttgagatggagtctcactgtcccccaggctggagtg

SEQ ID NO: 218711 - DNA, 344 bp, Homo Sapiens
tttggtttcttgacaagaaaaaaaaaaaacagccctagaaggaccaatgggtcaagggctgtctgatgaatccggggctgggccagggctcaacacctgcatctctgaccagcaacccacgtgattctggggcaggtggccaattccccagactcatccaaagaaactcttgtctactccatcccttggcttccagcctgggagattcaaacccgcccagaagaaatcataaacaccggcagacgtttccacaatgtggggatggaagtgagttctacaatttgcggatgaaaggaaattttcaaatttgttgaataatgtttccaggtccaaaatatccttgg

SEQ ID NO: 218712 - DNA, 512 bp, Homo Sapiens; identical to SEQ ID NO: 62017

SEQ ID NO: 218713 - DNA, 574 bp, Homo Sapiens; identical to SEQ ID NO: 90697

SEQ ID NO: 218714 - DNA, 459 bp, Homo Sapiens
ttttttttttcctggaacagtgagtgggacacctttattcagacaaatcaaatactttgtaatggaaatcaaggtggtatattactgttttgctttgtattttgaagcatccctgggttcactgctgggattgctccaatcatcggcttcaggcgtggtcttgtaatggcgccatgcggacttattaaaaactggaagtctctcaaatgactcacttgaaagagccttcaaataaatgacagcatcagtacccactccttccatggaatacagtttcagatctccttgaaaatatctagcatacagacgggaaattggcaaaccataaccaaatccagccaaaggggcagctctggtaggctccaggctgggtctaggagcagtagaatacatgtagttaaaaagacgatctatttttcgaagtgggacaccaccacctaggtcactgatcttaatgga

SEQ ID NO: 218715 - DNA, 547 bp, Homo Sapiens
ttttttccaccagacattaattttaatgaggttactcaagatttcccctttcttcaagcattccaggaatcagatggaggaagatagggtaacatcatctttatcaaatatttgcaaacattatatagatagctggaaaagcctgtgcatggtgaatggaagagacgtcacataaaaccgaataactgagtctcataatatttaggtcttgaatgaagttaggccttgatctgcttccagccagttgatctcttaattatgtaggctgtgcaacaagtttttggttctgttttatagttttcttctctgcattcctctagatttaatatattcttgatttgttttacagatcactgcttttcctccagaataagccaatgtggataagggagaccaaaggaaattaattatataccaataagaaaagtcttacgtaaaccctgtgtgtaataaatgttcaaataagttggttgtaaggttttggtgtacaatttcaagatattttcacagaacatattgctccccagtcagggttaaagtgaaacgt

SEQ ID NO: 218716 - DNA, 630 bp, Homo Sapiens
  misc_feature (436)..(436): n is a, c, g, or t
  misc_feature (570)..(570): n is a, c, g, or t
ttttttttttttttttagcaataagggcttatcatgcctaggctggtctcgaactcctggactcatgcaatcctaatgccttggccttccagtgctgggattacaggcgtgagccactgcacccagcttgaaaatggcagttttcttgtatgctcacacagcacaaagtgaccctccctctagttccttccttttcttataaggactcgatctcatcggcgagccccaccctcacgatctcacctaagcctagtcacctcccaaaggccccacctcctaataccaccctcctgggggtcagggtttcaacatataaactttggggggggacacaaacatgcagtccttaacaccatcgtcatggaaatggaggccacagacctaccaacacccataacctcaagggcactggtggggacagaggggtcttacccancactgccatgtggcagaagttctccaacattatgtctctgtagaggcctccaggcagcacttaagaattgccaactcctctggtgaggtcactaccacatcctcaagggccacagtctcctgctgctggctccngaacacgggacgcaacgcccgcagctgccccactttctgcgcactgaagcatggctggcg

SEQ ID NO: 218717 - DNA, 500 bp, Homo Sapiens
taatagtttattattttattgttttttgtttatacatgttaagtttcaactttcaataataaaattcaataaatttgattccttaatcataaaaacttgctttacacattagttacatgttgtcaaagtccatacaaaacatcacaaggatttgattgactctatgcatggtaccatcacacagaaggaggagggagctaatccagtaacaaacattcaaagattaaattgtagatatgcacagtgtatttggcactgttgattaatattataacaccttcctctcaaagacaggcattcttaagcgttagtcacaatataccagaatttgctattcatattaaaaccaccttttaaactttataacagtaaccaattattatagttttaagaaacaaaacgcaatgagaactgggaatggaattcaaatcctccaacttcttgctatgctccaagctgccatccataaaacaggtttaatttggtaatttttccattgt

SEQ ID NO: 218718 - DNA, 305 bp, Homo Sapiens
  misc_feature (281)..(281): n is a, c, g, or t
tgtcccttcacttttattttttaaatgttttaaacatgaaatatttcaggcatacaaaaaaagtatagatgatgatgtaacaaagacctgtgtatccaccagccagcttcaaaaataaaacataacagatacaattgaaaccccctttatttgttttatttctcccagcccttgacccatcagccacctttatttataacccaagaaccacacccccttccacagccctctaatgcactactccctcggccccacctttcttgtacgcccccagcagggtntgtggtgcagaaccgctttttgtt

SEQ ID NO: 218719 - DNA, 554 bp, Homo Sapiens
tttttacatcaatattgcaaatttaatacaaaccacagtacaaaaaaatttgaaagcttcctaaaggcactgagaaagcagtagagaaagttgcatttatagtgcataagttttaaaaattcaacaagttggtctaggtattgaaaacttttttcttccagtagaaactgcaaaaatataagttgtattgatctcctcccttccatcccattcccaccttatatttgactttaatactttttcagctatatagggaaaagctacatacacagaaaaacatgaacctgtaattagtgctaacaatgacattttagagagaagtgatacatccacactttctatgttccatagtcttccccactgttttccaagagggttgtggctataaaataaccaaagtgctgacttggggagtttttgttgccgttgaggaagggatgtcggacacctcgctgatcccaggctctcagggccgcagcctcctgtagggtccccacaccacaaaaccggcagagccaacacccacgtgctgagtgcagcgtcaacacagcgtg

SEQ ID NO: 218720 - DNA, 595 bp, Homo Sapiens
  misc_feature (585)..(585): n is a, c, g, or t
tctgttctaatgtatcattaagctccttaaaatactggagaacagcttccttatcgccttggatcattttctcagaatgagatttttgttctttcagcttttcaataagatgggtaagatctgtccagtgtgtgtcagtcaactgttcaagcagtttttgaggagtgtccttttctttcaaataggcactttgaaggtcatctataggatgaccatgatgttgacctatggtaaggcaatgaccacaaactaattttttatctaatagacagtaaacatttaatggttgcctgtaatgttcagggcaggtgacaatatctggatggtcttcttgctggtacttttcaataatagcccttagtgcaaaattaacaggtaaagattcaatgccagttggagcaatttcagtaatacttctgcaattagggcacttgagtggaattcgtaaaggtctccatatataaaagttaccagatgcctgaagaatgttttccaaacaatttctacaaaatgtatgagagcatggcagtacacgaggatcttcaaaaatactataacatatgggacaagttaactcttgctcanaattgtgcat

SEQ ID NO: 218721 - DNA, 474 bp, Homo Sapiens; identical to SEQ ID NO: 61432

SEQ ID NO: 218722 - DNA, 663 bp, Homo Sapiens
tttgcatcctaaatattttaatagtaaagaataaagaatgaccctcaataatgcattcctagcattcaaaggctaactttacaaatttgaaaacttagtaaaaacagttttcatgaatacaagaaaaagtaacaacaatatataatcatctaattatctgaatacaatgacaggtttccagacaatatgtagttaacatttaggctaaaaatataaagaaacacaaatcattcatgcaagtattttttaagtctcaacttccagataaaatttggctctggcaaataagaacaaaatattaactataagtttcacgttattaggctccttaactacactgattctctgaaattaaacaaataacttttcagcttcttttagttttttttttctatccattttagcaattacagcccaacggtcctcccgcatttttcttatagctccaaacttcagtgtagatccaggggttgttagagatgaaggggccttttttggtgttttgacacaaagatgagaagctggtggattattgttcctatacagtgttttcaatgtctcttcttctgaaaccatgctcaaaagatcagtagtttctgaactatctgaattaatatcaaatttcaaaggccatttttctcttttttttactttcttcaatgg

SEQ ID NO: 218723 - DNA, 558 bp, Homo Sapiens
atttttggcataagctgatttattatttatgagaactttagtataagaagcatcctgcaatcacaaaagtggaactagttgatattttgaaatcatacttgatttaaccaccttcagaaattctataaaacactagcaacttccttttatcagacttatgaggtagttacattatttttccttttattgacatgattcatcaaaaaattattttatccaagctcataaactaagtcaataaaactgcaaggaaaaatgacaaaaattctatcttatgcctgatcttagtcaaatcaaatgttgccctctgggattccaattcttcatgtcacagttaagtagtacttattatgtattttacagtgatacgacccaaaatagcagcagtgtgctctgaggtgtgccaaaagtgtgccctgtgaaatataagtattatcaaatacaatcttaaaaatcctaagagattcgtaatgctagagggtgctgtatgttcacattccgacaagaacaccatgacgcgtgttcctgacccacagtgtggtggcacaggggccactg

SEQ ID NO: 218724 - DNA, 447 bp, Homo Sapiens
ttttttttttagcatgtaatccatatttattaaactgtactaaatccaactaacacaatgaggcaaataactagataggaggagggggagacactaaagaagtgggaggtcccaagacaaagggtggtagcacaccattcatcaagaaaggcaatacagcagcaacagtaagcaactttgggaaaaggatagtaaaagttcaatatttgacaaggtgagcaatctgtaggatataaaagtagatttccagtagacatttggaaataaggacctagagtggagagaaaagtccaaatatgtggataattttaaaactctctaagatcagaagacattttgaaaatatcatgaaaaaaacctctaagaaaaaagcatgcacatagtttctttcatagaccttttgaaacccatccatggtttcctcaaggttatttatttctgatatag

SEQ ID NO: 218725 - DNA, 357 bp, Homo Sapiens
  misc_feature (263)..(263): n is a, c, g, or t
caataagttatttgctaccacaaaatctggtgtttaaagatccagtaaacatgtccatatttcattattcatcacccaaacaaaacatgacaagcctcacacaaaccactgtgattttttatttttttaaatagagacagggtctcgctctgtcaccaaggctgtagtacagctgcacaatcatagctcaccacaacctcaaactcctgggctcatgcaatcttcccgcctcagcctcctgagaagctgggactatgggactnccaggtacccacatccagctatgatttcttaaattattctggatatcgcaaaaagccacccacttatttatctcatcactgcatgatttccaat

SEQ ID NO: 218726 - DNA, 483 bp, Homo Sapiens; identical to SEQ ID NO: 61341
  misc_feature (435)..(435): n is a, c, g, or t

SEQ ID NO: 218727 - DNA, 335 bp, Homo Sapiens
tttagtggaaattcaaaacaaggaagagacctccatcccagcagctttatactatcttgtaagccttttggaatatgctgcatttcaaaagaaaactagaaaaaaatagaaagaatatatgttgatgcaaatcctctatagattttctcatagttttatattcactctagaaatgtgatcagcagtccatgaaatctctttagttagatgtttatagacagagatttgagaccaggttagtaccaaggttgtattagccccacttagttatcacaggtaagagagggaacaggaaagaagggtgggtaggaatttcacctccacggggctttgga

SEQ ID NO: 218728 - DNA, 584 bp, Homo Sapiens; identical to SEQ ID NO: 61279

SEQ ID NO: 218729 - DNA, 561 bp, Homo Sapiens
ttagtaagagatattgtttcactttatttataatagtaagaaactggaaacaaatgtctaacaataggaaactggtttaaaaaaatcatagaaccataatttattttaagccctaaaatgaaattgtgaaccattaaaaatatgttgtaaaactatttaatgtcataaagagaactaactctgtttttatggtccatctaccaatgtcttccgagcagttctctctcctcaaacctcctctacctctttactcaccctcactcagcctaaccttgcttccgattttattaaggaaatccaatcaatcagaagaggtttctacaatttactatcacatttacccaccagccatcacctctgccatatatgctcctctcctattccaatggctggaatgtctcagggaagaccaagcccttcacttgtacattagatcccagctctctgtcccatccattatggaagctgcacatcaccccagtcacacaagagggcactctgaatgaggaatcttgtaaactactccaaatcaccagtcttgaacagtcttgaacacgcatg

SEQ ID NO: 218730 - DNA, 414 bp, Homo Sapiens; identical to SEQ ID NO: 60310

SEQ ID NO: 218731 - DNA, 352 bp, Homo Sapiens
  misc_feature (99)..(99): n is a, c, g, or t
  misc_feature (135)..(135): n is a, c, g, or t
  misc_feature (270)..(270): n is a, c, g, or t
gaatatatcaaacttgatttttattagaatgcagctatttcttcacattagtaaagcaaaaagcaagagcccggttttatatacacttcatgttttgtncttttgctaacaccaagtctgctttatctgaatttnccatttcatgagtatcatcaattctccactgctgtctgcatagccaattatttttttcaggatcaaggtctcttggtttgtctgcagtatctctttccttgattttatgttatccaactgtcaggtaaatatttncttcttgtatcatctttttctttaacagcttttttgagaattaaatgttccaagtaactcttgacaagcttaagtttcttca

SEQ ID NO: 218732 - DNA, 569 bp, Homo Sapiens; identical to SEQ ID NO: 60822

SEQ ID NO: 218733 - DNA, 473 bp, Homo Sapiens; identical to SEQ ID NO: 58841

SEQ ID NO: 218734 - DNA, 436 bp, Homo Sapiens
ttttaattttgagacagggtcttgctctgttgcccaggctggcacgcagtggtactatcatagctcactgcagcctcaaacagaagtctgaggctgggcttaagcgatcctcctgcctcagcctctgaaagcactgggaccacaggcatgagccactgttcccagccagcaaaactcttaagtacatgtattagaaattctgtagcagaaactaagtattaccttatgtttaaatgtaagtaaaatgccccatgctgtggcctgacaatagtcattattctacatcattcccctcctcctcccttgctaatagaagccagcttttgcagaattatcaggcagctaactacttagaggcagggccctccccaatcccaggagagtgactcctaattggttcaagccaatcataatggtctcattccccttgccagat

SEQ ID NO: 218735 - DNA, 578 bp, Homo Sapiens
ctttctcagtacaattttgtttacgatcatgataatgctgaatgacagagtgaggaagtgggattaacaaaaaagtaaaagcttccagaccagccagagctaaagtcaaattaaggctctgctcttgccagccactccaaccttaaagaagttatgttattatcatggataaatttttacacaagattgtaaaaattaaacgttaaggataaaagcccacaacacgtgactgatattcctcaaatattaatttcactatttgtgacccctaaataaatgcatcttccaggtgttctgaacacctaggttatagctgctcagcatgtaagcccctatgataacttgagcccttttccctttccttccccagtggtgaagggagaatgacattccttctccctgcccactggctcaagtgtggcttatggcctatgcacagctacaccaatattccctgttggagctccagcttccagggacagcacagcagacactgtctgggccaggggtgccaatggcagtgcctctgccagaatctcagcagtcttggcaccctagtcccacggcaacttctcaat

SEQ ID NO: 218736 - DNA, 733 bp, Homo Sapiens
  misc_feature (100)..(100): n is a, c, g, or t
  misc_feature (527)..(527): n is a, c, g, or t
  misc_feature (534)..(534): n is a, c, g, or t
aaagaaacaaatatttccctttatttattacatctactcatgggacatacataataatcaaaattttcaatttacaggcctataaataatgctatttaanctgaaaagcagccagcaaacagcaacatatacatgtatttgaaaagcttactcatggaaagtaatttccatagcaactcagttttgtagaatggaatgataaatcaagaactatcagcatttaagaatcagaagagtactgaatttgccttactcctttgccagctgcacactggtaggctttgctccgataggtatcccgtatttgtgtaaagtgttaatcaatatctccctcatgtcattgttgtaggaatcaaagtcaaacacatttcgaactacactggagagaccttcagtcggaaatttctgtaaatgtttgactatgttgacaacttctctggtagaataaggatagttaataatcccttggtcagccaaactcctcagctctccaaaggcagccacaagcttctgaaggatgggctcangcacatntggtccatactgtctgagcatctcgagctccgagtggggtttgggttatcaactgcatggcagcttaaaatatcaacctaggtaccgaaagaaacattgcctagggaagggaatccaggtctttttgccgaacaatcatcctaaaatcagatgaatacttacactttttttcttccttcacattagcagaatttgcaac

SEQ ID NO: 218737 - DNA, 464 bp, Homo Sapiens
aagcaatgaaagcttccaacacaaatttttctatttaatgattgcttattttcctaaaaatttgcagcactgatagctcatgcacacaatttaccagctaattacaaataacatgtcaatcaagtaggagatataaaacttaaattgccataaaaataaattccagaaaaagcatgctgaattttttttttaatgcaactgttcctcacagaatttcaaacaaattcaggctgaatattatcaaattaaaatactacaagctgagagggtgcttttagtgtaaaagccagatttacaaagtaccactttaacaacattcaattttatttttctaacaaaccaagaatatatcctaagcttctgtataacaactgagaggatgttgccatttaggtaggttaaatgtagttcaactggtttgagtccaccatattacaatgttaacaggccttcttggtattaga

SEQ ID NO: 218738 - DNA, 604 bp, Homo Sapiens
aagatgaagtattgctacagtgccaaggctggccccaaactcctgggctagggggatcttcccacctatgcctcctgagttgctagggctacagacacacaccaccaggtctggcttctcaagacttttaaacaaatacttgcccagtgactaataggagatctggttaacataaagaaggaagctgcttagtaggcacagaaaaaaactggaggcaaagtctggcctgttgattcatacttgctaagatttaatgaaataatgcatgtttgtttaggtcctagactactttaaaacaacctaaaaaagatatttccctgatccagaatttgtagatacgaatagaggttaagtgttcacacaacttcaaatattcattactagggagttgcttacattttcatatttttctagttataatttctacttttagcagattctaacatttagatcttttggtatgaataggtcaaaacaagtcaccattaactgacaggaagcacagaattctcaatttagttttggcaaagacattattttataaatatgagtttttaaatgattcttatgaagaaactagcaccaaagtgaatgcactctgcaa

SEQ ID NO: 218739 - DNA, 486 bp, Homo Sapiens
tttacacatatccataattttattaccatgctaatataactttttcttgttatctataaacttataacaaatccaaaaacatagtggttaaaaacaatttattattatcattcacagggcctcatgggctcaatgaggcagttcttaattagagtgtctcaaatggtggcagtcagagggcatcttttttgcccatgtggttagcttgggcttcctcacagcatgatggtttcagagtgctcagacttttaagacagcatctggcatccttcaaagcaagtgttctaagagtcgcaggcagaagctgcaaggacttcttaggagctagcttcagaagtcacacggcatgactttagtagtattctgttttttccccttgtataatttatttcctcgctttccaaattataactgcatccagaacaaagatttcgtttcccactatttgtatatttcaaaacacgcagtgctctgaatcagtcatta

SEQ ID NO: 218740 - DNA, 571 bp, Homo Sapiens; identical to SEQ ID NO: 59961
  misc_feature (109)..(109): n is a, c, g, or t
  misc_feature (123)..(123): n is a, c, g, or t

SEQ ID NO: 218741 - DNA, 550 bp, Homo Sapiens
ttttaccaatctattttatttattatcaaaaaagggctttacaaatcatttgttctgtctcttggaaacaattttacaaatgatgagggccacaggccagctatccataaacaaactaaacttataacgtggcttaaatactaaatatgttgcaatggaaaacaaatcaagattgtcacaatactaataactaaaaaattttaaatgatgtataaaaggctctgagaaagaggctggccaacattgggaagatttgaggaggaacttccagaaattttcaaagagtctggaggttgataatgcttattatgcctaattttataccaaaacttatgttttctctttgctagaccaaggtatattctcaagattacatttgagctcaaagagaagcaaaacagatgagatactggggagacattctatgtcataaacagatagagatggaaaaatagccaaattagaaagaagaggactaaagagcaagcacgcacactggggagaaaaaagtcaaggacaaaatgaactcaaaatccttgggaagacagag

SEQ ID NO: 218742 - DNA, 471 bp, Homo Sapiens
ttttttggtggtaagattttaataacacatttaaagcaataagtatataaagcacaaaaccagtgggtggccaaacatttcctattggagggagctaaatcataaaaataatgttaaaaggaaggtatgctataaggattgtaataaaagttgtctctatttaacatggcttcttatttgggttactgttaaacagacacgaatctattttctgcctataggtgaccccacttcagctgttaactttctgtctcagtgcttaattgtgcttggtaatcaatactgtcagaggaagacggtgagtgtatgtatgaccatagaaagagaaaataaacagaagaaccagaaattatttcctcacacatagttaaagcatgggaaaattcagttatttcaccaaacacgaaagaaaccagatttctcttgcaaaatacctgcttagtgtccaattaattagtgttgagggtgaat

SEQ ID NO: 218743 - DNA, 390 bp, Homo Sapiens; identical to SEQ ID NO: 62004

SEQ ID NO: 218744 - DNA, 288 bp, Homo Sapiens
tggtagcacaaaaggagccatagacaatacataaagaaatgggagtgactgtgtttcaacaaaactttatttacaaaaacaggcagcaggctagatttggttcacaggctgtagcttgccaaccactagtctaatataaccttttagtacagttttccagcagttcacacacccccaaagacatcaacaaaaaacagattaagaccccctgatttagtagaagaaactcatgccaacatacagttacagtgatataacaggtgctataaatagaaacatttcaaaagt

SEQ ID NO: 218745 - DNA, 327 bp, Homo Sapiens
cctagtatgcacccctgggccaagcacagatgcattaaaaatttgccaagagaaacaatgaagtcactgataatacaaagcatgagagtatcatgaaattcatgtctttgttttcttcctctagatacttaattatttctcattactgatcattttgtggttattggcagaggggcaaggaaactccaccactgtaaacatgtagagacacatgctcctcagtagaccagaagtctgcatatgatgggtctgttcacaaatccaatgtgaacaccacttcattaatcagtgagaatgttgatgctactatccccagcctccaaagag

SEQ ID NO: 218746 - DNA, 277 bp, Homo Sapiens
ttaagtatcaaagttaagtttaataaagtaagttccttccattttgtaatgtataaaataataccatttaaacaggcagaaactagctaatctgcatttatagagcatagttttttgggtgggaaaaaagcattctttcatcatttcacctttactagaagaaacagacttatgatggttcttactattatttttcaactttagaattattcattcagtagaagctgtatttcaagtacccaaccattctgtttttcactttcaatgtaatcttcaa

SEQ ID NO: 218747 - DNA, 503 bp, Homo Sapiens; identical to SEQ ID NO: 60438
  misc_feature (381)..(381): n is a, c, g, or t
  misc_feature (389)..(389): n is a, c, g, or t
  misc_feature (464)..(464): n is a, c, g, or t

SEQ ID NO: 218748 - DNA, 398 bp, Homo Sapiens
  misc_feature (10)..(11): n is a, c, g, or t
  misc_feature (18)..(18): n is a, c, g, or t
aatgggaatnntacaagnaaaaatattaacaaaaataaaagaaaatgctctataatggatattctactcagcacacaggatcgcatgagactgtctttgcttttatttaacaagaggcgaaatgagtatatgctgtaattctgcacctgttctatgtatcttgcctgcggggagatactctctataaaactatgcactccatagctcctgtgatgaacagcattcaaattctgcctgttatgaggtgtaattcaataagcaccttttgctgagcagctctttgcagggatacgtgaagggctgagctaaggaataaaagcccttttggcaatctggatacttcgccttctcttccactcagttctcaggtcgatctcaccatcaggataccctgccaa

SEQ ID NO: 218749 - DNA, 693 bp, Homo Sapiens
  misc_feature (474)..(474): n is a, c, g, or t
  misc_feature (511)..(512): n is a, c, g, or t
  misc_feature (553)..(553): n is a, c, g, or t
  misc_feature (604)..(604): n is a, c, g, or t
  misc_feature (632)..(632): n is a, c, g, or t
  misc_feature (637)..(637): n is a, c, g, or t
  misc_feature (647)..(647): n is a, c, g, or t
  misc_feature (651)..(651): n is a, c, g, or t
  misc_feature (667)..(667): n is a, c, g, or t
ccaatcaacatccaaccaggagaaggaacttgaagatatctttctagactgttgtttttcttaccatctgcatgcttgagcccttctcagggaaaatctatatttaaattcagaaagcaagcagtaaaattgtttcaacatgatgcatttgctgatataaggaaactgtaggcttcctgctccccacggtggttcaggagcagggattaagacacacccagcttcccagcctgtgtctacacctgtcaagatggataattaactgctcccccactttttccctgtccatcaccgcaaaagctccattattctcccttcctcaattccaaagagaaacgcatatctcagttgctttgtatcaggaatagaataaagaaaaatggctttttgctctgtctgatgcctgctgacaacatcccagctctctgaggggaagctctgggatcctctcttccagatggctgggaagcaacnccccggttgtttacttccagttcaccaaggtagggannaagatctctcagcaggggactccaacagcctatgccctaanggaggtccataagcccctcctacagactggcttcctacttcactccaattngggggagtggactggccatgcttaaacntgggnccaggttttnggantggctggaaggaatgnccctagacaggttgaaagggttggga

SEQ ID NO: 218750 - DNA, 563 bp, Homo Sapiens
  misc_feature (475)..(475): n is a, c, g, or t
aatccagcaaaacattcagataacctttataactcctttctagattagaacctgttgtaagccacttttatagacaaagtagaaaatcagacagtcaattaagtttacagtatattatcctaaaataaccttattttgatcccactgtgttagaaacccattttaggaagctgtaacacttggagacactaatttccaaaatggtttattaggacttctcccacactcaaagtcaaacttccaggactgttctgaaatgatgaaagcttcttttcgataatcaatatagatgttgttaatccaaaatagaaactaaaacctgcactaagtgacctaaaaagtcttgtcctgatggaagtggcaaaactgctcgtcccgcaaccaagaaatcctaggggtataagctaaacccacaaatatattggcaagtccccgattctttccaaattaccctactttatcaaatccaatggcnggtccggacaacagaatatttccatcaaaaattaagaccagcctaatacatttattctattcatcttccagtaatgttttgctggatt

SEQ ID NO: 218751 - DNA, 582 bp, Homo Sapiens; identical to SEQ ID NO: 40809

SEQ ID NO: 218752 - DNA, 535 bp, Homo Sapiens
  misc_feature (97)..(97): n is a, c, g, or t
  misc_feature (322)..(322): n is a, c, g, or t
tttttttttttttttttacaatttaaacaagaggattcactggtttgaaaaaaaggtttgaaaatcaggaaagctaaacaaaagtcattttacatantggagaaactgagacccatatgtgtaaatggcttcccaaggtcacagtggtgtcagtggcagagctggtactgtaccaggctgcctggatcatagactgatgtttttgccaagaccagccgaaatgttcctctcaggaggtggcaggtgggggtggagtgccaggaaggcactgtccaaagaagtgggttaaggtcacagcctcccggctcccaaggaccccctngagaacagttgctttggaaaggtcactcagatgtgaaccagaggcttgaggttttggagtggaaaggggcagggtaaggaagaatagagtaggaggagggcgggggacagggattcatcctccaggttcctcacacccccactgggagcagcgcccccaccccaagcacctgatttcaaagtctcccctccactgaagggaggggcaaaggga

SEQ ID NO: 218753 - DNA, 387 bp, Homo Sapiens; identical to SEQ ID NO: 59157

SEQ ID NO: 218754 - DNA, 529 bp, Homo Sapiens
tttttttttttttttttggtaaaattaaggtagaaaatgcatgacttggatgctttaaagaggaagaggggtaaagtccttccaaaatgtactagaaacgaaaagaaaaaggccgggcgcagtggaaatacgattgtcaggttaacaatgactactgttattcttttactagtaaccagctgttgattccaagtctaagaaggacatctctcctctagttaattagttgtagtttagaatcttttcccaggccaatgtgtcagttgacactcaagaaaggatggcatccacctctggctttggggcactaccaggtactatttggaaagaagtaacccaaccgtcagttgactggagagtccaggagaagggaaaagtaaaacttatgtttgtacaagaaagcattccaatacaactgtattgcaactcccacagggtaggatttaaaaaaaaaaaaaaggagcaaaccttactggatatgttaacgctgctgggattacaggcgtgggccactgggcccctcgtgccg

SEQ ID NO: 218755 - DNA, 375 bp, Homo Sapiens
tttttttttttttttttatgagcacacattttaaaaatgatttattgtacatctttgcatttcttaaggcatgaacaatggcatacagatggaacaggttctgagaagcatcacatctttttcgacaaggccagcacaatcacaccacatcaaacagacacacttgaagtctgcactgaccgactgcttgtggcccaggagtcctgcgataggggatggtgcttccagacagtggaacaatcgtgtggtttctatgttgttgttaactttcttgatcagctttaagcaccagttaccatttgtttttctttacaaactggtcagactttggattttatattctgctccttttattctgctttccaaggacggtgt

SEQ ID NO: 218756 - DNA, 482 bp, Homo Sapiens
tttttttttttttttttaccattttagagctatcatctctttatcattgatttttcttatgagttctgagacagcatctgatatttaaactctaattcgatgacagacattgtcaattccttcactgatttcaataaagactctaatactcctatattttcaatttcttgaaatgtctttaactcgcctaacaagcttcttaattcatccttgtaccttctggctcttgtttcatgtaattcatattcttttgattatgtcagatagtataaaaatacttttttatattcttgggatagtaatcacgttcccatattctgaaatatagtttcctttgttgttttcctcctcctttattcttaatcaaacaagttctgtttagattgtcaatgatgggcatgtggatttccattcatgacatttggtatctgtgggactccagctataaatagctaaaaggccaatgagcatacattctaaat

SEQ ID NO: 218757 - DNA, 403 bp, Homo Sapiens; identical to SEQ ID NO: 60767

SEQ ID NO: 218758 - DNA, 665 bp, Homo Sapiens
  misc_feature (19)..(19): n is a, c, g, or t
  misc_feature (598)..(598): n is a, c, g, or t
tttttttttttttttttanaccagcgtgaacaaccagcatttttattgcatttgagaatgcttataatgtcagtaattagtactgactacacaacattttttttattgtctgtatccgcagacatggaatgatggaattacagttgatgtcaaggaatgagtttcttttatgccttatcaaaacaaaacaaaacaaaacaaaaaaattcttgttactggcagcacatatacatgaagcaccatgctcacagtccggactgtatcatcttcatcaaggcttatgggtagcagagattgcgtgagctacactgggcccaagaaatgccttcagcattgtaaatctgattttcaggataaagaagcaaaactgactttgaagacatccagaatttcaggaggctatgtcattaaccaaaaggtaccaaaaagattcaaaatctgaataagcacactcttctttgtgcctttggaaacggagttcagctggaatatggaaaagagaggaaatattttttaactctattttttttcatgaggaaaaaaaagctagtgatttacagcctatcttgggttaagaatccaaggttttctttactangtctgactggatgctggggatggtgttagagctgtccaaaggtggcgggactggtggtaactcttca

SEQ ID NO: 218759 - DNA, 439 bp, Homo Sapiens
tttttttttttttttttcatgttcatcctgttttattccaaagcaccaaagcactttaccgaaaagcccctttggcccagccaaaaagttcagggccaggagccaggacacctggactccagatctgcatgtggaagatttggaacgttattggtggggggggggtctcaagttctctgtaatgtggcaagtgccatctgtggaggactttacaattttacatacatcatctcatttggccttctgatccctggtgagagaagcaaattaaacaggattgctattctaactttacagatacgaaactgggaccagggaaggttaataaggcactcagattcacacactattaagaaggtggggaagttgggacttttgattccaaaccctttgctctttcctagtcaaaacaataaagtcagttctatgcctcgtgccg

SEQ ID NO: 218760 - DNA, 501 bp, Homo Sapiens
  misc_feature (21)..(21): n is a, c, g, or t
tttttttttttttttttaaanataaggagatattttaatcaagagcacaaacaagaatatacaaaatgagaactgaaacagaatcttggatagcatccagggcttcatgctgattccatgacatggcagagtattattgtggtgatccttaatttaaaggggcaactgctgtccctaaagtgacactttgataaggaaatagtaacaagtctatccatatacatgattaaagatttctatcatttacatttcatagctgtgagctgaccattttcatgaaaatattatgtaaattatgatcataacaagtgtacccagaatcagaactgctaattaattcccctttcctgtggatgcagctgatgtattgtcacatcttaccactaattttcagaaaattatactagcaatataaggaaatgcctttatgataaactatcaacagctttcttatattaacataaatcagaaatctccaactgaaggctgagatgggaagat

SEQ ID NO: 218761 - DNA, 496 bp, Homo Sapiens
tttttttttttttttttagagcagcaacataaaactttattagaaagaaatactatatctggaccaaaaaactgcaacatggtttggaaatctaatgactaagaaggtaaaactggcaactatgtgcaactactgctcgtagatttgggtttgtttcccccccaacatctttaaaataagcagcccccacaaagggataatccattgaataaggagacaatgtagccaaagaagggatttgtggaaaaccatatgaatttaaatcaacataaaaagaacacacaaaggccatggaaacttgagaaggtgaaagaaaaaaaaaaaaaaccccaagcaaggacaagtcagctccttggagctgcaccaactcttaagtaggatgtccctattctaacggaaattgatgagtccacacctgggcacttcagtttgagaaatcaattggttggactggccattaaaaaaaggactttgtttttaaggtagataaagctta

SEQ ID NO: 218762 - DNA, 255 bp, Homo Sapiens
tttttttttcccagtaaatacattaggcatttactgggaaaaaattaagtttatctccttccacctggttttggtgcccaaataatatgagaataagtgaacagttcctatatttcaaggtcatcattcaagtgcatgatttcataaaggatacaagaacaaagggaaagcagtttagctcgattgttgatcaccttcaccaagcgccgtcttgctagaacatatttctgagcagtggagattttcctcgtgccg

SEQ ID NO: 218763 - DNA, 484 bp, Homo Sapiens
  misc_feature (26)..(26): n is a, c, g, or t
tttttttttttttttttctgacgtanaaacagcaggtctaagcaaaaggtgcatgagcaagagcaagtaacatccctattattatgacgcagatttttttttaagttgaaattcaatttttgggctgctactaaaaaggacatgtgcgaatatctattatttacgcttcaaactaaagtcagccgtttttctttttcaagatatgtggcatctggctcaaaatcaattgcaagaaaagcccaactctatttgacccagaaagagctctttccaataccctctcctcccacttacatcacagatggcgactgaagcttaaggtttaatgcccgaccctaaagccactcatcctaaaagacagggctccagatggatgctgtatggcagaggataaggcgctatgagaagctgccaagcctcagatgtgcagctgggctgaataccgacgccagcgcctagcgcccattactttgcacccacactt

SEQ ID NO: 218764 - DNA, 494 bp, Homo Sapiens
tttttttttttttttttacactttaagaattttattgtgggctgtaatttctttagacttcaatgtcaggacttcaacttgcaaggggagttgatcttgtgtttagtttttcctgggaatgagacgatgggggttgggtggtaaatttatggtcaagtttggggcatttgcacattggcttgtaactggagtaagttgtggtgttgtttaattttgtcgaggcttgactggaacatatggctggaaattatttgggactgaaagagaagcggtagtaaacatttgccttaggtaaaatgtagctttgggatgaaacttttttaaacagctttactgacatttaattttcacaaacctcacccacttaaagtatacaattcagtggttccgagtatattcacaaaattgtgcaaatggacgtataatctgattttagaacattttcatgatccctccaaggaaacttcctattatcagtcactctgcattctatt

SEQ ID NO: 218765 - DNA, 534 bp, Homo Sapiens
tttttttttttttttttgctttcttattattattttattgcagcaaattccagatgtgtctccaacgggaaaatatacaaccctcttgcctttgatgattattcttatgatttcaggcattaaagaggttatatacatcataaatgacatggcagacaaaatagttaaggaacacaaaactgttatgacaagattcatgggacacgtttaagtggaaagaggtgaatgtgggtgacactgtgaaggcctcgaatggggagctccttcctgcagacacagtcccgatgtgttcatatagcaacatctaatccggatagagagacaaatgtaagacacggcaggctttgccagaaacagcttctgtatcagtgcagggacatccttcctccaggcagcaggccttcaagcttcaagcctcagggcccaaccctaaggctgggggctctccctgcaggcaggactgggcctggaggggctcctcatacttctggagctgagaccagaagcccgggttcggttctgctaccgggcgag

SEQ ID NO: 218766 - DNA, 535 bp, Homo Sapiens
tttttttttttttttttccaaaagatgttatttttagagcagcattagggtcacagcaaaattgagcagaaagtacagagattttccacatacccgctacccacctccagactcccccactatcaaaatcccacaccagattagaacatttgttacaatggatgaacctacactgacatatcgtcagcactctgcggcaggtttgacaactccttcaggctccttcagaagccagaggcagttcatgagccatgtgacaggacagggaatttgagacattttacatggactaaattgccttcccagagacaggaagaccaacttttcagtatcctcacaatgacagggagggcaagaacagaaaggaatgtgcaatgcatggatgtacacgtgcaggctgaaaaaaatctgctaataataaaaataacaatttaagttaattttcactgacatatgctctatgcaaggtgatgacctaagtgttttataggcatgatcctatttaacactcaaaccaactctgtaagtatgagga

SEQ ID NO: 218767 - DNA, 462 bp, Homo Sapiens; identical to SEQ ID NO: 60704

SEQ ID NO: 218768 - DNA, 449 bp, Homo Sapiens
  misc_feature (423)..(423): n is a, c, g, or t
tttttttttttttttttaaaaaatttcttttcttattacaagaattccaagatgtgtcagagttgaccagaagcatagagaaaactacatagtcgagtacccaccaggggaatgtggtagaattggcagtctgttggtctctttgtaatgtcagattaaagaaatcacctggaggctgacattggccccttcccttcccaggaggcagatctggcctaaatacggagatgcgtacaaagaagacctaggatcacaatcgttcttagccatcaaactcttcttccaggtcctagagaaagtggccactctataccaaagccaaagaactgcagagtactcctcttggttggggtttcatattgctcttgcaattcagtttcctctcatctttgctgtcatttcgtgggtaccaacagccttggncaggtgtgagaagtgtccattactat

SEQ ID NO: 218769 - DNA, 448 bp, Homo Sapiens
tttttttttttttttttcacatttgatggtgtttattaatattattatttacatccatctccatcggactgattacaagactatcatcgtcttgcaagcttccacctccttcatggagccttgtataggcctcccttcccagaagccctccgtctcaccagactggaggattccctggcctttgtggggccggagttccctcgctccagggctccagggctccttgccaagagtccagatgctggcgctggcaccggccccactcccagggagaacagatggcgtctgcaagtgcacttggctcagccagtttctggcagacgacagaagcagggagacccacgggagggtagacgagagcgtgagggggcaggattgttttactcaggagggatgccctgttactttctatctcaaccttgctctcattcttttcatatttctatga

SEQ ID NO: 218770 - DNA, 608 bp, Homo Sapiens
tttttttttttttttttgcttatgaagaatgtacttttattttttaaagcaatttctcatcctgatcttttcttttcctattgccaccacaccacttcagactttcattatattatactggtttctccatgtcagacttctcatccttttacttaccccttctgccaaattagtttttcaaagtacaattcttatgacttgaagacattatttaatgatcctttaccaattattacatgttattatacctacaaaataaaggattaaaaactgaacagagtatttactgagagtctggaagaaccaaatagtttgttcatctctcagtaaacagatattatattattatttccactttacagattaggtagcaaaaattaagtgtaggtaataagtggtgagccaactaggaagtggtggactgtagatttgaactcatttttgtcaccattatgccataacgttctagtctcttactgtggctatctgagtcaacaggtactttttagttagacacaaactttgttacagccaactactgtccagacagacaaaaacaaaaagcatactctgtccacttctactttactgtacaaatcatccctcta

SEQ ID NO: 218771 - DNA, 648 bp, Homo Sapiens
tttttttttttttttttgaatttccatcccacctttcatttttatttcaaacacatgaaagttcactaaacttggtgctgtgaatatgctgtacattagatattatttccaaacaaccatttattaaatggggaactttctcccagtgggggcagaagagtgagtcagtctgatgagaagccataacaacctgactgttctgtgatttcgtccttgcggaggtccaggaaccagctcggagtcttccaatctctagctgcacaagtccctgtgcacacttggaaaggcaagaaaagaacagaaatgaaaagtagtagcatttatattctgaaatatcttaacagagcctctccctgcagccacaaattataaaagggtaatgaaagcaacaggcatagccctagagagaggaggatgaattctgtggctcctggagggcccatctcatcaaatgcatttaaagaacagtgatggatacttagaattctcacaagtatgaaaacttgcttgtgaatcccaaagcaggtccctttcattctgttagtcaatataacagactttcttttaaagctattctggctccatttaaataatcagagattaaatttctagtaaaaactagagttagtataaaatccccgtgccgaa

SEQ ID NO: 218772 - DNA, 318 bp, Homo Sapiens; identical to SEQ ID NO: 40733

SEQ ID NO: 218773 - DNA, 365 bp, Homo Sapiens
gaagagtgatagaagagagttagcttttgtgcaagcactattattcatggaagtcccctttcgatggggtagtggggactcctcactaagctgtccttctatctctgtggctgtctcagagaagcactgtggaactccagggtgctacgtagctcaccacggtgacccccaatgcaggccacttacagaagcttgaagatctgtgatttgctcacccaggctcccatgccgagtgttcttgtcattaactcaaaagccaaatgctgttatttctgttcttacttgcttgattgtttgtttaccagttcttcaacatcttcagtgtccacttgggttacttaaaatgtttactccttaggcccggt

SEQ ID NO: 218774 - DNA, 380 bp, Homo Sapiens; identical to SEQ ID NO: 40732
  misc_feature (336)..(336): n is a, c, g, or t
  misc_feature (361)..(361): n is a, c, g, or t
  misc_feature (367)..(367): n is a, c, g, or t

SEQ ID NO: 218775 - DNA, 338 bp, Homo Sapiens
  misc_feature (304)..(304): n is a, c, g, or t
  misc_feature (319)..(319): n is a, c, g, or t
  misc_feature (337)..(337): n is a, c, g, or t
ttcaagctgagagagacttaagcataggcagaaagagggttgaagaaggcagtgtagccaaatatcaaagaaaaataatggtggcctgttctgagagggagaagacaggccggggacattcacacctgacgggcctgtgcttcctagatgcggaggcaggcagggcctctcacggcaagctgggaaggccctaccctaaggcatgtttccacaatttctctaaacttttcttttctgatagtctgttttaaaaaaatcaaaatggtcagggttggtggttcacgcctgttaatcccagctattncaggaggccaaggtngggaggatcacttgaggnt

SEQ ID NO: 218776 - DNA, 518 bp, Homo Sapiens
atactgattaatatttaataaggtaaccaataggagtgttaagcaaaaaataaattcattttaggataaaattcttcagaagaagaagaatggagttcagggagcaaaaggaatcaaacaatatttccaactgttacaaagcgtgttaaagtatttttaaaaatggaaaatggtagctatcaaaactctattgtaccaacatttcactggatacatttaaaagaccgaataacattttaaaatgccaatatttacaatacataataaaatgcttcttttgaggctatttaaacataatgattttagatattcttttaaaaaatcaatcagagtctcatggtttttccaaaatttgtagggaggtatgcaagtaacaagtttgaagactattcactgcctacttgttacagccctttcagctcctggccacccgggtggctggggccaggtcaccttatttcaagcatcaaccaagcagacaccatgttggtcttggttaactgctatatcattaccct

SEQ ID NO: 218777 - DNA, 594 bp, Homo Sapiens
atttttacatcatctttatacaactgtaacagtgctttcaaaagacattttgtgaaggacattaatttcacatttaaaacgtgtttcaaaaataagggaacattaaagaacatcaaattagtctgaaatatatctcacaatgctgagaggcatactcttctttatcaaattaactgtatgtgtactcaagataacatggcttttaactaatgacatttcttgtccatttcagtaatttcttggatccaaaacaaaatctgtgtatttatttctttgaaaacatcatttgtcgaccgtcctttcactgccatggaatgatttgccttctcaatccagtggattttatggggagcttgcattttctgtgccactttctccaacaagttcttttcacacatttcatctgctgagcctgacacaaacagtacaggctcttttaaacgaaagaggtcttcatctctgagtttatgctgctgctttggatggtgcagtgggtaagaaatacaaatgagaccccgaacaaaatcatcaccatcatctggctcaatgtgacacattacagaagcagctgctcttgagcccattgaacgacct

SEQ ID NO: 218778 - DNA, 484 bp, Homo Sapiens; identical to SEQ ID NO: 60113

SEQ ID NO: 218779 - DNA, 448 bp, Homo Sapiens
ttaattatttttgtagaaagcagagtctcgctacggtgcccaggacaatttcaaattcctggcctcaagcaatcctcctgtcttggtctaaacatgttgagattacaggcttgagccaccatgcccagcctgaaaaacttttaagacaagacattaggaattctaaagttttaaaaagttgtcaaattataaaacaatagcaaaagcaaaaattatactaacagctgtcatatatgattttatctgctaattttactttgggacaatgtcagtgttaaaagcttgcatagatactcctattctgcctcctttagtcactggtagggaggatatgttgtcatgtagataatttctaatttccttttaagaagaatccacactaataattaacctcttacttgccccatgtaaagacaagcattattcctaaaataatgaattatgcaat

SEQ ID NO: 218780 - DNA, 493 bp, Homo Sapiens
ttttttttttttttaaatattaaatttgaactctattgaacagggacagaaacaatggtcactaagtcctggaacgagttgtgtgagccccttgaggcattcatccagtgctgtttcggaaaactagttattgaaaaacaacagacaatggcaaaaacaagttgtcctttttgtattccttgagcccagtcaggaagggctttcatgaccgggcctcctgacaaacaacttgttacaaaaagagctcggttcccagactgcgccgaagtttcatgggacctctcctcgtctgtgcacggactactggtcaattctggagcccaggctgttgcttcctggtctgttgatgaatcctccatagtctcagttgaagaaacagtccaatgttaagcatggagaaccagaatgtcttccttgtccttcctgagttctgaaagcttttcttattaaaagttctgaattctgattcttgggcgtgagagtaaagcaagac

SEQ ID NO: 218781 - DNA, 519 bp, Homo Sapiens
ctgatttggtgtctaacaactttctgccttggagtagctagtaatatgtagcattttcctagaaaacataagctctttgaagacagggaccacattttatttattttttatatgcaccacacctaatacacagtacatcctcagcaagtactggctgtaaagcctatattccatgctcttattttgtagtccaaatcactttaaaaatcacacttcttctattgttcatactcatagaagagcatattactcaaatagctctgctataaattaacagtaagtttcagaagttataccaagtcacgagactcagatttttaaaaagtgccacaaagtgtctcttctgtgtcaatgttaatagaaccctttctttaaatgatcagtaggcaaattaagaatttccggataaagaacaaactctggaaaaacaaagctagtgggagaggccctgtaaatacctacctagtcttacaagggctgtctctaactcagcttgtattttaggcagcgtcttcagtt

SEQ ID NO: 218782 - DNA, 458 bp, Homo Sapiens
  misc_feature (408)..(408): n is a, c, g, or t
cgattacaactactgtcaaggtcattgatttataagtgaagtcctttcctctggtctcaatctggttttctgccatggtagatataatatttttacattatgcctttcaagctacttgacatcctctgggacacttagtctcttttgtgattgcttaactgagatttactctacaaatcccactggaaatgaatcacctttgggaactgtaatggcagtctggtagtacacctgatgaagtcttatctgaaggccctgagagggagtgacttcttttctgcggacatttcctctagaataagatatactgtgtttactcatatttggaatcgacagaaagcaaataagaaagatgcctgttaagcctgagattactcaaggactggctggtaataattcatgactgtntaatatgtagacccgttctagtgtttctaaatatatccaggaaaagcctc

SEQ ID NO: 218783 - DNA, 547 bp, Homo Sapiens
tttggcttataaacaactgaggtttatttctcacagttttggaggctgaaagtccaaggtcaaggtgccagcatgcttgggttctggtgaaggccctcttttgcactgtagactgctgacttcttgctgtaacctcatgtggttgaaagagctagctggctctttggcttcttcttataaaggcagtaattccactcatgaaggctccaccctcatgacctaatttcctcctaaaggccctaccttcaaataccatcaccttgggattcatgtttcaacataggaattgttacgggaacacaaacattcagcccataacagattttatcaaagaagtacttcatgaaatgtaagtgatgagtggtttttccaaatttgtcatctccattgcatcttcctattaagaaatccactaataataatgttgatgataataaaaacagtaatatccaatattaatccaaagcagtttgggccagatagttgttgctgtattatacatgttggaaacaaccacacttttaggtgtgtttcattttacagctga

SEQ ID NO: 218784 - DNA, 521 bp, Homo Sapiens
ttttttgcttgtgcttattaaatagcaagggtgtttactcaggatttggggatcagttgtagccatgttgaatttggcaaactgagctgtgtgccctgaaagccctctttttatttcttcatttccatattgtctgacttacttcacctaggaatacctgagttatccagtccagtgttccctgatgagagtggaagattttcctggagaggcagctgtgcatggccaggtcatctgtcaggatgttgtggtggtgtgtgatcagagcagagggcctttcttttcctgtactgtgctctacttccttatgcatgcttggtttcaaagatgaccgccactttaaaagaaagatttcctcacagctctccagagaactatcatactaaggtgataggaaaggcttctcggatacaagccaacaagtcagtcttctgattacagaaactcctctcacaggttatgtttggaaaggctgttctccattccacttataaattgaaagtgataagctactgtcttgt

SEQ ID NO: 218785 - DNA, 351 bp, Homo Sapiens
  misc_feature (42)..(42): n is a, c, g, or t
  misc_feature (216)..(216): n is a, c, g, or t
  misc_feature (312)..(312): n is a, c, g, or t
  misc_feature (347)..(347): n is a, c, g, or t
cctttctgttttgtaaccatggtaaaacaatagaagtgaacntttccctgaacttttctctttaaagccctgggtccacgttgacctagcagggcaggctggaacctgatactatcaacccaagggctgctaaagcaatcaggttcaacaacaaccatatatgttccctaatgtcgctttgccacaaagccaaggcaaaagcaagctatttctagntaaaggaatttatttctattgtttcagaggattaattcaatgggtcttaaacgtggcattaaaacatggggcttaatgggtagggcttacaggaantatattattggttctctttattaatttattatccncttc

SEQ ID NO: 218786 - DNA, 435 bp, Homo Sapiens
atgaacctggaaaagctggttgtctttatttacaagatatcaaaaatataaaaactgtacaaaatgcaacaaaggcaaaaactggcagtgacttggtctaaatcttttagtttcccaaagcaaggctcagtactggaggtaagcaactgaaatgtctgtctgacttcaagtgtactaggttgtatgtagctgttttagctgaagtagaacatggaagctaaatttcttcacctggtttatcgagtgtttgggtgcactcaaaactcaacaggtatataaattcagatgtcagtgggtggctgtacttcctctagatctaagaaaggaaccctacctagttacatacattccattaatcatgggccaagaaaaaaaaagttagtggatcatttaacatagtttttgagtgccatacagtaactacgtttttacagc

SEQ ID NO: 218787 - DNA, 415 bp, Homo Sapiens
gctattgtaaatggggttttctttttttttatatctctttttttttaagactagtcaagcgcagtagtaacaagtggagaaagactagaacaaggagtttaatctataactgactgaaaagtcaattgagataactcagttggacctttggaccagccttccttataccttctaactcattattgtttacatttatgaaggcttttgatttttccatgttaattttatcatacctattaccctattgagttattttactgagttgggattttttaacgactttattgagaaatcatttacatgccataaaattcactgattttaaatgtactattcaatgggttgaagtatatttagagagctgtacagccatcaccacaatgtaattttagaacagtttcatcaccccaaaaag

SEQ ID NO: 218788 - DNA, 546 bp, Homo Sapiens
tcagtcctaacatctatgcttgcgccacccaaagaattcacttgttctctcctatgtgactctacaggctactagttggttttccatggaattttagtgaagtataagccattaatgatgagtaactgttgacaaagtattcagaaacgatttacaaaatggacattttgaaatctattactaattttttaaaacagtccattctttttgaattgtgaaataactcacaatttactctgaaataataataatcatgagaaaatgattgttcctttacttcctctccttcctctaactatttttctttgttacattttttttacattttcagtgttcataatagttactttctattctgtgaccataattctcacagttgattagcctttgtttctatatctaaatcagtggtttccaatcttgtctacacaatattctcacttgaggttgtgtcaaaaaatactgattctgtggccccatctgtgagattctgaattgaattagtctggagaggggctttgacgagtcaatgtgtgaccttttaca

SEQ ID NO: 218789 - DNA, 515 bp, Homo Sapiens
atttcaaacaaatccaaaacttatttttgtttatagaaacaagacaacacacagtaaaattgaggaaatacaatagttttttcaatatagtaccacaagccattttttctgtaaaggaccaaatattagatactatcacaaaacattttatcactcattcaaaacaagaatcattcagttgccccaggaaaaaacacactgaaattattttagatagcataataagctagaggatatagaacatttgaaaaacagttccaaaaaatggaatactaaagatgcaacattaattcttagtacatttgttatggtaatgaattaaagcattatagaatatattcaagtcagaaatcctgtagtatgaagacataccttcatatgtgaaaatattattttatattaataataattattctggtatttatatcagatttatcatcagattttctttcctgaatttattaataatttgaccatggaacacaaaaatatttcattcattttataatactttg

SEQ ID NO: 218790 - DNA, 515 bp, Homo Sapiens
  misc_feature (345)..(345): n is a, c, g, or t
ataggatgaaacatcaaagattttatttaacttcttaattaactcataagggaaccagtaagatgctatataggagaattcaatgtactacacttttatcgttgaatcaggaatgctgaaatgaatgtaaaaatagatgtaaaattggttaatatccatgggacaataatcaattgctattcactgaacacaatttttatttctatagacaagaactttttacattcctataagtgttctatataggagctcaaagataatgaaaggcacatcatttatagaatcagaaaacttggaagggggtgccctaaaacaaggcatagttttccattgaagacacccagncaacttttcggtctatttcagtctttcacaatttttccctagcgtctgctttcctttcgtgatcataacaatttcaaaggaagattattcttaagtttggcttgcaaaatccaggtccatatagtattaatcacttacaaagttaacttctgtctagaagttttaataag

SEQ ID NO: 218791 - DNA, 441 bp, Homo Sapiens
gtaggggtaagggaacaggcttccgattggggacatggccaggccctggggtgagaaaagagacacacagcgagtcagccgggtgggaggagcttatctcatccctctcctctcttctccccctccaacattgggcaagccatgaatccctggtatgttctgttgttgttgttgttgtgtttttttttttggggggggagataggtgggggcaggagagaagtcaacactcagaaatctctaggtacaaatcttagctgtgtcaccctaggccaagagactttgattaacttgtgcctcagcttccttataggaagaaaaaacagggaaatcataagtaatttatattcctattgaggaccttgtagatattaaatgagtgaaagcctgcaatatgctgcacacagtgtgtgcagcccccaggaaatctccttgcacctgt

SEQ ID NO: 218792 - DNA, 459 bp, Homo Sapiens
tttcttttacctttatttattccttctttggcactcttcctttgttacgcagatttgagtttctgaactttatcaccttccttttccgtgaggaacttcttttaatattttcttacagggaaggtctgatggtgattatttccctcagcatttgtctgaggaagtctttatttctcaagtttgtattttttttctttattttagcatttaaatacttcactccagtcttcttgcttctgtgtttctgatgggaagtctaatttaattcttgtcctgttttgctgtaagtcaggttactttttctctgactcctttgaagattttctttttgtctttggttttctgaagtttgtgtataattgttttggtatttctcctgtttactggtctctacttcttgacttgtgatttgctggggttaatttgggaaaatcctctgacagtgttacttcaaatatt

SEQ ID NO: 218793 - DNA, 420 bp, Homo Sapiens
  misc_feature (415)..(415): n is a, c, g, or t
tggagggcagggggctgggaggaggaaagactacaactcctctacaggctccttgagagcagagaccatttctttacttatttagtttaacctccttggtactcagcaaagagtatggtacaaattaggttcaataaacacctgcggattgaatgaaaatactgacagtaaaggctattaataatgcaacccacacgatctccatcactgacaaatcctggcaagtctcagtgacacttttccttaagcctctacagactagttattgaggtctgtaaacctaagatcgctttccccaggattcttgcacaggggacggggtgacagaagcaacacatattcaaagcaatcattttttcttaatcatcttctaagagggccaatgaaaacgaaatggcaagcgtcactgcttcangagag

SEQ ID NO: 218794 - DNA, 527 bp, Homo Sapiens
  misc_feature (11)..(12): n is a, c, g, or t
  misc_feature (283)..(283): n is a, c, g, or t
  misc_feature (329)..(329): n is a, c, g, or t
  misc_feature (364)..(364): n is a, c, g, or t
  misc_feature (379)..(379): n is a, c, g, or t
  misc_feature (401)..(401): n is a, c, g, or t
  misc_feature (450)..(450): n is a, c, g, or t
gcagagttcannagaagggtgcaggaggtattagaaaagatgcacataggtcttatatctcatcaaagcatgaatttccaactcattaaaacactccattctctgccctaatctcccaaagagcattcagctgaatgaaaagctgctgacattcgtgccagttcacagctagaatgacatggctgggggacaggagatgctgcagtttccattatccattgaacaccttggcaattcttaattcatcctgtgaatgtgatacttactcttgtactgctctggntatggaaagggccgtagatccagtttcattaacgctatctaagggncaccatttgggcagggtcatcatccatcactggtnacttttactttggtntgggggatagggctcggggggncatttgtgctttgccatgggctctcccatcctcccaaaagcgggcacgncaatagtgttgttcacatttccgggggaccttacagctgtgtaggacaacagggaccgcttgtacccccccggggga

SEQ ID NO: 218795 - DNA, 365 bp, Homo Sapiens
ggctggagtgcagtggtgcgatcttggctcactgcaacttccgcctcccgggttcaagcgatcctcccacctcagcctcccgagtagctggggttacaggcgctcaccaccaaatctggctaatttttgtacatttagtagagatagcatgttgcagggtagtctcaaactcctgacctcaagtgatgcacccacctcggcctcccagagtgctggaattataggcataagcaccgtgcccggccctattttttcaatcctgatgtcactggattacaagcaccatgagtggtgggaaagcccagagtggccagggtcgccacactcccatctacacctgccctgtcaggaggcctgggggacac

SEQ ID NO: 218796 - DNA, 424 bp, Homo Sapiens
  misc_feature (265)..(265): n is a, c, g, or t
agacaccatgttgcccagggtggccttgaactcctgggcccaagcaatcctcctgcttcagtctggcaaagtgtttggattacaaataacttactacttgccaagttcctttctaagtgtttttgttttgttttgttaatttttaaaaagagacagcgtcttactatgttgcccaggctggtctcaatctcctgggcccaagagatcctcccacctcggcctcccaaagtgctgggggttacaggtgtgagccaccatgcctggnccctttctaagtgttttacacatactgattcatctatagcccttcaacaatccaatgaggaaggtactatttttatctctattttacagacaaggaaatggaggcctaaagaggttaagtgacttgcccagggtcacatagctagtaagtgggcaatgc

SEQ ID NO: 218797 - DNA, 363 bp, Homo Sapiens; identical to SEQ ID NO: 58048
  misc_feature (101)..(101): n is a, c, g, or t
  misc_feature (103)..(103): n is a, c, g, or t
  misc_feature (194)..(194): n is a, c, g, or t
  misc_feature (288)..(288): n is a, c, g, or t

SEQ ID NO: 218798 - DNA, 604 bp, Homo Sapiens
ttttttttttgtagagatggggtctcactacattgcccaggatgatctcaaactcctaacctcaagcaacccctctgcctcaacctctcaaagtgctggggttacaggtgtgagccaccgtgcccagccaatatgagaaccttatttatttatgtatttttgtgttgactgattgattgtagacatgggggtctcactacattgcccaggctggtcttgaactcctagactaagcaatcttcctgcctccacctccccaagtgctaggatgataggtgtgagccactgcacccggctgagaacttttttaaatcaaaaaaaggtcctttagtggaataaacacttgatttctaaaactcttctgatttctgacattcttagaattttataataacaagatttgaggttcagtgcagtattctgtgaacgctggtacaagtcacagttgaggccaacaagcatttttactgcattcatttgtgctaccacaaggctgaggaccagtctgggtggattccgtgaagaggggtgacagcgcaccaaccaggaacgcagaacccacgtcctccttcagcctctcctcgacacctcgagactcaaagac

SEQ ID NO: 218799 - DNA, 565 bp, Homo Sapiens
ttttttttttgagcattcaacagttttatttgctgttggggaatgaagggaacaggaaggaatgacatggaggggaaggaagctccttactcccgtcactaaggtagggcacgtggtacagagtggcttgtgtgaagcggccgccccaagctgagcctgcagctgataaccacagacaccctggcagggaaatctgtgatcggaacaacaaaatgccaaggaaaacaaaacccatttgcatttggtatgaatttcctgtttaaataggttttattagcgggcaagaaaggaaaagtggtgacttcaaggtgtcattgggctggcaagggctcgggcccctggaggggtacagtgggggctgggccacactccctgctgcccgtttcctcctgggggcagctgcagcaacctcttggcttgtctgcttcctgtctcttacctaacagtcaaggctcactagaggagtcccgggccccctaggctggctccggggaaaaggaatcaggcagaaccggctagtattatcccaaggagtgtggctgggcggagcttccccacagatctc

SEQ ID NO: 218800 - DNA, 498 bp, Homo Sapiens
ggcacgaggcctccccacaccacctcatcactctcctttacttggctgccagtccagctgcctcagaatgtcagaagggtgccattttcagttcttttcctgtctgactgtagggtatagaacaggcagccctaagtgctgctttctgcgcaaatgttttttgattacaaatctctaactaggtttgaaatgttttatagaataagacaatattcttttcaacaaactttaaaaaaaatgtacagttttgttgtttgaaggcttgggctcgcgccgctgaagtcggcttacccgctggccgcctcctgacaagcgggagggatccgcggtggacccacggaagcggaggagcctggcggccaccccctcttcctcacttccctgtactctcatcgctctcggcctccgacacgaaaaggaagcaaatgagctgatggaagatctgtttgaaactttccaagatgagatgggattctccaacatggaagatgatggccc

SEQ ID NO: 218801 - DNA, 595 bp, Homo Sapiens
ttttttttttgatcctttatttgaaaaacaagaaagtaacatcagttcacagaaactatgttacatcacatctcttagacaactcaaattatgcccacacaacacacacacgcctcttctacctatcccttaagaatgtttacaacaatattaaataaatctcgttttgcagaattttcaacataaaaaaaaaaacagaatttatccctattatttaacttcatgtaaacaatgattataaatgttttactggagtttttcagatggattgaggtggccttcgttttcactctcattctgagatactagagaagcagtaggataaggaacagatgatgtgaggctattggattctccattgacaaccggtgccaagcctacagaagcagagggagctgaagtacttctctgatcgacactcctttgtggagaggatgatgaattgttaagatgctgatctcgaagtgtatgaagttctccaagcaatttgtccattttttgtttcttttcctgtagcactcgcattttgctaaaaagttcgactttctcatcaggtaaacgttctgaagctgatggtttcctgctctgggaaacc

SEQ ID NO: 218802 - DNA, 620 bp, Homo Sapiens
ttttttttttaagagtcctcagtatatattttgttcatcatgcattcattccacaaacatttactgagcacttactaagtacaagcactgtgcaggctaatggctaagtgagggattctaagaaaatgtacggaccctgtcccagaggaactcacaatctagtgaggtgacaatgccaggcattgcagtgtttgttggttccccacagctttgttcttgtcaactatagtcaccaaataaaaatgttagtgaataaaacctcaggatctttgagtgaagcaacaatccttatagttagcttaaaatgttgagtgcgttatggttacagatgatagtgtagcgggagtaaccttaggcctgcaaactcaaatgtgtaacaaagataatttttttttctgtaactgaaatgtatttctatttgaagcctccatttacctgcagtgacaataatcttatcaacaggaggccctcctcctttctttcaatttgaaacctccatttatctgcagtgatattcttatcaacgggaggcccggccctttctccagggctttgtcaagattggggagacttctgaagtgccaagatgagaagagagagaccttaggtccttgtgtcac

SEQ ID NO: 218803 - DNA, 534 bp, Homo Sapiens; identical to SEQ ID NO: 59742

SEQ ID NO: 218804 - DNA, 582 bp, Homo Sapiens
  misc_feature (580)..(580): n is a, c, g, or t
tttttttttttttttcttttttttaaaggtcacatgaatgtttattacaacatagaaaagagggaaaggaagaaaaaggtttccaaagccgtatttccaaggatttaaaaaaacacaaacttggaatgccaaagagatgtcatgctttatatatttataataggaaggtgtgtgtatgtataaatatgtacatggaaatatgtacacaggttttgactgtcatatatagtatttttcattgcatgtacagtaatgctgcttgagtgaagggttttaaagctggcagaaggctggagaatctggaaccctgcttggcccctagagggcgctgtggagaccacctaagcagctcccagggaaggtctgccggggctggggctgggtcctgagggtgttggggaaggctgagctgcaggcgggcttgggccccaggctgcagggttccggccagggcaagtctggaagcgtccctacgtccccgacattagacgttttcttccaagaagggtttcagtcattggaataggctggaaataccctcatggctggactggggtggggtgggctcccagcaggtcangg

SEQ ID NO: 218805 - DNA, 620 bp, Homo Sapiens
ctttttttttttttttttcttttttgatcaaaatattttaataaagattctttctgacatagatacacatacaaatggtcgtacatagctgtcatagtctgattgacctatttaatatatatatcattctttacacatccaaaacccgccaacagatccatcacagctcccaactcaccatccaacctgacaaactgaatttgtattatctgcaaggagtggaaaatagcaggactccatttttaaaaaagattttcttgattttcatagggcggaaaggcagtcaaacagccatgcaaaactaaaactgaaagctcactttgggtaaatagcttcttgttcttccttagttttctttctttttaaattttatttttttagaaaaataacaaaggatttcacaccataggcaaatcaaaccagtcttttaacttaaataattctccacagttaaaataacatatatgtacatatatattaaaagcaattaaattagaccttttaaaaatgcacagcacagcctggaaaaatatttgcttagcatgttcttacgtatagcaactattgctgtgatgtttttcccttttggaatgtaaaggagtccctttcaaaaagagatc

SEQ ID NO: 218806 - DNA, 805 bp, Homo Sapiens; identical to SEQ ID NO: 45513

SEQ ID NO: 218807 - DNA, 646 bp, Homo Sapiens; identical to SEQ ID NO: 54393

SEQ ID NO: 218808 - DNA, 1000 bp, Homo Sapiens
gaggaaagtggggaacccctttgagctggacacccagcaggggcctcaggtggacaaggagcagtttgaacgagtcctaggctacatccagcttggccagaaggagggcgcaaaactcctctgtggcggagagcgtttcggggagcgtggtttcttcatcaagcctactgtctttggtggcgtgcaggatgacatgagaattgccaaagaggagatctttgggcctgtgcagcccctgttcaagttcaagaagattgaggaggtggttgagagggccaacaacaccaggtatggcctggctgcggctgtgttcacccgggatctggacaaggccatgtacttcacccaggcactccaggccgggaccgtgtgggtaaacacctacaacatcgtcacctgccacacgccatttggagggtttaaggaatctggaaacgggagggagctgggtgaggatgggcttaaggcctacacagaggtaaagacggtcaccatcaaggttcctcagaagaactcgtaagagcagctgtcagggaggcccagtcacagtccagcaattccacaaccaccttgaccaatgcttgccaagctgttttaaagccaagaacaccctttctttgttccaaattaactcttagaagaaaccccacaaataaagcaattcaatcaaggctgttcctatttaaatcagagatggggaccaggctcagagttctacctatctaaccccaaccacagccccttggtggccatgagttgcttccatgaaatcttaggagtctctggaggacagattaaaaccagtgatctgtaatttgtagctcttcctgctgatccaaggactttccatgggtgcgcttgatggtttagtggatcgactcaactcagaacacaagcttggaaagtgttaggggttttgaactaggtggatactaaatctcggcccactcttcattggcttaacctaaaaaccagaggtgcttttccttgtctgtgtgcc

SEQ ID NO: 218809 - DNA, 681 bp, Homo Sapiens; identical to SEQ ID NO: 49061

SEQ ID NO: 218810 - DNA, 988 bp, Homo Sapiens
gcttcctccagcctacacgccccgtccacagtggcatcaccctcttatcccaaaagaatatgccagttcccatccagcaccgaagaaaatcagctcctggggctggtggttggaggtgggtctgtccactgtgggggccaaagtgttcccctgctggagacagtttgcaagtaagaacctaaggatggggacagcatcctgtgcttgggcattgaccagccaaagctcacatttagaaatccctcagtgcttctgtggtttcacctgggcatcgacaacattagggaagcctttgtgaccacaagggcagggcttgtgccctgagtggcgaggtggtgacctgaggccagtgtgatgtggttggatctcagcgtgtactgaatgccagtctggccggcacactcgaacgctaagagaatggtccaatttgatgatcttatttctatttcgatcaggttttgactttttgtagatgaaaactaccagggaaaaggggaagcaggtactcaataaagtttagaaagatccagtctgtgaaacccttagagatgggctgaaagttaagtccaccaacccttgggcttaatcaggacggaagaggagggggtgtggggggcagagcgtaaaacaagccccagccctactcccgggcccccagcccagtcttcccaatcccagaggccccggcggcctgtgctcctcaccaccctggtcaggggaatagaaggaaatgcaatttccgcctgtctgcccgacttcaaaaactgcctcctcctgcccaggcctctcccaccaccaccttccctccaaagataaccgtgtccatgccatccgtggcatcatctcgagttttcatttttggatgaagtgacatttagctttaacaagacatttccaaagcgcctagtctcctccaaaatgctaactttaaaagttgggcattgtaggcgaaaaatcccaaaaaaaaaaaaaaaggaaaaaaaaaaaa

SEQ ID NO: 218811 - DNA, 483 bp, Homo Sapiens
  misc_feature (361)..(361): n is a, c, g, or t
  misc_feature (397)..(397): n is a, c, g, or t
  misc_feature (402)..(402): n is a, c, g, or t
  misc_feature (425)..(425): n is a, c, g, or t
ttttttttaaatagactatttttctagaacagttttaggttcacagcaaaattgagagtaagatatagagatttcccatatatcccctatccccatacatgcatagcctcctccactatcaacatctcccacgagggtgggaaatttttacaactgatgaacctacattgacaaattatcttaacataaagtccacagtttacattagggttcatgcttagtgttgtacattctatgggtttggacaaacgtatgatgacatgataacatgtatcaacccttacagtatcacacagtgaattttcactggcaaaaatcccttatgctatgcctgtttatctctccctccaccaccaacccngggggaaccactggatctctttattgtctccatagntttancttttttcatacagtatgtaggnctttttcaggattgggttcttttcaattaataatatggcatttaaggggtctttcagg

SEQ ID NO: 218812 - DNA, 439 bp, Homo Sapiens
cacgaggctgtcccgctgcgtgttttcctcttgatcgggaactcctgcttctccttgcctcgaaatggaccccaactgctcctgctcgcctgttggctcctgtgcctgtgccggctcctgcaaatgcaaagagtgcaaatgcacctcctgcaagaagagctgctgctcctgctgccctgtgggctgtgccaagtgtgcccagggctgcatctgcaaagggacgtcagacaagtgcagctgctgtgcctgatgccaggacagctgtgctctcagatgtaaatagagcaacctatataaacctggatttttttttttttttttttttttgtacaaccctgacccgtttgctacatctttttttctatgaaatatgtgaatggcaataaattcatctagactaaaaaaaaaaaaaaaaaaaaaaaaaaaaaaaaaaaaaaaa

SEQ ID NO: 218813 - DNA, 645 bp, Homo Sapiens
gcacgaggctcgctctcccacaccactggcaccaggccccggacacccgctctgctgcaggagaatggctactcatcacacgctgtggatgggactggccctgctgggggtgctgggcgacctgcaggcagcaccggaggcccaggtctccgtgcagcccaacttccagcaggacaagttcctggggcgctggttcagcgcgggcctcgcctccaactcgagctggctccgggagaagaaggcggcgttgtccatgtgcaagtctgtggtggcccctgccacggatggtggcctcaacctgacctccaccttcctcaggaaaaaccagtgtgagacccgaaccatgctgctgcagcccgcggggtccctcggctcctacagctaccggagtccccactggggcagcacctactccgtgtcagtggtggagaccgactacgaccagtacgcgctgctgtacagccagggcagcaagggccctggcgaggacttccgcatggccaccctctacagccgaacccagacccccagggctgagttaaaggagaaattcaccgccttctgcaaggcccagggcttcacagaggataccattgtcttcctgccccaaaccgataagtgcatgacggaacaataggactcccc

SEQ ID NO: 218814 - DNA, 551 bp, Homo Sapiens
cacgaggggcaattagaccagaagatccccgctcctgtctctaaagaggggaaagggcaaggatggtggaggctttctgtgctacctggaagctgaccaacagtcagaactttgatgagtacatgaaggctctaggcgtgggctttgccactaggcaggtgggaaatgtgaccaaaccaacggtaattatcagtcaagaaggagacaaagtggtcatcaggactctcagcacattcaagaacacggagattagtttccagctgggagaagagtttgatgaaaccactgcagatgatagaaactgtaagtctgttgttagcctggatggagacaaacttgttcacatacagaaatgggatggcaaagaaacaaattttgtaagagaaattaaggatggcaaaatggttatgacccttacttttggtgatgtggttgctgttcgccactatgagaaggcataaaaatgttcctggtcggggcttggaagaagctcttcagttttctgtttcctcaagtctcagtgctatcctattacacatggctgatcatta

SEQ ID NO: 218815 - DNA, 774 bp, Homo Sapiens
cacgagggggacaccgggtgtagagggcggtcgcggcgggcagtggcggcagaatgttggctaccagggtatttagcctagttggcaagcgagcaatttccacctctgtgtgtgtacgagctcatgaaagtgttgtgaagagcgaagacttttcgctcccagcttatatggatcggcgtgaccaccccttgccggaggtggcccatgtcaagcacctgtctgccagccagaaggcactgaaggagaaggagaaggcctcctggagcagcctctccatggatgagaaagtcgagttgtatcgcattaagttcaaggagagctttgctgagatgaacaggggctcgaacgagtggaagacggttgtgggcggtgccatgttcttcatcggtttcaccgcgctcgttatcatgtggcagaagcactatgtgtacggccccctcccgcaaagctttgacaaagagtgggtggccaagcagaccaagaggatgctggacatgaaggtgaaccccatccagggcttagcctccaagtgggactacgaaaagaacgagtggaagaagtgagagatgctggcctgcgcctgcacctgcgcctggctctgtcaccgccatgcaactccatgcctatttactggaaacctgttatgccaaacagttgtaccactgctaataaatgaccagtttacctgaaaaaaaaaaaaaaaaaactcgactctagattgcggccgcggtcatagctgtttcctgaacagatcccgggtggcatccctgtgac

SEQ ID NO: 218816 - DNA, 651 bp, Homo Sapiens
cacgaggccgcgggccgcctctttctaagtcggcttcgagcacccttcagttccatggccaagagcccactcgagggcgtttcctcctccagaggcctgcacgcggggcgcgggccccgaaggctctccatcgaaggcaacattggcctgcactgcccaaagtcttggaaacttgctggatatgatgtaccgggagccagcacgatggtcctacacattccagacattttcctttttgagccgcctgaaagtacagctggagcccttccctgagaaactcttacaggccaggaagccagtacagatctttgagaggtctgtgtacagtgacaggtatatctttgcaaagaatctttttgaaaatggttccctcagtgacatcgagtggcatatctatcaggactggcattcttttctcctgtgggagtttgccagccggatcacattacatggcttcatctacctccaggcttctccccaggtttgtttgaagagactgtaccagagggccagggaggaggagaaaggaattgagctggcctatctagagcagctgcatggccaacacgaagcctggcttattcacaagacaacgaagctccactttgaggctctgatgacaattcagtgctggtgttggatgtcaatgaa

SEQ ID NO: 218817 - DNA, 621 bp, Homo Sapiens
gcacgaggggatagagcagtcatagacaccatggaccagggcaggagaagggcagatggcacatgggcacaacagggccttgtccttagagcactggggggtcatggctgggaggggcatggcaggggctggcatccctgtagagccagaggggccacccagggcagtgacattccagatatgttgggctcacctcatccttgctgtgagactggagttccatggggacatgaagtcagtacaccgcagagctgctcagctgctctacctctcgctgacttttttgttgcacatatacattttctttcaattagcatttatttcagcttttatttaagctttttgacagtacatgtaaaatatatgattataaccatttaaaaataccttatgtacctggtttttttttggaaactagatagaaatatatttatcttttacataaaagaagtgtgtagtggggtggtccagggctttgtggtggcttagtggccatcggggtcccaggctcttcccacctttctcttttgggtccacctcttggctcctggcttccttcctctggggcctgactgtccaggatggcagctggagctcctgctctgggcacggttggcatca

SEQ ID NO: 218818 - DNA, 612 bp, Homo Sapiens
gcacgagggtcgctgtcggcgctgaggctgcagctatcatggtgaacttacttcagattgtgcgggaccactgggttcatgttcttgtccctatgggatttgtcattggatgttatttagacagaaagagtgatgaacggctaactgccttccggaacaagagtatgttatttaaaagggaattgcaacccagtgaagaagttacctggaagtaaagactggctagattatcgaatgttcacattttaaagttctgagagaaataaaaacatgaagaatttgaaaaaaaaaaaaaaaaaactcgactctagattgcggccgcggtcatagctgtttcctgaacagatcccgggtggcatccctgtgacccctccccagtgcctctcctggccctggaagttgccactccagtgcccaccagccttgtcctaataaaattaagttgcatcattttgtctgactaggtgtccttctataatattatggggtggaggggggtggtatggagcaaggggcaagttgggaagacaacctgtagggcctgcggggtctattgggaaccaagctggagtgcagtggcacaatcttggctcactgcaatctccgcctcct

SEQ ID NO: 218819 - DNA, 688 bp, Homo Sapiens
cacgaggtgggctctgccagcgggaccatgctgctccgagccgcttggaggcgggcggcagtggcggtgacagcggctccagggccgaagcccgcggcgcccactcgggggctgcgcctgcgcgttggagaccgtgctcctcagtctgcggttcccgcagatacagccgctgccccggaggtggggccagtgctgcgacctctctatatggatgtgcaagctacaactcctctggacccccgggtgcttgatgccatgctcccttacctaatcaactactatgggaacccacactcccggacacatgcttatggctgggagagtgaggcagccatggaacgtgctcgtcagcaagtagcatctctgattggagctgatcctcgtgagatcatttttactagtggtgctactgaatccaacaacatagcaattaagggggtggcccgattctacaggtcacggaaaaagcacttgatcaccacccagacagaacacaaatgtgtcttggactcctgccgttcactggaagctgagggctttcaggtcacctacctcccagtgcagaagagtgggatcattgacctaaaggaactagaggctgctatccagccagatactagcctggtgtcagtcatgactgtgaacaatgagattggagtgaagcagcctattgcagaaatagggcgga

SEQ ID NO: 218820 - DNA, 587 bp, Homo Sapiens
gcacgaggcctctgctcgacggtgccttcgctggccctgacatccctgctgtgcctgggcttcgccctctgtgcctcagtccccatcctccctctccagtacctcaccttcatcctgcaagtgatcagccgctccttcctctatgggagcaacgcggccttcctcacccttgctttcccttcagagcactttggcaagctctttgggctggtgatggccttgtcggctgtggtgtctctgctccagttccccatcttcaccctcatcaaaggctcccttcagaatgacccattttacgtgaatgtgatgttcatgcttgccattcttctgacattcttccacccctttctggtatatcgggaatgccgtacttggaaagaaagtccctctgcaattgcatagttcagaagccctcacttttcagccccgaggatggttttgttcatcttccaccacctttgaggacctcgtgtcccaaaagactttgcctatcccagcaaaacacacacacacacacacacacacacaaaataaagacacacaaggacgtctgcgcagcaagaaaagaatctcagttgccaagcaga

SEQ ID NO: 218821 - DNA, 690 bp, Homo Sapiens
cacgagggcgggctcaggaggtccgcgggaggatggagcagtgagcgggtctgggcggctgctggcagcgccatggagacggtacagctgaggaacccgccgcgccggcagctgaaaaagttggatgaagatagtttaaccaaacaaccagaagaagtatttgatgtcttagagaaacttggagaagggtcctatggcagcgtatacaaagctattcataaagagaccggccagattgttgctattaagcaagttcctgtggaatcagacctccaggagataatcaaagaaatctctataatgcagcaatgtgacagccctcatgtagtcaaatattatggcagttattttaagaacacagacttatggatcgttatggagtactgtggggctggttctgtatctgatatcattcgattacgaaataaaacgttaacagaagatgaaatagctacaatattacaatcaactcttaagggacttgaataccttcattttatgagaaaaatacaccgagatatcaaggcaggaaatattttgctaaatacagaaggacatgcaaaacttgcagattttggggtagcaggtcaacttacagataccatggccaagcggaatacagtgataggaacaccattttggatggctccagaagtgattcaggaaattggatacaactgtgtagcagac

SEQ ID NO: 218822 - DNA, 698 bp, Homo Sapiens
gcccgggcctcgtgccgaattcggcacgagggaagtgagccgcccgggtcccaaacgccagccagccagtcagtgggtcccgcagtcgcccgcaaccggggcgaatcatggcggccgccaaggtggctttaaccaagagagcagatccagctgagcttagaacaatatttttgaagtatgcaagcattgagaaaaacggtgaatttttcatgtcccccaatgactttgtcactcgatacttgaacatttttggagaaagccagcctaatccaaagactgtggaacttttaagtggagtggtggatcagaccaaagatggattaatatcttttcaagaatttgttgcctttgaatctgtcctgtgtgcccctgatgctttgtttatggtagcctttcagctgtttgacaaagctggcaaaggagaagtaacttttgaggatgttaagcaagtttttggacagaccacaattcatcaacatattccatttaactgggattcagaatttgtgcaactacattttggaaaagaaagaaaaagacacctgacatatgcggaatttactcagtttttattggaaatacaactggagcacgcaaagcaagcctttgtgcaacgggacaatgctaggactgggagagtcacagccatcgacttccgagacatcatggtcaccatccgcccccatgtcttgactcct

SEQ ID NO: 218823 - DNA, 532 bp, Homo Sapiens
gcacgagggtttcctggtgggcgtcaggggcaggcaacagagtggcggccgctacggccctggaacggggccatggagaagctgcggcgagtcctgagcggccaggacgacgaggagcagggcctgactgcgcaggtcctggatgcctcatcccttagtttcaacaccagattgaaatggtttgccatctgcttcgtatgtggcgttttcttttctattcttggaactggattgctgtggcttccgggcggcataaagctttttgcagtgttttataccctcggcaatcttgctgcgttagccagtacatgctttttaatgggacctgtgaagcaactgaagaaaatgtttgaagcaacaagattgcttgcaacaattgttatgcttttgtgtttcatatttaccctgtgtgctgctctttggtggcataagaagggactggctgtgttattctgcatattgcagttcttgtcaatgacctggtatagcctgtcgtacatcccatatgcaagggatgcagttattaaatgct

SEQ ID NO: 218824 - DNA, 667 bp, Homo Sapiens
gcacgaggcggaggcgatgccgggcggagggcccacgagggctcagccttcccggtcagcggtggtgacggtatcccagagtgccagagaaccgttgcttttccgagttgctcttcttccaggctccgttggtggtcggcatggcccgtggaaatcaacgagaacttgcccgccagaaaaacatgaagaaaacccaggaaattagcaagggaaagaggaaagaggatagcttgactgcctctcagagaaagcagagggactctgagatcatgcaagaaaagcagaaggcagctaatgagaagaagtctatgcagacaagagaaaagtgatgactggctatttggaaaacctgggtgctactgccaactgggtgtatcataagctctaagatcaagattttgtagagtggacagtcattacatatgttataacttatcctttaaaaactattttaaactttatcctttcagctttacttagtgcgatgttttagaagcagtcttcaaagaataaaacactaaccatgcatgtgacatattggtgaacattatttttattattgaacattcatatataatttattaggtaatatgatcagataataggatctcttatataataacaaaatctttgtcatcaaaaaaaaaaaaaaaaacctcgactctag

SEQ ID NO: 218825 - DNA, 737 bp, Homo Sapiens
gcacgaggcccgagcccctctccggctcctcaacagagggctcgccgccgccatgtctaccgcccagtcactcaaatccgtggactacgaggtgttcggaagagtgcagggtgtttgcttcagaatgtatacagaagatgaagctaggaaaataggagtggttggctgggtgaagaataccagcaaaggcaccgtgacaggccaagtgcaggggccagaagacaaagtcaattccatgaagtcctggctgagcaaggttggaagccctagttctcgcattgaccgcacaaacttttctaatgaaaaaaccatctctaagcttgaatactctaattttagtattagatactaatagaagagaaaaattgtaacacactgaacaatagatactgtatgttcttaagactatgtatactagaataatagtagcagagtagggtgaaaaggaactttctgttctgaaagctaagcgactgtacgtgctactaaaaatgtctgacactgaaataattttactcaactatgttttcaacaagcaaaaatatagtattctaagattaaaatgtcattacaaaatatttagtgtgaacatttaatttaaacttgtctcatggaatctttaatttcaatgaacattacagcatatatattgttatttggcgagacatcaaataaagttaaccatttaaaaattaaaaaaaaaaaaaaaactcgactctagattgcggccgcggtca

SEQ ID NO: 218826 - DNA, 685 bp, Homo Sapiens
  misc_feature (587)..(587): n is a, c, g, or t
gcacgaggggaatttaccatctaattggcatccgtactgtgcattgatagtaatatccaaatcatcttattcttccatagaggaagcgctcatataaatcacattgctgagaactatataaaactacatagaggtaaatggtgcttattaaatatgagtatagtttgttacttgctggaagtcttctagttcatttggaccattttcttaccctgaggtgaactcaatatctgttggcaatgggtggttaaatgtgaagtgcccttgttcagtgtcccttgttcttgtacaggtattttcttagtttaaaaaaaaaattctagcatgccaacatttgtctttggcctattcctttttttctgaagtgtgtaacttctgattttttctttgctatgttgtaaataacagtagctaaattctctgttttactatctacttttcttttcttcccagatcatttcattctaaaattaaattgcttggttttctttagaggaaattgctacatggtatacttgtagtagtgattcatattaaaaaaatagctggtaaatctttctaggtagtaacttatccaaacaatactntgagtatcatattttgtgaatgacttgcttaaactgggaaactgaatattctttttaaatcatataattcctgtattaaatgtgaaacacacagtctc

SEQ ID NO: 218827 - DNA, 711 bp, Homo Sapiens
cacgaggcgggagccggcgggctacctgcgagtcgagttagcgttgtcgccgaaccgaagcctcgctcgccatgggggaggtggagatctcggccctggcctacgtgaagatgtgcctgcatgctgcccggtacccacacgccgcagtcaacgggctgtttttggcgccagcgccgcggtctggagaatgcctgtgcctcaccgactgtgtgcccctcttccacagccacctggccctgtccgtcatgttggaggtcgccctcaaccaggtggatgtgtggggagcacaggccggtctggtggtggctggttactaccatgccaatgcagctgtgaacgatcagagccctgggcccctggccttgaaaattgctgggcgaattgcagaattcttccctgatgcagtacttattatgttggataatcagaaactggtgcctcagcctcgtgtgcccccggtcatcgtcctggagaaccaaggtctccgctgggtccctaaggataagaacttagtgatgtggagggactgggaagagtcacggcagatggtgggagctctactggaagatcgggcccaccagcaccttgtggactttgactgccaccttgatgacatccggcaggactggaccaaccagcggctcaacactcaaatcacccagtgggtttggtcccactaatggaaatggaaatgcctgagccaggccagcg

SEQ ID NO: 218828 - DNA, 679 bp, Homo Sapiens
  misc_feature (597)..(597): n is a, c, g, or t
gcacgagggagactggggcctcgctcgctcccgacccggttgcaagtgttgcggtgggagaaagtcgcgtccgcatcggaggggaagcgccgtcatgcctaagtattatgaggacaagccgcagggcggcgcgtgcgcgggcctgaaggaggacctgggcgcgtgtctgctgcagtcggactgtgtggtccaggaaggaaaatcacctcggcagtgtttgaaggaaggatactgcaactctttgaagtacgcattttttgagtgtaaaagatcagtgttggataacagggcaagattcagaggaagaaaaggatattgatgcattatgttgaagccaacatggaaaacaacaaatattttccctggtcattaacacaaagaagccaaaacaggaaacatactttttactacatctgtttggttggaccagatttcccctccgtggaacactgaagaaagtggatgagttgttttcgaatatgtataaagtaaatgattctcttgatccaagttatttttagaagaaaaacctaattgaacaggtatgggttgggagcataataaatgtgttttgagaattgttctaaagcacagaanatggaaagactgttatttgcaaacttgactcttcaattgaattacccaattagtacaggccactgatttgactgacacagtc

SEQ ID NO: 218829 - DNA, 565 bp, Homo Sapiens
gcacgaggccggcggcggcatggcggccaggcagatctgggcacggacgggtgccgcgctctgcaggcaaccttccgccgccccgccgccagcacctctctgggtaagagctgggttccgacagcagctcagcttaaccctctgccctgctaacgagggaaactgcggcggctccgcgcccagcacgcccggtaggccggagagagcggcgaggccttcggtgagcgaagagttaaccgcggcggagcgacagatcgcggagctgcacgctgccgcctgcgcggctggccagctaaactatgtggatccagctactggctatgtggtgctcacacagattgcccacttgcaaagaggtgaatgttgtggctctgcgtgcagacattgtccatatggtcaagtcaatgttaaagatccatctaaaaagaagcaattcaattcatatttttatgtttgacaagaatttcatctctgttccctaactgtgcttgtattttttaaaaaataaagccccaattcagaattgctggattattagtacttgaacactagtttaatcctaaat

SEQ ID NO: 218830 - DNA, 728 bp, Homo Sapiens
  misc_feature (641)..(641): n is a, c, g, or t
tataggcggccgcgcaatcggcacgaggctccaggctttgctggcttgtgcggcatcctgctccgtctgcaggttgtgcttccggtgcggaggtcagggacaagatggtgccaccggtgcaggtctctccgctcatcaagctcggccgctactccgccctgttcctcggtgtggcctacggagccacgcgctacaattacctaaaacctcgggcagaagaggagaggaggatagcagcagaagagaagaagaagcaggatgaactgaaacggattgccagagaattggcagaagatgacagcatattaaagtgagtgaccctgcgacccactctttggaccagcagcggatgaataaagcttcctgtgttgtgtgaaaaaaaaaaaaaaaaaactcgactctagattgcggccgcggtcatagctgtttcctgaacagatcccgggtggcatccctgtgacccctccccagtgcctctcctggccctggaagttgccactccagtgcccaccagccttgtcctaataaaattaagttgcatcattttgtctgactaggtgtccttctataatattatggggtggaggggggtggtatggagcaaggggcaagttgggaagacaacctgtagggcctgcggngtctattgggaaccaagctggagtgcagtggcacaatcttggctcactgcaatctccgcctcctgggttcaagcgattctcctgcct

SEQ ID NO: 218831 - DNA, 661 bp, Homo Sapiens
cacgaggccggctcagctttccaatcagctgcggaaggagccacgctttcgggggttgcaagatggcggccaccagtggaactgatgagccggtttccggggagttggtgtctgtggcacatgcgctttctctcccagcagagtcgtatggcaacgatcctgacattgagatggcttgggccatgagagcaatgcagcatgctgaagtctattacaagctgatttcatcagttgacccacagttcctgaaactcaccaaagtagatgaccaaatttactctgagttccggaaaaattttgagacccttaggatagatgtgttggacccagaagaactcaagtcagaatcagccaaagagaagtggaggccattctgcttgaagtttaatgggattgttgaagacttcaactatggtactttgctgcgactagattgttctcagggctacactgaggaaaacaccatctttgcccccaggatacaattctttgccattgaaattgctcggaaccgggaaggctataacaaagctgtttatatcagtgttcaggacaaagaaggagagaaaggagtcaacaatggaggagaaaaaagagctgacagtggagaagaagagaacaccaagaatggaggagagaaaggagctgatagtgggagaga

SEQ ID NO: 218832 - DNA, 769 bp, Homo Sapiens
cacgaggcgcaaagaaataaatcatcattgatcaagatgtcttcagcacctgagcctccaacattcaaaaaggaaccacccaaagagaaagagtttcaaagcccagggctcagaggggtgcgcacaacaaccttatttcgtgctgtgaatccagagctcttcattaaacctaacaaacctgtaatggctttcggattggtaactctttcactttgcgtggcatatattggttatctacatgcaatacaagagaataaaaaggacctctatgaagctattgatagtgaggggcacagttatatgaggcggaaaacatccaaatgggattagtagtgctggttagtgcagatggacctttattaaaggttctgaaatcttcaaatgaaagaccttgtgagtgtacagtatcatgtttcttgttctagaacatgctaatgaagagagaagatagcagttgcaaccagacaactgtcgtaaattttgtcctttcacagctgcagccattatctcattctttttccacagagtgagcgtcataatatttttctttccttacctcttataaaagtgccatgagaatggaagttgtttttgttaattattaaattctgtataataaaagtacccatgctgttaaatttgcatgatgttttaaatattttaagatgaattatgccggtgcagctgtcgtgaaagtttccttgtgttttgctacttgcaaaggaaagttcatgttctccctggcatagaacctatatttttaaagaaa

SEQ ID NO: 218833 - DNA, 589 bp, Homo Sapiens
gcacgagggccgtggcaacgtcattgagaaaatgctcacagaccggcggtctacagaccttaatgagagccgccgtgcagacgtgcttgccttcccaagctctggcttcactgacttggcagagattgtgtcccggattgagccccccacgagctatgtctctgatggctgtgctgacggagaggagtcagattgtctgacagagtatgaggaggacgccggacccgactgctcgagggatgaaggggggtcccccgagggcgcaagccccagcactgcctccgagatggaggaggagaagtcgattctccggcaacgacgctgtctgccccaggagccgcccggctcagccacagatgcctgaggacctcgacaggggtcaccccctccctcccacccctggactgggctgggggtggccccgtgggggtagctcactccccctcctgctgctatgcctgtgacccccgcggcccacacactggactgacctgccctgagcggggatgcagtgttgcactgatgacttgaccagcccctcccccaataaactcgcctcttggaaaaaaaaaaaaaaaaaactcgactc

SEQ ID NO: 218834 - DNA, 624 bp, Homo Sapiens
gcacgagggagaaaccgaaactcccctagtcgcccctgccccccagcactcgcaccattgcctccagccccgagccaccattgtttccagtgccaaatctggcagccccgctagcctccgaggccgaaccgccaggggccccataagccccgaggaggctcgtcgggaaccgcttccttatcctctcggtatgcgcattgccaccaccctcgctgcagaggccgccgccctcccagcgcgccatcaccgcctcctctgcctcttcccctccctcagccccggcccctgcattgacttggctcgggctgcgcctcactgcgcctgccaactgtcacacgctctgaggctttcaacagcggggcgccagggacaaacaagccgcggcaagcgcaaacagcctgctcaaacagggaccggccagggtgttgtttgaccagcactggaattggaaactaggtttcgaagaagtcaaatcgaagtacaatattgtattttaaactgcctgttgttattacatccctcacaacgcacgctctacttgaaacttccagtggataccaactgcacttagaataaaaaatgaaactccttgcctaactctgggacctcatcagcacatactca

SEQ ID NO: 218835 - DNA, 603 bp, Homo Sapiens
gcacgaggcctcgtgccgaattcgggacgagggggatggatagtagcatccacctgagtagtctgatcagtcggcatgatgacgaagccacgagaacatcgacctcagaaggactggaggaaggtgaagtggagggagagacgctcctgatcgtcgaatccgaggatcaggcatcagtggacttatcgcacgaccagagtggggattccctcaacagtgatgaaggagacgtgtcttggatggaggagcagctgtcctacttctgtgacaagtgccaaaaatggataccagccagtcagctgagggaacagctcagttaccttaagggtgataatttttttaggtttacttgttcggattgctcagcagatggcaaggagcagtatgaaaggctgaagctgacatggcagcaagtcgtcatgttggcaatgtacaacttgtctctggaaggaagtggacgtcaaggttatttcaggtggaaagaagatatctgtgcttttattgagaaacattggacttttttactagggaataggaaaaagacgtctacctggtggagcaccgtggcaggttgcctcagcgtgggaagtcccatgtacttcc

SEQ ID NO: 218836 - DNA, 737 bp, Homo Sapiens
cacgaggctggcagcgcccaggcgtagagcagggaggaggcggcggccccgggctcgggctcagcgctgtgggttcggggatgccaacgcgcccgggaggctgaggtcggggacgtggggctgtgatgcccgaccgaggatggcgtggtgtcagagccattggccgccggtggtcatcaatcaatccagagctagggaagagggagagaaaaaagataggcgtccagcggagcccggggccgccagcgctagcgccagcagtgccagcaggagcggcggccgaggaggtgacggaggtggcaacgggggactgagcgaaaatgcacagcggtattgatgagtagatccttggattcagaggttggctgaaacgcaccatgcctgcttccatcttttgctctgtaaagttgtgaattgctcatgcctatagggaggaaggatggcacatgggattccttctcaaggcaaagttaccataacggtggatgagtacagctcaaaccccacccaggcattcacgcactacaacatcaaccagagcagattccagcctccacatgtacatatggtcgaccccatcccatatgacactccaaaaccagcgggccacacgcggtttgtctgcatctcagacacacactccagaacagatggtatccagatgccttatggggacatccttctcccacaggcgatttcaccgagctgggactgccctcagaggttaagaagtttaa

SEQ ID NO: 218837 - DNA, 725 bp, Homo Sapiens
  misc_feature (648)..(648): n is a, c, g, or t
gcacgagctgacagtcgggaatttctcttttctccactggtgcaaagagcggatttctccctgcttctcttctgtcacccccgctcctctcccccaggaggctccttgatttatggtagctttggacttgcttccccgtctgactgtccttgacttctagaatggaagaagctgagctggtgaagggaagactccaggccatcacagataaaagaaaaatacaggaagaaatctcacagaagcgtctgaaaatagaggaagacaaactaaagcaccagcatttgaagaaaaaggccttgagggagaaatggcttctagatggaatcagcagcggaaaagaacaggaagagatgaagaagcaaaatcaacaagaccagcaccagatccaggttctagaacaaagtatcctcaggcttgagaaagagatccaagatcttgaaaaagctgaactgcaaatctcaacgaaggaagaggccattttaaagaaactaaagtcaattgagcggacaacagaagacattataagatctgtgaaagtggaaagagaagaaagagcagaagagtcaattgaggacatctatgctaatatccctgaccttccaaagtcctacataccttctaggttaaggaaggagataaatgaagaanaagaagatgatgaacaaaataggaaagctttatatgccatggaaattaaagttgaaaaagacttgaagactggagaa

SEQ ID NO: 218838 - DNA, 657 bp, Homo Sapiens
gcacgaggctttagctctcatggattgggagctgggaaaggaatgagaagacagaagtcagagacaagaagaggctaacatgactgataccactataatttagtggatcagtgtctttcaatgatgtgactgtggacttcactcaggaggagtggcagcacctggatcatgctcagaagactctatatatggatgtgatgttggaaaactattgccacctcatctctgtggggtgtcacatgaccaaacctgatgtgatcctcaagttggaacgaggagaagagccatggacatcatttgcaggtcatacctgcttggaagaaaactggaaagctgaagactttttagtgaaattcaaggaacaccaagagaagtattctagatcagttgtaagcatcaaccacaaaaaactggtgaaggagaagagtaaaatatatgaaaagacatttactctaggcaaaaaccctgtgaattcaaaaaatctacctcctgaatatgatactcatggaaggattttgaaaaatgtttcagaattaatcatcagtaatctaaatcctgcaagaaagagacttagtgagtataatggatatgggaaatcactcctgagtactaaacaagagactactcatcctgaagtcaaatcccataatcaaagtg

SEQ ID NO: 218839 - DNA, 748 bp, Homo Sapiens
gcacgagggtgaaatggctgcgcaggtcggagcggtgcgcgtagtacgggcggtggcggcgcaggaggagccggacaaagaggggaaggagaaacctcatgctggggtctccccgcggggagttaaacggcagcgccgatctagcagtggggggtctcaggagaagcgggggcggccgagccaggagccccctctcgctccccctcaccggcggcgtcgcagccgccaacatcctgggccgctgccgccaacgaatgcagccccaactgtcccaggccctgttgagcctcttctcctgccgcctccgccgccaccttcgctggcacccgccgggcccgctgtcgctgcccctctcccggccccaagcacctcggccctcttcaccttctcgcctctgacggtgagcgcggccgggcccaagcataagggccacaaggagcggcacaagcaccatcaccaccgcggccccgatggtgatcccagctcctgcggaaccgatctcaagcacaaggacaagcaggaaaacggcgagaggactggaggggtgcctctgatcaaagcccccaagagagaaacaccagatgaaaatggtaaaacccagagagccgatgattttgtcttgaagaaaataaagaaaaaaaaaaaaaaaaactcgactctagattgcggccgcggtcatagctgtttcctgaacagatcccgggtggcatccctgtgacccctcccagtgcctctcctggccctggaa

SEQ ID NO: 218840 - DNA, 639 bp, Homo Sapiens
cacgagggttgagagagcgacgtggggacccagctcgccccagcttttgtcccaggttctctttgtctgatgctgagggcagggtggggtgtgggaccaccactcttgttggcctgtcaagtagaccctaggacagaaaatggaaagaaggaaatggctcggtgctctcaactagcagagagaattgaggagaggtaagggttccttctgcaggccagcctgggactccacagcgccagcaggagtgacttggccacaagacattccagccccagggactttgcaggcttcattccctgtctgtgtcttttccttctggtgtgttttacagacttctgatggggaagcttcaaacttgagcaggccagagatgtccttaccaaattggaaaggaaggtgaaactgttcctttctttagccaaagaacccttctcaaagacgcctccagaaatggacaaaatggccttcccttcgttcctttccaggcaataatgacatcattagtgatgcaattctatttgtctttctctttcctctctgtccttttttttaaaaaaaaaaatgcatttatttcaaaactgtgctattcttttaagaggagtggaggtgaccccttcgatgctgctgctatcgggagac

SEQ ID NO: 218841 - DNA, 617 bp, Homo Sapiens
gcacgaggaacaagtagtggtttcttgatttttagatatgtctgtagcctcttagcccttttgccgggaatcaactcattctgatgcctctgcacctcagttcctcttacaaaagcctccagatgatctaaatctagttagcaatgtcagcctgtggactgcagctgtttgggacattgtattcctttgtttgtctcttgttgttctgaaggattgtattgatcacaaagctatatgcataaagattctcattgttgtaactgttctgccattttctgagtgcaagcatggaacactgttgtgacagtcccttctcccttcttccttcttccttcacccccaaccccagaccccccttggtcacatgaaccagggaaacagcccaataagctctatctcccccagtctaatcgctgggttgcagggtggcctgtgacctgcccagcatttgcagactcgctggttcctgaatatgagtaagcacagagtttacctagagagtttacctaaaattaacctttagatctactatttatttttgtcttaataaaatgaacaataaatatagtttagctgcatggcattaaggattctgtatgaatagatgtatagttgct

SEQ ID NO: 218842 - DNA, 711 bp, Homo Sapiens
gcacgagggtctcccggctgccgctgctgccgccgccgcctcgggtcgtggagccaggagcgacgtcaccgccatggcaggcatcaaagctttgattagtttgtcctttggaggagcaatcggactgatgtttttgatgcttggatgtgcccttccaatatacaacaaatactggcccctctttgttctatttttttacatcctttcacctattccatactgcatagcaagaagattagtggatgatacagatgctatgagtaacgcttgtaaggaacttgccatctttcttacaacgggcattgtcgtgtcagcttttggactccctattgtatttgccagagcacatctgattgagtggggagcttgtgcacttgttctcacaggaaacacagtcatctttgcaactatactaggctttttcttggtctttggaagcaatgacgacttcagctggcagcagtggtgaaaagaaattactgaactattgtcaaatggacttcctgtcatttgttggccattcacgcacacaggagatggggcagttaatgctgaatggtatagcaagcctcttgggggtattttaggtgctcccttctcacttttattgtaagcatactattttcacagagacttgctgaaggattaaaaggattttctcttttggaaaagcttgactgatttcacacttatctatagtatgctttttgg

SEQ ID NO: 218843 - DNA, 580 bp, Homo Sapiens
gcacgaggggtgtccccgcgctgctggtcccggggtccctgaaccgcgggcggccccgctccctctgctggccatggcccccccgcccgcgtgccggtccccgatgtcaccgccgccgccgctgctgctgctgctgctgctgagtctggcgctgctgggcgcccgggcccgcgccgagcccgccgggagtgccgtccccgcgcagagccgcccatgcgtggactgccacgccttcgagttcatgcagcgcgccctgcaggacctgcggaagacagcctgcagcctggacgcgcggacggagaccctactgctgcaggcagagcgccgtgccctgtgtgcctgctggccagcggggcactgaggaccacgctgctccgtgtgaataaatgcccagtggcaaaaaaaaaaaaaaaaaactcgactctagattgcggccgcggtcatagctgtttcctgaacagatcccgggtggcatccctgtgacccctccccagtgcctctcctggccctggaagttgccactccagtgcccaccagccttgtcctaataaaattaagttgcatcattttgtctgactag

SEQ ID NO: 218844 - DNA, 629 bp, Homo Sapiens
gcacgaggaaatgtttgccagtcatcttctaagcttcatttacatgaaaataaattagactgcgacaatgataacaaactaggcattggacatatttttagtacagataacaactttcataatgatgcaagcactaagaaagcaaggaacccagaagtggttacggttgaaatgaaagaagaccaagagtttgatttgcaaatgacaaaaaatatgaaccaaaatagtgacagtggcagtacaaataactataaaagcctgaaacctaaattagaaaatctgagttctttaccaccagattctgacagaacatcagaagtatatctacatgaagaattacagcaagacatgcaaaagtttaagaatgaggtcaacacattagaagaagagttcctggctttgaagaaagaaaatgttcaacttcataaagaggttgaagaagaaatggagaagcacagaagtaatagcacagaattatcaggaaccctaactgatggtactactgttggcaatgatgatgatggactaaatcagcagattcctaggaaggaaaatgaagagcatgacaggtaagcctatagcagcgtttaacaggagacaattggtcaagcgtggtggctcgcgcctgt

SEQ ID NO: 218845 - DNA, 724 bp, Homo Sapiens
gcacgagggcacgagggtccggccccgtccgcacaaacgctcctgtcggcggcgcccgggagcggctcggctgcccgatgcttccgccccggctgccgcgggccgggctgtacgcttagtgcccggctcaggccccctgaagcgcccgcgggggtgagagcggcctccggccccgcggagacggagcggcttgaggacgaggcggcggccgcggggaggaggatgggggctaaccagttagtggtgctcaacgtgtacgacatgtattggatgaacgaatatacctcatccattggaattggagtttttcattcaggaattgaagtctatggcagagaatttgcttatggtggccatccttaccccttttctggaatatttgaaatttccccaggaaatgcttctgaactaggagaaacatttaaatttaaagaagctgttgttttagggagcacggacttcctagaagatgatatagaaaaaattgtagaagaactgggaaaagaatacaaaggcaatgcttatcatttaatgcataaaaactgcaatcatttttcttcagctttatcagagattctttgtgggaaagagattcctcgctggatcaatcgacttgcctacttcagctcctgtataccctttctacagagttgcctcccgaaggagtggctcacgcccgcagccctgcagtctagtgtcagccaagaactccaggatgaactgg

SEQ ID NO: 218846 - DNA, 876 bp, Homo Sapiens
  misc_feature (506)..(506): n is a, c, g, or t
  misc_feature (627)..(627): n is a, c, g, or t
  misc_feature (639)..(639): n is a, c, g, or t
  misc_feature (648)..(648): n is a, c, g, or t
  misc_feature (675)..(675): n is a, c, g, or t
  misc_feature (704)..(704): n is a, c, g, or t
  misc_feature (715)..(715): n is a, c, g, or t
  misc_feature (717)..(717): n is a, c, g, or t
  misc_feature (725)..(725): n is a, c, g, or t
  misc_feature (727)..(727): n is a, c, g, or t
  misc_feature (773)..(773): n is a, c, g, or t
  misc_feature (784)..(784): n is a, c, g, or t
  misc_feature (804)..(807): n is a, c, g, or t
  misc_feature (809)..(810): n is a, c, g, or t
  misc_feature (824)..(832): n is a, c, g, or t
  misc_feature (841)..(841): n is a, c, g, or t
  misc_feature (844)..(844): n is a, c, g, or t
gcgaattcggcacgaggcctcgtgccgaattcggcacgaggccaaggaaagctttccacgttgacagacaactgctgcgttttgagactctttctttgacttggtgtgtgccctcttcctgattctggagaaaaatgccggtccggaagcaagatacccagagagcattgcaccttttggaggaatatcgttcaaaactaagccaaactgaagacagacagctcagaagttccatagaacgggttattaacatatttcagagcaacctctttcaggctttaatagatattcaagaattttatgaagtgaccttactggataatccaaaatgtatagatcgttcaaagccgtctgaaccaattcaacctgtgaatacttgggagatttccagccttccaagctctactgtgacttcagagacactgccaagcagccttagccctagtgtagaggtgagataaaaaatgtgttctgaagctgttttttggtgatcaatttatttatgntactatggttctttattttattaaaataatattttatacaagtggattttggtatggaagtataatttataatagaataaagagaatgggggtaaaaatatttttgaaaagcaaagctcanattctctggtgnccctgtttnaaatgttatgaaaggtttgaagtctgnaatacttgatttaaactattaaaaaattntttgctgaaananctcaccangnttcttttgggggggaataaaagggaaagggacttgaaaaaaagggnttggcctgggntttcttccaaaaagaaaaannnntnngggggggggggggnnnnnnnnnccccccttnccncagggatttttttttttggggggggggggggg

SEQ ID NO: 218847 - DNA, 642 bp, Homo Sapiens
gcacgaggctcagtcaggacacagcatggacatgagggtccccgctcagctcctggggctcctgctactctggctccgaggtgccagatgtgacatccagatgacccagtctccatcctccctgtctgcatctgtaggagacagagtcaccatcacttgccgggcaagtcagagcattagcagctatttaaattggtatcagcagaaaccagggaaagcccctaagctcctgatctatgctgcatccagtttgcaaagtggggtcccatcaaggttcagtggcagtggatctgggacagatttcactctcaccatcagcagtctgcaacctgaagattttgcaacttactactgtcaacagagttacagtacccctccggtgttcggccaagggaccaaggtggaaatcaaacgaactgtggctgcaccatctgtcttcatcttcccgccatctgatgagcagttgaaatctggaactgcctctgttgtgtgcctgctgaataacttctatcccagagaggccaaagtacagtggaaggtggataacgccctccaatcgggtaactcccaggagagtgtcacagagcaggacagcaaggacagcacctacagcctcagcagcaccctgacgctgagcaaagc

SEQ ID NO: 218848 - DNA, 601 bp, Homo Sapiens
gcacgaggctcagtgtagacccttgtctgagaccgagctatgtggggcgacctctggctcctcccgcctgcctctgccaatccgggcactgggacagaggctgagtttgagaaagctgcagaggaggttaggcaccttaagaccaagccatcggatgaggagatgctgttcatctatggccactacaaacaagcaactgtgggcgacataaatacagaacggcccgggatgttggacttcacgggcaaggccaagtgggatgcctggaatgagctgaaagggacttccaaggaagatgccatgaaagcttacatcaacaaagtagaagagctaaagaaaaaatacgggatatgagagactggatttggttactgtgccatgtgtttatcctaaactgagacaatgccttgtttttttctaataccgtggatggtgggaattcgggaaaataaccagttaaaccagctactcaaggctgctcaccatacggctctaacagattaggggctaaaacgattactgactttccttgagtagtttttatctgaaatcaattaaaagtgtatttgttacttcaaaaaaaaaaaaaaaaactcgactc

SEQ ID NO: 218849 - DNA, 705 bp, Homo Sapiens
  misc_feature (573)..(573): n is a, c, g, or t
  misc_feature (648)..(648): n is a, c, g, or t
gcacgagggttcgtgaacatgtaaagctactgttaaatgtaactccgactgtaagaccagatgcagatcaaatgacaaagattcccttctttgatgatgttggtgcagtaacactgcaatattttgataccttattccaaagagataatcttcagaaatcacagtttttcaaaggactgccaaaggttctaccaaaactgcccaagcgtgtcattgtgcagagaattttgccttgtttgacttcagaatttgtaaaccctgacatggtaccttttgttttgcccaatgttctacttattgctgaggaatgcaccaaagaagaatatgtcaaattaattcttcctgaacttggccctgtgtttaagcagcaggagccaatccagattttgttaattttcctacaaaaaatggatttgctactaaccaaaacccctcctgatgagataaagaacagtgttctacccatggtttacagagcactagaagctccttccattcagatccaggagctctgtctaaacatcattccaacctttgcaaatcttatagactacccatccatgaaaaacgctntgataccaagaattaaaaatgcttgtctacaaacatcttcccttgcggttcgtgtaaattcattagtgtgcttangaaagattttggaatacttggataagtggtttgtacttgatgatatcctacccttct

SEQ ID NO: 218850 - DNA, 517 bp, Homo Sapiens
gcacgagggggttaggaccccagtagggaaccatggaaaccccagcgcagcttctcttcctcctgctactctggctcccagataccaccggagaaattgtgttgacgcagtctccaggcaccctgtctttgtctccaggggaaagagccaccctctcctgcagggccagtcagagtgttagcagcagctacttagcctggtaccagcagaaacctggccaggctcccaggctcctcatctatggtgcatccagcagggccactggcatcccagacaggttcagtggcagtgggtctgggacagacttcactctcaccatcagcagactggagcctgaagattttgcagtgtattactgtcagcagtatggtagctcaccattcactttcggccctgggaccaaagtggatatcaaacgaactgtggctgcaccatctgtcttcatcttcccgccatctgatgagcagttgaaatctggaactgcctctgttgtgtgcctgctgaataacttctatcc

SEQ ID NO: 218851 - DNA, 695 bp, Homo Sapiens
gcacgaggcgaggttttcgggcttgtaccgcttggcggtgcggcctggtgtcggcttgcaggttctttctgtgtttgttctctgccctgccaaggccgtagagctggtgcgtgcgggtagcggggctctccgaggagccgcacgccggcggcaccatggtccacctcactactctcctctgcaaggcctaccgtgggggccacttaaccatccgccttgccctgggtggctgcaccaatcggccgttctaccgcattgtggctgctcacaacaagtgtcccagggatggccgtttcgtagagcagctgggctcctatgatccattgcccaacagtcatggagaaaaactcgttgccctcaacctagacaggatccgtcattggattggctgcggggcccacctctctaagcctatggaaaagcttctgggtcttgctggctttttccctctgcatcctatgatgatcacaaatgctgagagactgcgaaggaaacgggcacgtgaagtcctgttagcttctcagaaaacagatgcagaagctacagatacagaggctacagaaacataaatgagctgactttagtgagcatagcagtgggaacaaggtcaaggtccttttgaaacactgcagcgatcttaattttgttagatttggagttcaataaatggagtatcctgagttgcccttgctctt

SEQ ID NO: 218852 - DNA, 457 bp, Homo Sapiens
gcacgaggcctgggattcccagctgtttctgcttgctgatcaggactgcacacagagaactcaccatggagtttgggctgagctgggttttccttgttgctattttaaaaggtgtccagtgtgaggtgcagctggtggagtccgggggaggcttagttcagcctggggggtccctgagactctcctgtgcagcctctggattcaccttcagtagctactggatgcactgggtccgccaagctccagggaaggggctggtgtgggtctcacgtattaatagtgatgggagtagcacaagctacgcggactccgtgaagggccgattcaccatctccagagacaacgccaagaacacgctgtatctgcaaatgaacagtctgagagccgaggacacggctgtgtattactgtgcaagagattttaaagtagtgggctccgaagcttttgatatctgggg

SEQ ID NO: 218853 - DNA, 730 bp, Homo Sapiens
  misc_feature (665)..(665): n is a, c, g, or t
gcacgaggccgcgacgagctatccgggaaagggccgaatgcgatcaaacctaatccgcgagacttgctaaggttctgtgctacaaattgatgtttagataaacttcagtgaaatgactcttcaggaattggtgcataaggctgcctcctgttatatggacagagtagctgtatgttttgatgaatgcaacaaccagcttccagtttactacacctacaagactgtggttaatgctgcttctgaattatcaaattttctgctgttacactgtgactttcaaggaattcgggaaattggtctctactgccaacctgggatagacttaccctcttggattttaggaattctccaagtcccggctgcttatgtacctatcgagccagattcaccaccgtcattatcaactcattttatgaaaaaatgtaatctaaagtatatccttgttgaaaaaaaacaaattaataaatttaaatcttttcatgaaacattattgaactatgatacatttacagtggaacataatgacctagtgctcttcagacttcactggaaaaatactgaggtgaacttgatgctaaatgatggaaaagagaaatatgaaaaagaaaaaataaaaagcataagttctgagcatgtcaatgaagaaaaagcagaagaacacatgngatctgaggctaaagcattgcttagcctatgttctacatacatcagggactacagggataccgaa

SEQ ID NO: 218854 - DNA, 711 bp, Homo Sapiens
gcacgaggctggctcccgtacggtggacggcgacgctgggtgacccggggtgcaagaattcaggggttgggaaggtgtgagccgcaaacccagcggagggcgggaagaaggaggaggcctctagggtggtcgggggactgggggccccgccggcagaggtccctcggcctcctgactgactgactgcggccgcctccggccaggacgctgggagctgcctgcgggaaggtgcggggagcggagccatggcctccggtgcgtataacccgtatatagagataattgaacaacccaggcagaggggaatgcgttttagatacaaatgtgaagggcgatcagcaggcagcattccaggggagcacagcacagacaacaaccgaacatacccttctatccagattatgaactattatggaaaaggaaaagtgagaattacattagtaacaaagaatgacccatataaacctcatcctcatgatttagttggaaaagactgcagagacggctactatgaagcagaatttggacaagaacgcagacctttgtttttccaaaatttgggtattcgatgtgtgaagaaaaaagaagtaaaagaagctattattacaagaataaaggcaggaatcaatccattcaatgtccctgaaaaacagctgaatgatattgaagattgtgacctcaatgtggtgagactgtgttttcaagtttttc

SEQ ID NO: 218855 - DNA, 583 bp, Homo Sapiens
cacgagggttggatttcattcatatgtacaacaaactactttcttcttcacttcaagattcggtacaactgttcctgaattccaactctccatacatcccaatgtcagggtccctgtagctcggagcccttatccaggtagatgaactgctgcccagtgaacactatgtacaaagcaatttgagcaccattctcttttctggcagtgaggtaaaatcaggtctttttggaaggggagaagccacattgcatctctgctacacacaagattactctgtcattgcctttgagtctttcacgctcccttcttctgaagcatcagtttttatggaaacttatcacacctgtcttgtgggcacatcttgctccatccctcctctcttcatattgtccgttttccggtattgagttagggaaagtatgcaggtattcctgtcattcctgactgaggctgttgtatctgtcaaaagagaggagaggtagggggcattctgaaaaatgatcactcatggcttgcaggagcaagagccagacaggactttgcaactggcagctttctgagtgcataagacctccacctctag

SEQ ID NO: 218856 - DNA, 495 bp, Homo Sapiens
gcacgaggggcaggcccgggtcaggggcctcgagatcgggcttgggcccagagcatgttccagatcccagagtttgagccgagtgagcaggaagactccagctctgcagagaggggcctgggccccagccccgcaggggacgggccctcaggctccggcaagcatcatcgccaggccccaggcctcctgtgggacgccagtcaccagcaggagcagccaaccagcagcagccatcatggaggcgctggggctgtggagatccggagtcgccacagctcctaccccgcggggacggaggacgacgaagggatgggggaggagcccagcccctttcggggccgctcgcgctcggcgccccccaacctctgggcagcacagcgctatggccgcgagctccggaggatgagtgacgagtttgtggactcctttaagaagggacttcctcgcccgaagagcgcgggcacagcaacgcagatgcggcaaagctccagctgg

SEQ ID NO: 218857 - DNA, 550 bp, Homo Sapiens
gcacgaggcagcagagcacacaagcttctaggacaagagccaggaagaaaccaccggaaggaaccatctcactgtgtgtaaacatgacttccaagctggccgtggctctcttggcagccttcctgatttctgcagctctgtgtgaaggtgcagttttgccaaggagtgctaaagaacttagatgtcagtgcataaagacatactccaaacctttccaccccaaatttatcaaagaactgagagtgattgagagtggaccacactgcgccaacacagaaattattgtaaagctttctgatggaagagagctctgtctggaccccaaggaaaactgggtgcagagggttgtggagaagtttttgaagagggctgagaattcataaaaaaattcattctctgtggtatccaagaatcagtgaagatgccagtgaaacttcaagcaaatctacttcaacacttcatgtattgtgtgggtctgttgtagggttgccagatgcaatacaagattcctggttaaatttgaatttcagtaaacaatgaatagtttttc

SEQ ID NO: 218858 - DNA, 610 bp, Homo Sapiens
gcacgaggaggcatctcagcggctgccccaccatggctacctgggccctcctgctccttgcagccatgctcctgggcaacccaggtctggtcttctctcgtctgagccctgagtactacgacctggcaagagcccacctgcgtgatgaggagaaatcctgcccgtgcctggcccaggagggcccccagggtgacctgttgaccaaaacacaggagctgggccgtgactacaggacctgtctgacgatagtccaaaaactgaagaagatggtggataagcccacccagagaagtgtttccaatgctgcgacccgggtgtgtaggacggggaggtcacgatggcgcgacgtctgcagaaatttcatgaggaggtatcagtctagagttacccagggcctcgtggccggagaaactgcccagcagatctgtgaggacctcaggttgtgtataccttctacaggtcccctctgagccctctcaccttgtcctgtggaagaagcacaggctcctgtcctcagatcccgggaacctcagcaacctctgccggctcctcgcttcctcgatccagaatccactctccagtctccctcccctgactccctctgctgtcc

SEQ ID NO: 218859 - DNA, 619 bp, Homo Sapiens
gcacgaggggaacagtggctgccaccgtttgtgttttcccgagtttgaattcttgcaggtgaccaagatggagttttctggaagaaagtggaggaagctgaggttggcaggtgaccagaggaatgcttcctaccctcattgccttcagttttacttgcagccaccttctgaaaacatatctttaatagaatttgaaaacttggctattgatagagttaaattgttaaaatcagttgaaaatcttggagtgagctatgtgaaaggaactgaacaataccagagtaagttggagagtgagcttcggaagctcaagttttcctacagagaaaacttagaagatgaatatgaaccacgaagaagagatcatatttctcattttattttgcggcttgcttattgccagtctgaagaacttagacgctggttcattcaacaagaaatggatctccttcgatttagatttagtattttacccaaggataaaattcaggatttcttaaaggatagccaattgcagtttgaggctataagtgatgaagagaagactcttcgagaacaggagattgttgcctcatcaccaagtttaagtggacttaagttggggttcgagtccatttat

SEQ ID NO: 218860 - DNA, 700 bp, Homo Sapiens
gcacgaggaaaatcaaaaaaaaaaaaaaaaaaaagcggcaggtggcgggtgcctgtaatctcagcctcctgagtatcggattacaggcgtgagccaccgagcccagccccttcctccatttctttactcccaccctgctcctggtttctagggaagggaaaccaggaagttcacttggaagacgtttcctaggttttctcatcagatgaagccatgggaacgcccaggaagtccatactctcaaacccctttctgcccactcaccttcaggtccacagcactttccagcgtcatctgaaatagcaaaggtgatgtgcagcatcccagtgatgtgttcctgtgttatgagaaggagtctggggttctggatgcctcaggaacagaatatggaccttaaagaccaggctgagagcctggcctggcacgcagcctgcccgccccccccgcccttcctgtccaccgcgggctctctgcagcagggcttgccgaagagactgctcccgacctctcatgtcatcctgcatccagagaacggcagcatatcaagccgttaaccctgattcactcggttcccttgaaaccaggcctcagttaaccatgaccacagctacaggcaaaccgctgctgttgctgcctgcttttgctgaagatgatatcttgccaggcacggcggctcatgcctgtagtcgcaacactttgg

SEQ ID NO: 218861 - DNA, 575 bp, Homo Sapiens
cacgagggtgagccgccagcatggatgacatctacaaggctgcggtagagcagctgacagaagagcagaaaaatgagttcaaggcagccttcgacatcttcgtgctgggcgctgaggatggctgcatcagcaccaaggagctgggcaaggtgatgaggatgctgggccagaaccccacccctgaggagctgcaggagatgatcgatgaggtggacgaggacggcagcggcacggtggactttgatgagttcctggtcatgatggttcggtgcatgaaggacgacagcaaagggaaatctgaggaggagctgtctgacctcttccgcatgtttgacaaaaatgctgatggctacatcgacctggatgagctgaagataatgctgcaggctacaggcgagaccatcacggaggacgacatcgaggagctcatgaaggacggagacaagaacaacgacggccgcatcgactatgatgagttcctggagttcatgaagggtgtggagtagatgctgaccttcacccagagctgcctatgcccagcctccaactccagctgagtcctgggtggggggagg

SEQ ID NO: 218862 - DNA, 776 bp, Homo Sapiens
gcacgaggccgccccccaaaagaagcggagatttaacggggacgtgcggccagagctggggaaatgggcccgcgagccaggccggcgcttctcctcctgatgcttttgcagaccgcggtcctgcaggggcgcttgctgcgttcacactctctgcactacctcttcatgggtgcctcagagcaggaccttggtctttccttgtttgaagctttgggctacgtggatgaccagctgttcgtgttctatgatcatgagagtcgccgtgtggagccccgaactccatgggtttccagtagaatttcaagccagatgtggctgcagctgagtcagagtctgaaagggtgggatcacatgttcactgttgacttctggactattatggaaaatcacaaccacagcaaggagtcccacaccctgcaggtcatcctgggctgtgaaatgcaagaagacaacagtactgagggctactggaagtacgggtatgatgggcaggaccaccttgaattctgccctgacacactggattggagagcagcagaacccagggcctggcccaccaagctggagtgggaaaggcacaagattcgggccaggcagaacagggcctacctggagagggactgccctgcacagctgcagcagttgctggagctggggagaggtgttttggaccaacaagtgcctcctttggtgaaagtgacacatcatgtgacctcttcagtgaccactctacggtgtcgggccctgaactactacccccagacatcaccatgaag

SEQ ID NO: 218863 - DNA, 644 bp, Homo Sapiens
gcacgagggacacagcatggacatgagggtccctgctcagctcctggggctcctgctgctctggctctcaggtgccagatgtgacatccagatgacccagtctccatcctccctgtctgcatctgtaggagacagagtcaccatcacttgccaggcgagtcaggacattagcaactatttaaattggtatcagcagaaaccagggaaagcccctaagctcctgatctacgatgcaatcaatttggaaacaggggtcccatcagggttcagtggaagtggatctgggacaaattttactttcaccatcagcagcctgcagcctgaagatattgcaacatattactgtcaacagtatgattatctcctcccattcactttcggccctgggaccaaagtggatatcaaacgaactgtggctgcaccatctgtcttcatcttcccgccatctgatgagcagttgaaatctggaactgcctctgttgtgtgcctgctgaataacttctatcccagagaggccaaagtacagtggaaggtggataacgccctccaatcgggtaactcccaggagagtgtcacagagcaggacagcaaggacagcacctacagcctcagcagcaccctgacgctgagcaaagcagactacg

SEQ ID NO: 218864 - DNA, 640 bp, Homo Sapiens
  misc_feature (577)..(577): n is a, c, g, or t
cacgaggctaggatctccagagtggacaggaatctcacttggagggaccatggagcagtatacagcaaacagcaatagttcgacagagcagattgttgtccaggcaggacagattcagcagcaggtccaagggcagccattaatggtgcaggtcagtggaggccagctaatcacatcaactggccaacccatcatggtccaggctgtccctggtggacaaggtcaaaccatcatgcaagtacctgtttctggaacacagggtttgcagcaaatacagttggtcccacctggacagatccagatccagggtggacaggctgtgcaggtgcagggccagcagggccagacccagcagatcatcatccagcagccccagacggctgtcactgctggccagactcagacacagcagcagattgctgtccagggacagcaagtggcacagactgctgaagggcagaccatcgtctatcaaccagttaatgcagatggcaccattctccagcaagttacagtccctgtttcaggcatgatcactatcccagcagccagtttggcaggagcacagattgttcanacaggagccaataccaacacaaccagcagtgggcaagggactgtcactgtgacactaccagtg

SEQ ID NO: 218865 - DNA, 656 bp, Homo Sapiens
gcacgaggccgcggcggcagcaggccaccatggcggagctgcaggaggtgcagatcacagaggagaagccactgttgccaggacagacgcctgaggcggccaagactcactctgtggagacaccatacggctctgtcactttcactgtctatggcacccccaaacccaaacgcccagcgatccttacctaccacgatgtgggactcaactataaatcttgcttccagccactgtttcagttcgaggacatgcaggaaatcattcagaactttgtgcgggttcatgtggatgcccctggaatggaagagggagcccctgtgttccctttgggatatcagtacccatctctggaccagcttgcagacatgatcccttgcgtcctgcagtacctaaatttctctacaataattggagttggtgttggagctggagcctacatcctggcgagatatgctcttaaccacccggacactgttgaaggtcttgtcctcatcaacattgatcccaatgccaagggttggatggattgggcagcccacaagctaacaggcctcacctcttccattccggagatgatccttggacatcttttcagccaggaagagctctctggaaattctgagttgatacaaaagtacagaaatatcattacacat

SEQ ID NO: 218866 - DNA, 589 bp, Homo Sapiens
gcaccgggggaggcgccgggagcccgttcggttgcgggtgtctctggccctgcggtcagccctgggaacgtcccggagagctagattcctagaggcccgattccgctagcccggaacagacaaagccagcgctcccgcccgctccccgacttaggatccgatgccggcagcgtcctggggcccccgtagcggggctggaccatgagcctgctggacggcctcgcttcctcgccgcgggctccgctgcagtccagcaaggccaggatgaaaaagctcccgaagaagagccagaatgagaagtaccggctgaagtacctgcggctgcgcaaagcggccaaggccacggtgtttgtgagtctgacccacgttcagccggtcccctcctggagactccctcacaaaatctttccccaagctgttcccccttcccagtgtgacagtattaatacagtgttggcttttccgtatacgttactacttgttagccttgtgtccttggacaaattacgtaatttctctgtgtcctcatctgtaaatgagctagtaactgtcttgcagaataatgaatattaaatgagtaaagaaaagt

SEQ ID NO: 218867 - DNA, 468 bp, Homo Sapiens
gcacgaggggtccgtctcctagtgtccggaatcggctgtcagcctccctggctgttagtaccttctttcccggagtcctggtccacgagttggatttactgctgtcgcgggtgggcctcacgccattccctgtccctcggccccctgagtgagtccggtctcccggcgaaagtgagcgaggtttgcccggagcgcgcacgaggggaaaatgcctaaaaaaaagactggtgcgaggaagaaggctgagaaccgccgagaacgtgaaaaacaactaagagcatcaagaagcactatagatttagctaaacatccatgtaatgcctcaatggaatgtgacaagtgtcagaggcggcagaagaatagagcattttgctacttttgtaattctgtacagaagttaccaatttgtgcacagtgtgggaaaacaaagcgcatgatgaagccttcagactgtgtcataaagcatgc

SEQ ID NO: 218868 - DNA, 752 bp, Homo Sapiens
  misc_feature (31)..(31): n is a, c, g, or t
cacgaggccgtccttaagcaggagtaccctngaggtgtcgatgtggtctatgaatctgttgggggagccatgtttgacttggctgtagacgccctggctacgaaagggcgcttgatagtaatagggtttatctctggctaccaaactcctactggcctttcgcctgtgaaagcaggaacattgccagccaaactgctcaagaaatctgccagcgtacagggcttcttcctgaaccattacctttctaagtatcaagcagccatgagccacttgctcgagatgtgtgtgagcggagacctggtttgtgaggtggaccttggagatctgtctccagagggcaggtttactggcctggagtccatattccgtgctgtcaattatatgtacatgggaaaaaacactggaaaaattgtagttgaattacctcactctgtcaacagtaagctgtaaaaacagaacaatgacataaatcaagggagaaagaaaatgggcactttatgtctcagaattactcaaatcaatttatttttagttggtaatggatataatatttcttaaaacaaaagtaaggtgttaatgaataggtctctccttctcctcctcctcctcctcttcccttgggggaaaaaaaaaaatgtgctaataaaacttccctccatggctaagagggaaaacgcttacattcaattctttagtcatgggatggtctcgtccagatgttattgttccagggaactaaattcattcctgat

SEQ ID NO: 218869 - DNA, 436 bp, Homo Sapiens
gcacgaggcccaggcagtggaaccttcgggctcctgagcttcaggatggttcgtactaagacatggaccctgaagaagcactttgttggctatcctactaatagtgactttgagttgaagacatctgagctcccacccttaaaaaatggagaggtcctgcttgaagctttgttcctcaccgtggatccctacatgagagtggcagccaaaagattgaaggaaggtgatacaatgatggggcagcaagtggccaagtaattatttccatttgtcccagtgcttggaaaatatgtctcctctttacctcctgctgggtcctgtctctgtccattgctcctacaatttcttcagcctatgttgttgactcactgtgtgatcttggaatcaacttgggaaattctgtctccttcctaactagctggaaaggagggaagga

SEQ ID NO: 218870 - DNA, 670 bp, Homo Sapiens
gcacgaggcgtcttcactgctctgtgccgtcagctcctagaggcccagcctctgtggccctgtgacctgcaggtattaggagggtcacagctaggacgccgggaccccctggaagcctagaaatgggaccattgcaatttagagatgtggccatagaattctctctggaggagtggcattgcctggacgctgcacagcggaatctatatagggatgtgatgttagagaactacagaaacctgatcttccttggtattgttgtctctaaaccaaacctgatcacctgtctggagcaaggaaaaaaacctttaactatgaagaggcatgagatgattgccaaacccccagttatgtattctcattttgcccaagacctttggtcagagcagagcataaaagattctttccaaaaagtgatactaagaagatatgaaaaatgtagacatgacaatttacagttaaaaaaaggctgtgaaagtgtagatgagtgtccagtgcacaaaagaggttataatggacttaaacaatgtttggcaactacccagagaaaaatatttcaatgtgatgaatatgtgaaattcttgcataaatttttaaattcaaacaaacataagataagagatactggaaaaaaatcttttaaatgtatagaatatgggaaaacttttaa

SEQ ID NO: 218871 - DNA, 766 bp, Homo Sapiens
cacgaggcggcctcggtccggttgactttgcggagccatggagggcggcttcggctccgatttcgggggctccggcagcgggaagctggacccagggctcataatggagcaggtgaaagtgcagatcgccgtggccaacgcgcaggagctgctgcagaggatgacggacaagtgtttccggaagtgtatagggaaacctgggggctccctggacaactccgagcagaagtgcatcgccatgtgcatggaccgctacatggacgcctggaacaccgtgtctcgcgcctacaactcgcggctgcagcgggaacgagccaacatgtgaccggcgagcgcgggccaccccaccctgttcatttccataaacgtgctttgagaggcggggtccgcatgtacgtactgcctgcccggggcttaggagggtggcaccggtgctgggacacacgggactgtgtcctcgccaccccccgccctgccccctgccagccagtgcagcttggatctcgggggtgtggggccctgtgccttcctgaagtgctggcagcccagtggcacctccttcaggcctttggggtattcccctagtgtgcccaagtcagcctcatattctgggcggacagcttgtctggacttcggagttgggggtggtcagacaccacaggagctgtcacctcctgcggatgggcaaataaattggtggaggacggaaaaaaaaaaaaaaaactcgactctagattgcggccgcggtcatagctgtttcctgaac

SEQ ID NO: 218872 - DNA, 604 bp, Homo Sapiens
gcacgagggcggggtgacacggggcttcgccttgggaaggggtcgagggaagcagttagacggctgccgggcggcggctgccgcgcggcacacaatatttatttaattgcccaactaccactgatgaagatatattggagtgactgctgaaattgcctttttgtttttaaccagaggacagtccatttgtttcacttctttttgctttccttactgctatgagctttactgaacggctgaaaaacttggaaaataaaatggacatgctgtagtcttgaacataatttttttaaggaaaacttaaagtgccagagtgaaagccagaatggcatccagagagaggctctttgaactttggatgctttattgtacaaagaaagatccagattacctgaagctgtggttggacacttttgtttctagctatgaacaatttttagacgttgactttgaaaagctgcctaccagggtagatgatatgcctccaggaatatctctgcttcctgataatattctgcaggttctgaggatccagcttctacagtgtgttcagaaaatggcagatgggttagaggaacaacagccagccttgtcaattttgctt

SEQ ID NO: 218873 - DNA, 695 bp, Homo Sapiens
  misc_feature (632)..(632): n is a, c, g, or t
gcacgagggccggccgagaggaaagctggaggcgcgggtggggaacatgtctgagtcggagctcggcaggaagtgggaccggtgtctggcggatgcggtcgtgaagataggtactggttttggattaggaattgttttctcacttaccttctttaaaagaagaatgtggccattagccttcggttctggcatgggattaggaatggcttattccaactgtcagcatgatttccaggctccatatcttctacatggaaaatatgtcaaagagcaggagcagtgacttcacctgagaacatcccagcgggaggacaagagaaatcatgtttattcctcaggaatactgaagtgccctggagtaagctgccattcttctgtaacaatgttatcagtaatgctttaaactccagcacctggttatgcatttgaaaccaagtctgtttcttgttttgtattttctctctggaagttgtaaggaggtggtcttaaataaattaaacaaaaataggaagtcaaaaaaaaaaaaaaaaaactcgactctagattgcggccgcggtcatagctgtttcctgaacagatcccgggtggcatccctgtgacccctccccagtgcctctcctggccctggaagntgccactccagtgcccaccagccttgtcctaataaaattaagttgcatcattttgtctgacta

SEQ ID NO: 218874 - DNA, 742 bp, Homo Sapiens
cacgagcgaaaacaccttagtttgcaccgagagaccatttgcagcggaacccgaagtttgtaagaggaagagagcgcgcggcgagcgagcgagcgggccgggggcagcggcagcggcgccggggaccatggtgctgccggcgcctcctccgcgggcgtgaaggcggcgctcctactccctccccggactccgcggtgtcccagaagcttttgttgacaattccagtttccgaacaaaacatttcggcaatggtgagggcttcgatcccttctctgatttgctgtcagccatgaacggatggatgtgatgcctgctagccaaaaggcttccctctgtgtgttgcagtcctgtggcattatgcatgccccctcccagtgaccccaggctttttatggctgtgagacacgttaaaatttcaggggtaagacgtgaccttttgaggtgactataactgaagattgctttacagaagccaaaaaaggtttttgagtcatgatgcaagaatctgggactgagacaaaaagtaacggttcagccatccagaatgggtcgggcggcagcaaccacttactagagtgcggcggtcttcgggaggggcggtccaacggagagacgccggccgtggacatcggggcagctgacctcgcccacgcccagcagcagcagcaacaggcacttcaggtggcaagacagctccttcttcagcagcaacagcagcagcaagttagtggattaaaatctc

SEQ ID NO: 218875 - DNA, 685 bp, Homo Sapiens
acgaggcagaagtggagcgccgctcactacgcttagaggtcacagaattcaaacgaagtgtgaatgaaatgaaaaaggagcttgacaaagcccagggtctgcaaatgcaattaaatgaatttaagcagtctaaattgatcacccatgagaagtttgaaagtgcatgtgaagaactaaataatgcattacttcgggaagagcaggcacaaatgctattgaatgaacaggcacaacaactacaggaattgaattatagacttgaattgcactccagtgaggaagctgacaaaaaccaaactcttggagaagctgttaagagtctctccgaggcaaagatggagctgagaagaaaagatcaatctctgcgtcagctcaatagacatcttacccagctggagcaggacaagcgtcgactggaggagaacatccatgatgcagagagtgccctccgcatggcagccaaagacaaagaatgtgttgctaatcacatgagagcagtagaaaatacgcttcacaaggtcagagatcagatctcgctgtcatggtctgcggcaagtaggaatgacttcaccctacagctacccaaactgcacctggagacctttgcaatggaggggctcaagggcgggccagaggtggtagcatgccaggctatgattaaaagtttcatggatgtctaccagct

SEQ ID NO: 218876 - DNA, 725 bp, Homo Sapiens
gcacgaggcggaggttcctcgggatgtcggtggccttcgtaccggactggctgaggggcaaggcggaagtcaatcaagagactatccagcggctccttgaggagaatgaccagctgatccgctgtattgtggagtatcagaacaagggccgcgggaacgagtgcgtgcagtaccagcatgtgttacatagaaatctcatttatttggctaccattgcagatgccagtccaaccagcacttcaaaagcaatggaataatctttcaaaagcaatagaataatcttccatttggctgtcgtgaggagtaattgaatgtaatccatctcttacaaaatggagacagggtctttaccaactcaactggttaaaacatgaatgaaacctctgtggctctttcaaaacgtgaaaatgtgaagaaagctactaacttagctgtattctcatgtaaatattttttaaataattaagcaaatccctcaataagttgagcccaggtgtcctctttcctgaacttggagcatgtttggataacaaagacatcactgggatgttcaagtctactttttagtttcaacctgaagaggaaactcagtaggtgttgggcaggaattggtgagattcctgacttgataccttgctaaatggacatgtaactgtgtgctccttcctatcagtttgtaaatgtggtccccctgactgctgttttcagattgctttgaaataaag

SEQ ID NO: 218877 - DNA, 704 bp, Homo Sapiens
gcacgagggcactattggccagttccgttcaacgaagtggttgctttttttagttccggcaatgagttgcgccggggcggcggcggctccccgcctttggcggctgcgcccgggggcccggcggtccctctcagcttatggaagaagaaccagtgtcagatttcgcagttcaggaatgactttagacaatatcagtcgggcagctgtggatcgaataatccgggtggatcatgcaggcgaatatggagcaaaccgcatctatgccgggcagatggctgtcctgggtcggaccagcgtcgggccagtcattcagaaaatgtgggatcaagaaaaggaccatttgaaaaagttcaatgagttgatggttatgttcagggtccggccaacagttctgatgcccttgtggaacgtgctggggtttgcactgggggcggggaccgccttgctcgggaaggaaggtgccatggcctgcaccgtggcggtggaagagagcatagcacatcactacaacaaccagatcaggacgctgatggaggaggaccctgaaaaatacgaggaacttcttcagctgataaagaaatttcgggatgaagagcttgagcaccatgacataggcctcgaccatgatgcagaattggctccagcctatgccgtcctgaagagcattatccaggccggatgcagagtggcgatatatttatcag

SEQ ID NO: 218878 - DNA, 594 bp, Homo Sapiens
gcacgaggcccggacccggaggtcgcggagagctgggcagtgttggccgctggcggagcgctggggcagcatgaagtgcctggtcacgggcggcaacgtgaagggtgagtgcaggtcggcctggcagcggcggtgcagcagccgcggagccgccagcctaacccccttccgctcttctccccgcagtgctcggcaaggccgtccactccctgtcccgcatcggggacgagctctacctggaacccttggaggacgggctctccctccggacggtgaactcctcccgctctgcctatgcctgctttctctttgccccgctcttcttccagcaataccaggcagccacccctggtcaggacctgctgcgctgtaagatcctgatgaagtctttcctgtctgtcttccgctcactggcgatgctggagaagacggtggaaaaatgctgcatctccctgaatggccggagcagccgcctggtggtccagctgcattgcaagttcggggtgcggaagactcacaacctgtccttccaggactgtgagtccctgcaggccgtcttcgacccagcctcgtgcccccacatgctccgcgccc

SEQ ID NO: 218879 - DNA, 665 bp, Homo Sapiens
gcacgaggcaggggcagcaagatggtgttgcagacccaggtcttcatttctctgttgctctggatctctggtgcctacggggacatcgtgatgacccagtctccagactccctggctgtgtctctgggcgagagggccaccatcaactgcaagtccagccagagtgttttatacagctccaacaataagaactacttagcttggtaccagcagaaaccaggacagcctcctaagctgctcatttactgggcatctacccgggaatccggggtccctgaccgattcagtggcagcgggtctgggacagatttcactctcaccatcagcagcctgcaggctgaagatgtggcagtttattactgtcagcaatattatagtactcctcaaacttttggccaggggaccaagctggagatcaaacgaactgtggctgcaccatctgtcttcatcttcccgccatctgatgagcagttgaaatctggaactgcctctgttgtgtgcctgctgaataacttctatcccagagaggccaaagtacagtggaaggtggataacgccctccaatcgggtaactcccaggagagtgtcacagagcaggacagcaaggacagcacctacagcctcagcagcaccctgacgctgagcaaagcagactacgagaaaca

SEQ ID NO: 218880 - DNA, 582 bp, Homo Sapiens
  misc_feature (552)..(552): n is a, c, g, or t
gcacgaggtacagattctagcccggatgcaggaagaaagtctccggcaagaatatgcagccaccacgtctcggcgcagttctggttcatcttgcaattctacaagacggggtacttttagtgatcaggaacttgatgcacaaagtttagatgatgaagatgacaatatgcatcatgcagtataccctgctgttaacaggttttcaccatcaccacgcaattcacctcgaccgtcacctaagcagtcacccagaaattcacctcgttcacgatctcctgctcggggaatagaatatagtagagtgtccccacagcctatgattagccgcttacagcaacctcgcctttcacttcaaggccatcccacagatttacagacaagcaatgttaaaaatgaagaaaaactaagacgcagtcttccaaacctgtcccgaacatctaatacacaagttgactcagtgaaaagcagcagaagtgactcaaattttcaagtgccaaacggaggaatacctcgtatgcaacctcaggcttcagccataccttctccaggcanattccgttcccctgcagcaccatctccttt

SEQ ID NO: 218881 - DNA, 664 bp, Homo Sapiens
gagctgcagcctcctgcgccccgccgagctggcggatggagctgcgcagcgggagcgtgggcagccaggcggtggcgcggaggatggatggggacagccgagatggcggcggcggcaaggacgccaccgggtcggaggactacgagaacctgccgactagcgcctccgtgtccacccacatgacagcaggagcgatggccgggatcctggagcactcggtcatgtacccggtggactcggtgaagacacgaatgcagagtttgagtccagatcccaaagcccagtacacaagtatctacggagccctcaagaaaatcatgcggaccgaaggcttctggaggcccttgcgaggcgtcaacgtcatgatcatgggtgcagggccagcccatgccatgtattttgcctgctatgaaaacatgaaaaggactttaaatgacgttttccaccaccaaggaaacagccacctagccaacggtattttgaaagcgtttgtctggagttagaaagttctcttcttcaacacgtccctccccagggtgttcctccctgtgacccagccgcctcgacttcggcccgcttgctcacgaataaagaactcagagttgtgtgtgcattgcacacccagacacacgcacgcacacacacgcgcgcgcacacacatgcc

SEQ ID NO: 218882 - DNA, 750 bp, Homo Sapiens
  misc_feature (34)..(34): n is a, c, g, or t
  misc_feature (636)..(636): n is a, c, g, or t
  misc_feature (679)..(679): n is a, c, g, or t
  misc_feature (726)..(726): n is a, c, g, or t
  misc_feature (749)..(749): n is a, c, g, or t
ccaggacaagttaccacctatttgcaattcaagnagaatataagacagagaagaaagctgtgaatgaatttcatttgattagcaatagattggacactctactgatcttgcctctctacaacctctcttccacctgacctctaaatgttgaagtgtttcaggaattgtcttagaccttcttccttatctacacttcctctccaacatgaatcttgatggctctgcacaagatcctgaaaagagggaatattcttctgtgtgtgtgggcagagaagatgacattaaaaaatctgaaagaatgacagctgttgtccatgatagagaagtggtcattttctaccacaagggagaatatcatgctatggatattcgctgttaccactcaggaggacctttacatttgggagatatagaggattttgatggacgaccgtgtatagtttgcccctggcataaatacaaaattactttggcaacaggagaaggtctgtaccagtctataaaccctaaagatccatcagcaaaacccaagtggtgctccaaaggaataaagcaaaggattcacacagtgacagtagacaacggaaatatttatgtgactctttctaatgaaccttttaagtgtgactctgattnttatgccactggagacttcaaagtaattaagagttcttcctgnataaaatatatagaaatgaaaaatgttgtgtatgcttgaaaacattnttagaataactctgcttcagttnt

SEQ ID NO: 218883 - DNA, 635 bp, Homo Sapiens
  misc_feature (633)..(633): n is a, c, g, or t
cggcgcgggaggcgaccatgcgcggcgcgggggcgatcctgcggccggcggcgcgtggtgcccgggacctgaacccgcggcgggacatctcctcctggctggcccagtggttccctagaaccccagccaggtccgtggtggccctgaagacccccatcaaggtggagctggtggcagggaaaacctacaggtggtgtgtgtgtggccgcagcaagaagcagcccttctgtgacggctcccacttcttccaacgcactggcctatctccactcaagttcaaggcccaagagacccgcatggtggcactctgtacctgcaaggccactcagaggcccccgtactgcgatggcacccacaggagtgagcgcgtgcagaaggcagaagtgggctccccactctgagggggctgctgctgtccagccacaggtggccttggctccaggcctctgacaggcacccccttctgtgggaaaggaaacaggtgctgagcccaagagactctggtacccactgctggctcatgaaggaagaattattccttataacctaaaagtctccagtctggggcaggcgggagtgggccctggttcaatgtttgctgatggggaagatggcaaaaacaagcctgccccncc

SEQ ID NO: 218884 - DNA, 710 bp, Homo Sapiens
  misc_feature (141)..(141): n is a, c, g, or t
  misc_feature (665)..(665): n is a, c, g, or t
ggctgacggggtggcagtgcggcgggttacggcctggtcagaccataatgacttcagcaaataaagcaatcgaattacaactacaagtgaaacaaaatgcagaagaattacaagactttatgcgggatttagaaaactggngaaaaagacattaaacaaaaggatatggaactaagaagacagaatggtgttcctgaagagaatttacctcctattcgaaatgggaattttaggaaaaagaagaaaggcaaagctaaagagtcttccaaaaaaaccagagaggaaaacacaaaaaacaggataaaatcttatgattatgaggcatgggcaaaacttgatgtggaccgtatccttgatgagcttgacaaagacgatagtacccatgagtctctgtctcaagaatcagagtcggaagaagatgggattcatgtagattcacaaaaggctcttgttttaaaagaaaagggcaataaatacttcaaacaaggaaaatatgatgaagcaattgactgctacacaaaaggcatggatgccgatccatataatcccgtgttgccaacgaacagagcgtcagcatattttagactgaaaaaatttgctgttgctgagtctgattgtaatttagcagttgccttgaatagaagttatacaaaggcttattccanacgaggtgctgctcgatttgctttgcaaaattagaagaggccaaa

SEQ ID NO: 218885 - DNA, 500 bp, Homo Sapiens
  misc_feature (13)..(13): n is a, c, g, or t
  misc_feature (19)..(19): n is a, c, g, or t
gcacgaaccaggnagcagnaaaaaaaaaagctcccaaatgctatatctattcaggggctctcaagaacaatggaatatcatcctgatttagaaaatttggatgaagatggatatactcaattacacttcgactctcaaagcaataccaggatagctgttgtttcagagaaaggatcgtgtgctgcatctcctccttggcgcctcattgctgtaattttgggaatcctatgcttggtaatactggtgatagctgtggtcctgggtaccatggctggtttcaaagctgtggaattcaaaggataaattaatgaagaaaacaagcggagctgaagaagaaagtacaatatggtgctgtcttcctaatgaaataaattcactaaatggacaaaaaaaaaaaaaaaaaaaaaaaaaaaaaaaactcgactctagattgcggccgcggtcatagctgtttcctgaacagatcccgggtggcatccctgtgacccctccccagtgcc

SEQ ID NO: 218886 - DNA, 754 bp, Homo Sapiens
  misc_feature (7)..(7): n is a, c, g, or t
caccagnactaggggagggcagctctcacccaggctgatagttcggtgacctggctttatctactggatgagttccgctgggagatggaacatagcacgtttctctctggcctggtactggctacccttctctcgcaagtgagccccttcaagatacctatagaggaacttgaggacagagtgtttgtgaattgcaataccagcatcacatgggtagagggaacggtgggaacactgctctcagacattacaagactggacctgggaaaacgcatcctggacccacgaggaatatataggtgtaatgggacagatatatacaaggacaaagaatctaccgtgcaagttcattatcgaatgtgccagagctgtgtggagctggatccagccaccgtggctggcatcattgtcactgatgtcattgccactctgctccttgctttgggagtcttctgctttgctggacatgagactggaaggctgtctggggctgccgacacacaagctctgttgaggaatgaccaggtctatcagcccctccgagatcgagatgatgctcagtacagccaccttggaggaaactgggctcggaacaagtgaacctgagactggtggcttctagaagcagccattaccaactgtaccttcccttcttgctcagccaataaatatatcctctttcactcagaaaaaaaaaaaaaaaaaaaaaaactcgactctagattgcggccgcggtcatagctgtttcctgaac

SEQ ID NO: 218887 - DNA, 665 bp, Homo Sapiens
  misc_feature (573)..(573): n is a, c, g, or t
caccagccagcttcttccttttacctcgttgcactgctgagagcaagatgggtcaccagcagctgtactggagccacccgcgaaaattcggccagggttctcgctcttgtcgtgtctgttcaaaccggcacggtctgatccggaaatatggcctcaatatgtgccgccagtgtttccgtcagtacgcgaaggatatcggtttcattaagttggactaaatgctcttccttcagaggattatccggggcatctactcaatgaaaaaccatgataattctttgtatataaaataaacatttgaaaaaacaaaaaaaaaaaaaaaaaactcgactctagattgcggccgcggtcatagctgtttcctgaacagatcccgggtggcatccctgtgacccctccccagtgcctctcctggccctggaagttgccactccagtgcccaccagccttgtcctaataaaattaagttgcatcattttgtctgactaggtgtccttctataatattatggggtggaggggggtggtatggagcaaggggcaagttgggaagacaacctgtagggcctgcggngtctattgggaaccaagctggagtgcagtggcacaatcttggctcactgcaatctccgcctcctgggttcaagcgattctcctgcctcagcc

SEQ ID NO: 218888 - DNA, 727 bp, Homo Sapiens
caccagaaaaaaacccactagtcccagctcctggggtggcacagacattgcaactggccctgcctgtgggtcctaggggcccttggctaccaggaggctaagaacactgctcatgaatgacagtgagccctgaaagctctgggggtgtcacccagtcccacaagcctgcatcccctgcagtggagatgggctcagctcctggacgtgccacagacagaaagcataacatacactcgccaggaagagcctttgcctgactcagggcagctcagagtgtggggcagaaggtgaccagccagctcagggcaggagatgcagagcacagccaattacctgtggcacacagatgacctgctggggcagggggccactgccagtgtgtacaaggcccgcaacaagaaatccggagagctggttgctgtgaaggtcttcaacactaccagctacctgcggccccgcgaggtgcaggtgagggagtttgaggtcctgcggaagctgaaccaccagaacatcgtcaagctctttgcggtggaggagacgggcggaagccggcagaaggtactggtgatggagtactgctccagtgggagcctgctgagtgtgctggagagccctgagaatgcctttgggctgcctgaggatgagttcctggtggtgctgcgctgtgtggtggccggcatgaaccacctgcgggagaacggcattgtgcatcgcgacatcaagccgg

SEQ ID NO: 218889 - DNA, 617 bp, Homo Sapiens
gcacgaggcttcatgtgctttggaaaaagcaggagaagcaatagcagcaggagtccccagcagctggagccgcaagaatgaactgcaaagagggaactgacagcagctgcggctgcaggggcaacgacgagaagaagatgttgaagtgtgtggtggtgggggacggtgccgtggggaaaacctgcctgctgatgagctacgccaacgacgccttcccagaggaatacgtgcccactgtgtttgaccactatgcagttactgtgactgtgggaggcaagcaacacttgctcggactgtatgacaccgcgggacaggaggactacaaccagctgaggccactctcctaccccaacacggatgtgtttttgatctgcttctctgtcgtaaaccctgcctcttaccacaatgtccaggaggaatgggtccccgagctcaaggactgcatgcctcacgtgccttatgtcctcatagggacccagattgatctccgtgatgacccaaaaaccttggcccgtttgctgtatatgaaagagaaacctctcacttacgagcatggtgtgaagctcgcaaaagcgatcggagcacagtgctacttggaatgttcagctctgactcag

SEQ ID NO: 218890 - DNA, 584 bp, Homo Sapiens
  misc_feature (483)..(483): n is a, c, g, or t
  misc_feature (550)..(550): n is a, c, g, or t
gcacgaggcgcaagatggcggcgctgaaggaggataggagctacgggctgtcgtgcgggcgggttagcgacggcagcaaggtgtcggtgttccacgtgaagctcaccgacagtgccctgagggccttcgagagctaccgcgccagacaggattctgtttcactgaggccatctatccgatttcaaggaagccaagggcacatctccatcccccagcctgactgccccgcagaggcgcggacgttctccttctacctctccaacatcggccgcgacaacccccagggcagcttcgactgcatccagcagtatgtctccagtcatggggaagttcacctggactgcctgggcagcatacaggacaagatcacggtgtgtgccaccgacgactcctaccagaaggcgcggcagagcatggcccaggcggaggaggagacgcggagccgaagtgccattgtcatcaaggctggaggccgctacctgngcaagaaggttcagtttcggaaaccagccccagggtgcacagacgcggtgccctcccggaagcgggncacccccatcaacttggcgagtgccatcaggaag

SEQ ID NO: 218891 - DNA, 588 bp, Homo Sapiens
gcacggagggaaataacattaacatggatcagaggtactgggcttcatctgttccattggaccttggctagggaatatcatttcactggcatcaaacctgcttagcttatgaaaagatggtaatatgtcatttctataaatgtttctatatatgaaacataaagtggcagggagatacaatatcacaccccttccccacaaggactgtgaatattgggatttatgtccttgccattacctagtggttacagccctatcactaaaatttacatcgtttctcagttgggatttgggcattgctaacttactgtatagaaagtttaacttttcctcacccctgtatagaaaatgccttgcctctcaagagagggcagagggggggccaggtgcagtggctcacgcctgtaatcccagcagtttgggaggccaaggcaagtggatcatgtgaggtcaagagttcgagaccagcctggccaacatggtgaaaccccgtctctacaaaaaaaaaaaaaattagctgggcatggtggcatgctcccgtagtcccagctactcgggaggctgaggcaggagaatcacttgagcctg

SEQ ID NO: 218892 - DNA, 675 bp, Homo Sapiens
  misc_feature (9)..(9): n is a, c, g, or t
cacgagggnaaagaactagtctgagttttttttttttttttttaaactttttttatttaaataaggagaattctttcatatggaaagagctagtacaatcacatatttgaaaggagaaacaataggtactgaaccggagggaaagggcgagggtgagtgtgccagcaccggcctggtgaatccacgattcgatttcccatccaaggtaagtttcccaaaataccgtataaacaagctgcacattacacctctagccatcgtctgccctttcaaatatctggtctacatggaaagacaaagaggaaaggccaaaacataaacaaaaggaaacaaaaacaaaacacaaccctctcaggaaccaaacaaaacccccaaatccttttttactacacaaggcatgaggtcaaaagcttgagtacagtgtcccctttagatcacgggagaaaggcgtccacacagagccttagcaggaatttccactctgaggcttcagaacatgctgaagatggggctctgagggtgccactaccatcctggaggccaccaagtggggtggaaacagtgaagagcaggtctcacatgcccgaagaccaccagccaactacacattggtggccctggtggagcatggctgggcgacagcgtccatccccaacactgagccactcctgtcct

SEQ ID NO: 218893 - DNA, 669 bp, Homo Sapiens
agcgccgcttgcgctccggagcgctggctctgctggcgctgagaaatggaccaattttgacaagatatagtgctgcagcgtgcctgatgggatatattcagtcatggcgtccgaactttgtaagacgatctctgtggcaaggctagaaaagcacaagaatttgttcttaaattataggaatctgcaccattttccattggagttactgaaagatgagggactgcagtacttggagagactctatatgaaaaggaactccctgacatccttgccagaaaaccttgctcagaagcttccaaaccttgtggaactatacctgcactcaaataacatagttgtggttccggaagccattgggtctcttgtaaaactccaatgtctggatcttagtgacaatgccttagaaattgtttgcccagaaattggtcgtctgaatgctttacgtcatcttcgattagctaataaccaactgcaattcctacctccagaggttggcgatttgaaggagctgcagacactagacatttctaccaatcgcttgctaactttacccgagaggcttcacatgtgcctttctctgcagtacctcactgtggaccgaaatcgtctatggtatgtgccgtgccatctctgccagctgcccagcctctctgagctctccatggctgg

SEQ ID NO: 218894 - DNA, 757 bp, Homo Sapiens
  misc_feature (700)..(700): n is a, c, g, or t
  misc_feature (725)..(725): n is a, c, g, or t
cacgagggcaggaccgtgcgcggcggccgcggcgggtgctgggagccagcgcctgcctcgccgccgccctcgctgcctgccactccgtcttggcccgttctccgcaccgtgcagaggcggcgggctggggagggagcggcgccagcacgaggttcccagccgctgggaagcccctagacgcgccgaggggccgggctacgagcggctgagaaaatgatgcatcctgttgccagcagtaatccagctttctgtgggcctggcaagccttcctgcctcaatgaagatgccatgagagctgctgatcagtttgacatatattcctcccagcaaagcaaatacagccacacagtcaaccacaaaccaatggtttgtcagaggcaagacccattaaatgaaacacacttgcagactacaagtggcagaagcatagaaataaaagatgaactaaagaaaaagaagaatctcaaccgatctggtaagcgtggccggccttcgggaaccaccaaatcagcaggataccggaccagcacaggcagacccctgggaaccaccaaagcagctggatttaagacaagtccaggcagacctttggggacaactaaagctgcgggatacaaagtcagcccaggcagacctccaggtagcattaaagctctatcccgtcttgccgatcttggttatggctgtggcactgctgctnttccttaccctatgatgcatggcanagcagttcatggggtagaggaaactagcagtg

SEQ ID NO: 218895 - DNA, 625 bp, Homo Sapiens
gcacgaggcgaggatcaaagtaggcaagatggcgtcgagcggcggggagctagggagtttatttgatcaccacgtccagagggcggtatgcgacacacgggccaaatatcgagagggacgacggcctcgtgctgtgaaggtatatacaatcaatttggaatctcagtacttattaatacaaggagttcctgctgtgggagtcatgaaggaattagttgagcgattcgctttatatggtgcaattgaacagtacaatgctctagatgaatacccagcagaagactttactgaagtttatcttattaaatttatgaacttacaaagtgcaaggacagccaagagaaaaatggatgaacagagtttcttcggtggattgcttcatgtgtgctatgctccagaatttgaaacagttgaagaaactagaaaaaaactacaaatgcggaaggcatatgtagtaaaaactactgaaaataaagaccattacgtgacaaagaagaaattggttacagagcataaagacacagaggattttagacaagacttccactcagagatgtctggattttgtaaagctgctttgaacacttctgcagggaactcaaatccttatcttccgtattcctgt

SEQ ID NO: 218896 - DNA, 656 bp, Homo Sapiens
  misc_feature (636)..(636): n is a, c, g, or t
gcacgagggagagagaaagcgaagggcaccatctttgtattttgtgtcatgacttctcaagagaagacagaagagtatccttttgcagatatatttgatgaagatgaaactgaaaggaattttttgttgtccaaacctgtttgctttgttgtatttgggaaaccaggtgttgggaaaacaacattagcccgttacataacacaggcatggaaatgtattcgtgttgaagctttgccaattttagaagaacagattgctgctgaaaccgaatcaggagttatgttgcaatcaatgttgatcagcggtcaaagcattccagatgaacttgtcataaagctaatgttggagaagctcaactccccagaagtctgtcactttggttatattatcactgaaataccatcactttcacaggatgccatgactaccttacagcaaatagaattaattaaaaacttaaacctgaaacctgatgttataatcaatataaagtgtcctgactatgatttgtgccagagaatttctgggcaaagacagcacaataatacgggatacatatacagtagagaccagtggggatccttgaagtcattgagaatcataggaaaaagaagaaagaagcccaaaaggacgganagggagaagaggaagaagag

SEQ ID NO: 218897 - DNA, 656 bp, Homo Sapiens
gcacgaggctctgtgggactggcgttgtgcgggcagacgttggtggtgcggggcggcagccgattcctggccacctccatagcaagcagtgatgatgacagcctcttcatctatgactgcagtgctgcagaaaagaagtcacaagaaaataaaggggaggacgcgcccttggaccaggggagcggtgcgattctggcgtccaccttctccaagtctggcagctattttgctttaaccgatgacagtaagcgtctgattcttttccgtacaaaaccatggcaatgtctgagtgtcaggaccgtggcaaggaggtgtacagccctgactttcatagcctcggaggagaaggtcttggtggccgacaagtctggagacgtctactccttttcggtgctggagccacacgggtgtggccgtctagagctggggcacctgtctatgctgttagatgtggctgtgagtcctgatgaccgcttcatcctcactgccgaccgggacgagaagatccgagtcagctgggccgcggcgccccatagcatcgagtccttctgcttggggcacacagagtttgtgagccgtatctccgtggtgccaactcagcccgggctgcttctgtcctcctctggagacggcaccctgaggctctgggagtacag

SEQ ID NO: 218898 - DNA, 684 bp, Homo Sapiens
cacgaggctgagttgaggggcttccctctgctccacagaaaccctgttttattgagttctgaaggttggaactgctgccatgattttggccactttgcagacctgggaccccagcctctcactctcagttccactcatccaactgggaccctcaccacgaatctcatgatctgattcggttccctgtctcctcctcccgtcacagatgtgagccagggcactgctcagctgtgaccctaggtgtttctgccttgttgacatggagagagccctttcccctgagaaggcctggccccttcctgtgctgagcccacagcagcaggctgggtgtcttggttgtcagtggtggcaccaggatggaagggcaaggcacccagggcaggcccacagtcccgctgtcccccacttgcaccctagcttgtagctgccaacctcccagacagcccagcccgctgctcagctccacatgcatagtatcagccctccacacccgacaaaggggaacacacccccttggaaatggttcttttcccccagtcccagctggaagccatgctgtctgttctgctggagcagctgaacatatacatagatgttgccctgccctccccatctgcaccctgttgagttgtagttggatttgtctgtttatgcttggattcaccagagtgactatgatagtga

SEQ ID NO: 218899 - DNA, 724 bp, Homo Sapiens
cacgagggcggagcggcccggcagccggcacccagccgccgccgcgcgttcctgccgcccgtgtcacgcgagacccggcgggggccgggaccgcccgagccgcccctcagaccgagccggccgcctccgctgccgcggccgcctcctcttcggggtcattaaagccaatgagccgcgcgcctctgccgagcgcagccaactaaatcggcttggatgattcgcgacctgagcaagatgtacccgcagaccagacacccggcaccgcatcagcctgctcaaccctttaaatttacaatttccgaatcctgtgatcggattaaggaagagtttcagtttttacaggctcaataccacagtctgaagctggaatgtgagaaactcgccagtgagaagacagagatgcagcggcattatgtcatgtattatgaaatgtcctatgggttgaatatagaaatgcacaagcaggcagagattgtcaagaggctgaatgctatctgtgcacaagtcattcctttcctgtcccaagagcaccagcaacaagtggtgcaggctgtggaacgggccaagcaggtgaccatggcagaactgaacgccatcattgggcaacaactccaggcccagcatttatcacatggacatggtctccccgtacctctgactccacacccttcagggctccagccccctgccattccacccatcggtagcagtgccgggcttctgc

SEQ ID NO: 218900 - DNA, 729 bp, Homo Sapiens
  misc_feature (697)..(697): n is a, c, g, or t
cggccggtggcggcggtggcgacagcggcgacctagggatcgatctggagggacttggggagcgtgcagagacctctagctcgagcgcgagggacctcccgccgggatgcctggggagcagatggaccctactggaagtcagttggattcagatttctctcagcaagatactccttgcctgataattgaagattctcagcctgaaagccaggttctagaggatgattctggttctcacttcagtatgctatctcgacaccttcctaatctccagacgcacaaagaaaatcctgtgttggatgttgtgtccaatcctgaacaaacagctggagaagaacgaggagacggtaatagtgggttcaatgaacatttgaaagaaaacaaggttgcagaccctgtggattcttctaacttggacacatgtggttccatcagtcaggtcattgagcagttacctcagccaaacaggacaagcagtgttctgggaatgtcagtggaatctgctcctgctgtggaggaagagaagggagaagagttggaacagaaggagaaagagaaggaagaagatacttcaggcaatactacacattcccttggtgctgaagatactgcctcatcacagttgggttttgggggttctggaactctcccagagccaggatgttgaggaaaatactgtgccatatgaagtggacanagagcagctaccatcagtaaccaccaactctg

SEQ ID NO: 218901 - DNA, 782 bp, Homo Sapiens
  misc_feature (739)..(739): n is a, c, g, or t
  misc_feature (741)..(741): n is a, c, g, or t
gcacgagggaacagctaaacggagtcgccacaccactgtttgtgctggatcgcagcgctgcctttccttatgaagaagacacaaacttggattctcacttgcatttatcttcagctgctcctatttaatcctctcgtcaaaactgaagggatctgcaggaatcgtgtgactaataatgtaaaagacgtcactaaattggtggcaaatcttccaaaagactacatgataaccctcaaatatgtccccgggatggatgttttgccaagtcattgttggataagcgagatggtagtacaattgtcagacagcttgactgatcttctggacaagttttcaaatatttctgaaggcttgagtaattattccatcatagacaaacttgtgaatatagtggatgaccttgtggagtgcgtgaaagaaaactcatctaaggatctaaaaaaatcattcaagagcccagaacccaggctctttactcctgaagaattctttagaatttttaatagatccattgatgccttcaaggactttgtagtggcatctgaaactagtgattgtgtggtttcttcaacattaagtcctgagaaagattccagagtcagtgtcacaaaaccatttatgttaccccctgttgcagccagctcccttaggaatgacagcagtagcagtaataggaaggccaaaaatccccctggagactccagcctacactgggcagccatggcattgccagcattgntntctcttataattggctttgcttttggagccttatactggaa

SEQ ID NO: 218902 - DNA, 734 bp, Homo Sapiens
  misc_feature (707)..(707): n is a, c, g, or t
cacgagggcggcggcagcggtgtcgctttgtttccgcggctcctgcggcggtggcagtggtagcggcctttgagctgtggggaggttccagcagcagctacagtgacgactaagactccagtgcatttctatcgtaaccgggcgcgggggagcgcagatcggcgcccagcaatcacagaagccgacaaggcgttcaagcgaaaacatgaccgctgagcccatgagtgaaagcaagttgaatacattggtgcagaagcttcatgacttccttgcacactcatcagaagaatctgaagaaacaagttctcctccacgacttgcaatgaatcaaaacacagataaaatcagtggttctggaagtaactctgatatgatggaaaacagcaaggaagagggaactagctcttcagaaaaatccaagtcttcaggatcgtcacgatcaaagaggaaaccttcaattgtaacaaagtatgtagaatcagatgatgaaaaacctttggatgatgaaactgtaaatgaagatgcgtctaatgaaaattcagaaaatgatattactatgcagagcttgccaaaaggtacagtgattgtacagccagagccagtgctgaatgaagacaaagatgattttaaagggcctgaatttagaagcagaagtaaaatgaaaactgaaaatctcaaaaaacgcggagaagatgggcttcatgggnattgtgagctgcactgcttgtggacaa

SEQ ID NO: 218903 - DNA, 630 bp, Homo Sapiens
cacgagggcaatcagagcaccgcagccagggagatgctggcgagacgacagcgagatcctctccaggccctgcggcgccgcaatcaggagctgaagcaacaggttgatagtttgctttctgagagccaactgaaagaagctctagaacccaataaaagacaacatatttatcaaagatgtatccagttaaagcaggcaatagatgaaaataaaaatgctcttcaaaaattaagcaaagctgatgaatctgcacctgttgcaaactataatcagagaaaagaagaggagcatactcttttggacaagcttacccaacaactgcagggccttgctgtgacaataagcagagaaaatataactgaagttggggcacctactgaagaagaggaagaaagtgaaagtgaagatagtgaagacagtggtggggaggaagaagatgcagaggaggaagaggaagagaaagaggaaaatgaatctcacaaatggtcaaccggtgaagaatacatcgctgttggagattttactgctcagcaagttggagatcttacatttaagaaaggggaaattctccttgtaattgaaaaaaaacctgatggttggtggatagctaaggatgccaaaggaaatgaa

SEQ ID NO: 218904 - DNA, 777 bp, Homo Sapiens
cacgaggcattcccggtgtcgacttactagctgcaagcctctgcctgccttcctgcgcgccgttccccgctagtcgctgctgctggcgcgcactcgccgggtttttcctcccacggcctcgagatggtggtgaatgtggcacggaggagccgggccttccaacccggtgggcccgagctccgaaaggccccctcggcagtgagaggggcgggagcccgcgggggccgcgcccttctctcgcttcggactgcgcaacgctgcgctctgggctgacaggcggataaaacggtcccatcaagactgagaaaaagcacaccagctattggcacagcgtgggcagtggggcctacaggatgactgacttagtctacagagatcccggcgtacttaagcagatgaagactcttaagatgacagaaggtgatttttctggtgatcgaggacttccggggtaatgacagtgatgaaatgcaggggacctggttgcccccaagtttcctggcagtgtgtgatactgaggaggtgagcttgtttctggagctgtgctttaaggtaaagttgatcagcttaatcctcctgatccctttcccatcggatctgaacactggtcttggtggtcgtaaaaggaggaaaagtaatagtgaagctggcctaaatgttgtaatctggtatatggcatgtgggctagtttcagacaggtttcagaagatggttggatctctgaaattgtaaaatgaagtataatcttaggctaagggaaggatgcgtgtgaagctc

SEQ ID NO: 218905 - DNA, 783 bp, Homo Sapiens
acgaggaagaggcggcggcgggggaagcagcgtgagcagccggaggatcgcggagtcccaatgaaacgggcagccatggccctccacagcccgcagtatatttttggagattttagccctgatgaattcaatcaattctttgtgactcctcgatcttcagttgagcttcctccatacagtggaacagttctgtgtggcacacaggctgtggataaactacctgatggacaagaatatcagagaattgagtttggtgtcgatgaagtcattgaacccagtgacactttgccgagaacccccagctacagtatttcaagcacactgaaccctcaggcccctgaatttattctcggttgtacagcttccaaaataacccctgatggtatcactaaagaagcaagctatggctccatcgactgccagtacccaggctctgccctcgctttggatggaagttctaatgtggaggcggaagttttggaaaatgatggtgtctcaggtggtcttggacaaagggagcgtaaaaagaagaaaaagcggccacctggatattacagctatttgaaagatggtggcgatgatagtatctccacagaagccctggtcaatggccatgccaattcagcagtcccgaacagtgtcagtgcagaggatgcagaatttatgggtgacatgcccccgtcagttacgcccaggacttgtaacagcccccagaactccacagactctgtcagtgacattgtgcctgatagtcctttccccggacactcggcagtgacacca

SEQ ID NO: 218906 - DNA, 566 bp, Homo Sapiens
cacgagtggaagaatcaaggagagaagttgcagtattggcaaacatgaagcatccaaatattgtccagtatagagaatcatttgaagaaaatggctctctctacatagtaatggattactgtgagggaggggatctgtttaagcgaataaatgctcagaaaggcgttttgtttcaagaggatcagattttggactggtttgtacagatatgtttggccctgaaacatgtacatgatagaaaaattcttcatcgagacattaaatctcagaacatatttttaactaaagatggaacagtacaacttggagattttggaattgctagagttcttaatagtactgtagagctggctcgaacttgcatagggaccccatactacttgtcacctgaaatctgtgaaaacaaaccttacaataataaaagtgacatttgggctctggggtgtgtcctttatgagctgtgtacacttaaacatgcttttgaagctggcagtatgaaaaacctggtactgaagatatatctggatcttttccacctgtgtctttgcattattcctatgatctcc

SEQ ID NO: 218907 - DNA, 596 bp, Homo Sapiens
gcacgagggcgagagctgcgaagggccaggtgtcgggcgctgtttctcgttttcatcatatagacaaaacagccctgctgcaaagatggtcaacgtacctaaaacccgaagaaccttctgtaagaagtgtggcaagcatcagcctcacaaagtgacacagtataagaagggcaaggattctttgtatgcccagggaaggaggcgctatgatcggaagcagagtggctatggtgggcagacaaagccaattttccggaagaaggctaagaccacaaagaagattgtgctaaggctggaatgtgttgagcctaactgcagatccaagaggatgctggccattaagagatgcaagcattttgaactgggaggagataagaagagaaagggccaagtgatccagttctaaactttgggatatttttcttcaattttgaagagaaaatggtgaagccatagaaaagttacccgagggaaaataaatacagtgatattcttacgcaaaaaaaaaaaaaaaaaactcgactctagattgcggccgcggtcatagctgtttcctgaacagatcccgggtggcattccctgtgacccctccccag

SEQ ID NO: 218908 - DNA, 612 bp, Homo Sapiens
cacgaggagagacctataacccatgtgccgcgaatcccgcagccccagtacacctccctccgtgcctccccgccttttctgcagagctccgccctggagtgaaggaggagccgtcacctggagctccgaaaaaagcagaagaagataaaactctgcaaagacaatgtctagcacttatatctccagtaactcctgtcaaggtttattgttgcttgttcatcattgcagtcctgactacaagtgtgattgcactttctattgttttgtcagaatttcctgaaaagatacaaaggcccttctgaccattggattggccttagaagagaatcatcccatcgcatttggaaatggacagacaacatggaatataataacatttttcacacatttataaaacaatttgggaggagactggaaatcatcttgactgaagaccaccaatggcagcagttcatttgggcttgctatcagaggaagtggagaatgtgccttcctgaatgacaatggagtcaacagtggcagaatctacatgaacagaaaatggatttgtagcaagccaaacaattatgtctacagttgccagttatgtccccactgggatactacctagta

SEQ ID NO: 218909 - DNA, 584 bp, Homo Sapiens
  misc_feature (436)..(437): n is a, c, g, or t
cacgaggcttcaacatcggggagttcacactggggagaggccttatgagtgcagtgaatgtgggaagttctttccctacagctccagtctccgaaaacaccagagagttcacactggatcaagaccctatgagtgcagtgaatgtgggaaatcctttactcaaaattccggcctcattaagcacaggagggttcacactggggagaagccttatgagtgcacggaatgtgggaaatcctttagccataactccagccttattaaacatcagagaattcatagtcgataaaagccttatgagtggcaaatgtggaaaatctgttagcaccctggagaaagtccttgagtacacagtgaatgtcagaaagcttcagctgaaggccatatctcattgagtgccacacagttcacaagggaaagacacttttgatatgtnnggatgtccagttgatataacagctctgaaggagatcccttatgagggtggcatcagcctgaattgaacatcctatatctgaacatctgcataaattccaggtatgtgtgaactgcattgcaccttttgccctgcccagggcccatgt

SEQ ID NO: 218910 - DNA, 643 bp, Homo Sapiens
cacgagggctgttaagacctgcataatccagatggctactctgatctatgttgataaggaaaatggagaaccaggcacccgtgtggttgctaaggatgggctgaagctggggtctggaccttcaatcaaagccttagatgggagatctcaagtttcaacaccacgttttggcaaaacgttcgatgccccaccagccttacctaaagctactagaaaggctttgggaactgtcaacagagctacagaaaagtctgtaaagaccaagggacccctcaaacaaaaacagccaagcttttctgccaaaaagatgactgagaagactgttaaagcaaaaagctctgttcctgcctcagatgatgcctatccagaaatagaaaaattctttcccttcaatcctctagactttgagagttttgacctgcctgaagagcaccagattgcgcacctccccttgagtggagtgcctctcatgatccttgacgaggagagagagcttgaaaagctgtttcagctgggccccccttcacctgtgaagatgccctctccaccatgggaatccaatctgttgcagtctccttcaagcattctgtcgaccctggatgttgaattgccacctgtttgctgtgacatagatatttaaatt

SEQ ID NO: 218911 - DNA, 573 bp, Homo Sapiens
cacgagggccttacagttgctgagaggaggcgagaggcgggggcgctagggccgagatcatgtctgactgggagaggtttccttggcagcagaggacgctaggtttgggatgaaagaagctgggcagatgcaaaatctggagagcgcgagggccgggcggtcagtcagcacccagactggcagcatgaccggtcagataccaaggctttctaaagtcaaccttttcactctgctcagcctctggatggagctctttccagcagaagcccagcggcaaaaatctcagaaaaatgaagagggaaagcatggacccttaggagataatgaagagaggaccagagtatctactgacaaaagacaggtaaagagaactggtcttgtggtggtgaaaaacatgaaaattgttggtctccactgttctagtgaagatttacatgccgggcagattgctcttattaaacatgggtcaaggctgaaaaactgtgatctttatttttcagaaaaccatgttctgcttgtttgaaaatgattgtaaatgctggagttaaccgaatttcatactggcctgctgat

SEQ ID NO: 218912 - DNA, 566 bp, Homo Sapiens
cacgaggcacccgagagccgcgagcgcccggccgaacccgcgatggaataatgcccagcggcccgccaggtcccggtcgttttctgatgtgacggctgagacatgagatcttcagcctccaggctctccagtttttcgtcgagagattcactatggaatcggatgccggaccagatctctgtctcggagttcatcgccgagaccaccgaggactacaactcgcccaccacgtccagcttcaccacgcggctgcacaactgcaggaacaccgtcacgctgctggaggaggctctagaccaagatagaacagcccttcagaaagtgaagaagtctgtaaaagcaatatataattctggtcaagatcatgtacaaaatgaagaaaactatgcacaagttcttgataagtttgggagtaattttttaagtcgagacaaccccgaccttggcaccgcgtttgtcaagttttctactcttacaaaggaactgtccacactgctgaaaaatctgctccagggtttgagccacaatgtgatcttcaccttggattctttgttaaaaggagacct

SEQ ID NO: 218913 - DNA, 642 bp, Homo Sapiens
gcgcgaggcgggcaaccccttggcccaggaagcctggaacgtcttgaccggagggcgtgggctgggacgcccctaccttggtctttcagggaaaggccttggaaagcagtcgttgcgccagacagcccagggaagagcggcagcctgaggacctagggccacctgctgttccctgggattcatgtccttctggggaggagggaggacccaggacaatggctgctgttcatgatctggagatggagagcatgaatctgaatatggggagagagatgaaagaagagctggaggaagaggagaaaatgagagaggatgggggaggtaaagatcgggccaagagtaaaaaggtccacaggattgtctcaaaatggatgctgcccgaaaagtcccgaggaacatacttggagagagctaactgcttcccgcctcccgtgttcatcatctccatcagcctggccgagctggcagtgtttatttactatgctgtgtggaagcctcagaaacagtggatcacgttggacacaggcatcttggagagtccctttatctacagtcctgagaagagggaggaagcctggaggtttatctcatacatgctggtacatgctggagttcagcacatcttggggaatctttgtatgc

SEQ ID NO: 218914 - DNA, 718 bp, Homo Sapiens
  misc_feature (705)..(705): n is a, c, g, or t
cacgaggttagtttagggaaaatacctagagccctgtgatttggagagtgaaaactctttattaccgttgttactttaactctttccaggatggcctgcctccttcgctcatttcagagaatttctgcaggggttttcttcttagcactttggggcatggttgtaggtgacaagctgctggtggtccctcaggacggaagccactggcttagtatgaaggatatagttgaggttctcagtgaccggggtcatgagattgtagtggtggtgcctgaagttaatttgcttttgaaagaatccaaatactacacaagaaaaatctatccagtgccgtatgaccaagaagagctgaagaaccgttaccaatcatttggaaacaatcactttgctgagcgatcattcctaactgctcctcagacagagtacaggaataacatgattgttattggcctgtacttcatcaactgccagagcctcctgcaggacagggacaccctgaacttctttaaggagagcaagtttgatgctcttttcacagacccagccttaccctgtggggtgatcctggctgagtatttgggcctaccatctgtgtacctcttcaggggttttccgtgttccctggagcatacattcagcagaagcccagaccctgtgtcctacattcccaggtgctacacaaagttttcagaccacatgactttntcccaacgagtgg

SEQ ID NO: 218915 - DNA, 711 bp, Homo Sapiens
  misc_feature (709)..(710): n is a, c, g, or t
acagctggaacccatctcccgttgaagggaaactgccagatttttgagcctgtgttggaagagatggtgatgggcctgggcgttttgttgttggtcttcgtgctgggtctgggtctgaccccaccgaccctggctcaggataactccaggtacacacacttcctgacccagcactatgatgccaaaccacagggccgggatgacagatactgtgaaagcatcatgaggagacggggcctgacctcaccctgcaaagacatcaacacatttattcatggcaacaagcgcagcatcaaggccatctgtgaaaacaagaatggaaaccctcacagagaaaacctaagaataagcaagtcttctttccaggtcaccacttgcaagctacatggaggttccccctggcctccatgccagtaccgagccacagcggggttcagaaacgttgttgttgcttgtgaaaatggcttacctgtccacttggatcagtcaattttccgtcgtccgtaaccagcgggcccctggtcaagtgctggctctgctgtccttgccttccatttcccctctgcacccagaacagtggtggcaacattcattgccaagggcccaaagaaagagctacctggaccttttgttttctgtttgacaacatgtttaataaataaaaatgtcttgatatcaaaaaaaaaaaaaaaaaaacgcgagagagaanna

SEQ ID NO: 218916 - DNA, 745 bp, Homo Sapiens
  misc_feature (28)..(28): n is a, c, g, or t
cacgagccactatagctccacggccagnaagaaccagcagctctgcctttactgaaatttcagctggagaaaggtccacagcacaatgaggcttttcacaggcattgttttctgctccttggtcatgggagtcaccagtgaaagctggcgttcgtttttcaaggaggctctccaaggggttggggacatgggcagagcctattgggacataatgatatccaatcaccaaaattcaaacagatatctctatgctcggggaaactatgatgctgcccaaagaggacctgggggtgtctgggctgctaaactcatcagccgttccagggtctatcttcagggattaatagactactatttatttggaaacagcagcactgtattggaggactcgaagtccaacgagaaagctgaggaatggggccggagtggcaaagaccccgaccgcttcagacctgacggcctgcctaagaaatactgagcttcctgctcctctgctctcagggaaactgggctgtgagccacacacttctccccccagacagggacacagggtcactgagctttgtgtccccaggaactggtatagggcacctagaggtgttcaataaatgtttgtcaaattgaaaaaaaaaaaaaaaaaaaaaaactcgactctagattgcggccgcggtcatagctgtttcctgaacagatcccgggtggcatccctgtgacccctccccagtgcctctcctggccctggaag

SEQ ID NO: 218917 - DNA, 655 bp, Homo Sapiens
caccaggccacagatgattcccagatacgagcctctgcgaggaaggttgcagaaaattaaagtaggagagaaggaaggaccctcccagtctcagaagctgctctggcactgtagtcagtgggtgggaggtttccagctggcttgggggcctcctggggacctggggcacattttttttgatcctctcttggctctgggggtccctggctgctgggcgtgcagaagaaccaccagggacttaagggtcatggagtctggccaggcagctgtgcacacgagaggagtggtatgtgtaccgtccgtgttgaccttcacagacaggcagcagaagccgtccaccctcctgagaagccccacggcctcctccagggtcgtgtcctccaggactgccttgaacaagggctctgaggcttcgtaatcaacctgagggcaagtcgagaaggtcagtctctttcccccgggactctgaatccagccagaaggcagaaggcgctgagggcactgaggcgaggcgcgggccagccctgccgtaggaccactgcctgcacgccttggtcaaaacaaagccacacaccagagcctctgtggggccttcacacctctagtgatgcgtgctacacatagtgctggccagagagtcaactgccaacccttc

SEQ ID NO: 218918 - DNA, 634 bp, Homo Sapiens
  misc_feature (6)..(6): n is a, c, g, or t
  misc_feature (27)..(27): n is a, c, g, or t
caccanaaaggtgccagcgatgcctgngacgcctgtgggagtgaagatacagtccagatcctcacctcccaccatgccacccctcccaccaataaatcctggaggaccgaggccagtgtccttcactcctactgcattaagcaatggcatcaaccattctcctcctaccctgaatggtgccccatcaccgccacagagattcagcaatggtcctgcctcctccacatcatctgcactcacaaatcagcaattgccagccacttgtggtgctcgacaactcagcaagttgaaacgctttcttaccactctgcaacagtttggcaatgacatctcccctgagattggggagaaggtgcggactcttgttcttgcactggtgaactcaacagtgacaattgaggaattccactgtaagctccaagaagccacaaactttccccttcgtccttttgtgattccatttctcaaggccaacctgcccctgctgcagcgggaactgctgcactgcgctcgggcggccaagcagaccccatcccagtacctggctcagcacgaacaccttctgctcaacacaagcattgcatcgcctgctgactcgtcagagttgctcatggaggtgcacggaaatgggaag

SEQ ID NO: 218919 - DNA, 734 bp, Homo Sapiens
caccagcagactttgtacttcataacaatgggaaaaacagcagtcttccaacccaattatttaagtgctgcttttgtgatttcttgaaggtgaagatgcacaccatgtcctcctcgcatctcttctacctggcgctgtgcctgctcaccttcaccagctctgccacggctggaccggagacgctctgcggggctgagctggtggatgctcttcagttcgtgtgtggagacaggggcttttatttcaacaagcccacagggtatggctccagcagtcggagggcgcctcagacaggcatcgtggatgagtgctgcttccggagctgtgatctaaggaggctggagatgtattgcgcacccctcaagcctgccaagtcagctcgctctgtccgtgcccagcgccacaccgacatgcccaagacccagaaggaagtacatttgaagaacgcaagtagagggagtgcaggaaacaagaactacaggatgtaggaagaccctcctgaggagtgaagagtgacatgccaccgcaggatcctttgctctgcacgagttacctgttaaactttggaacacctaccaaaaaataagtttgataacatttaaaagatgggcgtttcccccaatgaaatacacaagtaaacattccaacattgtctttaggagtgatttgcaccttgcaaaaatggtcctggagttggtagattgctgttgatcttttatcaataatgttctata

SEQ ID NO: 218920 - DNA, 709 bp, Homo Sapiens
gcaccagggaaaggaggtcgccgcccggggtcgcccgggcttgcgggtcgccgcgcttcctctgcgggcgctgcgggaggcgagggccgcctcggcggaggaagccgaccccggggtctccgccagcccgccggcgccgcctccgagccgcctcggccgtagcctcggcccgggcgggaggcggcggccgccggcgaggcgaggcggcccgcgccctgcctgtcaggccaccggcccggcccgcgggctgcccccgatgcggaggcgctgtcgccggggccatgcagcaggcgccgcagccttacgagttcttcagcgaggagaacagtccgaaatggcggggactgttggtctcggccctgcggaaggttcaggaacaagtgcatcccactctctcagctaatgaagagtctctctattatattgaagagctgatttttcagctgcttaataaattatgcatggcccagccaaggactgttcaagatgtagaggagcgagttcagaagacctttcctcacccaattgataaatgggccattgctgatgcacaatctgctatagaaaaacgaaaacgaagaaatcctcttttactgcctgtggacaaaatccatccttcgttgaaggaagtattagggtacaaagtggactaccatgtatccctatatattgtggctgtactagagtatatctcagctgatattttaaa

SEQ ID NO: 218921 - DNA, 705 bp, Homo Sapiens
  misc_feature (694)..(694): n is a, c, g, or t
gcaccagggcaaagcccgaatggtctctagcgaccggcccgtgtcactggaggacgaggtctcccatagtatgaaggagatgattggaggctgttgcgtttgctcagacgagagaggctgggccgagaacccgctggtttattgcgacgggcacggctgcagcgtcgcggtgcatcaagcttgctatggcattgttcaagtacccactggaccgtggttttgcaggaaatgtgaatctcaggagagagcagccagagtgagatgtgaactttgtccccataaggatggagctttaaaaagaacagataatgggggttgggcccatgtggtttgtgccctgtatattccagaggtacaatttgccaatgtttccacaatggaaccaattgttttacagtctgttccgcatgatcgttataataagacttgctacatttgtgatgaacaaggaagagaaagcaaagcagccactggtgcttgcatgacatgtaataaacatggatgtcgacaggctttccatgtaacatgcgctcagtttgccggactgctttgtgaagaagaaggtaatggtgccgataatgtccaatactgtggctactggtaataccattttagtaagctgaaaagagcaacggggatctaataggtcatatgatcaaagtttaagtgattcttcctctcactctcaggatanacatcatgaga

SEQ ID NO: 218922 - DNA, 714 bp, Homo Sapiens
  misc_feature (574)..(574): n is a, c, g, or t
  misc_feature (631)..(631): n is a, c, g, or t
gcacgagaggtggcctagcgctggcggggctcaccccaatccgtctgccttttgatgccgtactctgctggttgcgcagccacctcgggatactgcacacggagaggagggaaaataagcgaggcaccgccgcaccacgcgggagacctacggagacccacagcgcccgagccctggaagagcactactggatgtcagcggagaaatggctttgagctcagcctggcgctcggttctgcctctgtggctcctctggagcgctgcctgctcccgcgccgcgtccggggacgacaacgcttttccttttgacattgaagggagctcagcggttggcaggcaagacccgcctgagacgagcgaaccccgcgtggctctgggacgcctgccgcctgcggccgagaaatgcaatgctggattctttcacaccctgtcgggagaatgtgtgccctgcgactgtaatggcaattccaacgagtgtttggacggctcaggatactgtgtgcactgccagcggaacacaacaggagagcactgtgaaaagtgtctggatggttatatcggagattccatcagngggagcaccccaattctgccagccgtgcccctgtcccctgccccacttggccaattntgcagaatcctgctataggaaaaatggagctgttcggtgcatttgtacgaaaatatgctggacctactgtgaaagatgtgctc

SEQ ID NO: 218923 - DNA, 626 bp, Homo Sapiens
  misc_feature (564)..(564): n is a, c, g, or t
cacgtttgctatgttgccctttggagacaaaacaagagaaatggtcaatgcatggtttgctgagagagttcacaccatccctgtgtgcaaggaaggtatcagaggccacaccgaatcttgctcttgtcccttgcagcagagtcctcgtgcagataacagtgtccctggaacaccaaccaggaaaatctctgcctctgaatttgaccggcctcttagacccattgttgtcaaggattctgagggaactgtgagcttcctctctgactcagaaaagaaggaacagatgcctctaacccctccaaggtttgatcatgatgaaggggaccagtgctcaagactcttggaattagtgaaggatatttctagtcatttggatgtcacagccttatgtcacaaaattttcttgcatatccatggactgatatctgctgaccgctattccctgttccttgtctgtgaagacagctccaatgacaagtttcttatcagccgcctctttgatgttgctgaaggttcaacactggaagaagtttcaaataactgtatccgcttagaatggaacanaggcattgtgggacatgtggcagcgcttggtgagcccttgacatcaagatgcatatgaggat

SEQ ID NO: 218924 - DNA, 718 bp, Homo Sapiens
  misc_feature (682)..(682): n is a, c, g, or t
gcaccagggatgagaggcaggcgcttcagagaagctaagaaaagcacctctccgcgcgccccacctcctccgcctcgcgctcctcctgagcagcgggcccagactgcgctccggccgcggccctcgccccgcggagccctcctaccccggcccgacgctcggcccgcgacctgccccgagccctctccatggaggcagcccgcccctccggctcctggaacggagccctctgccggctgctcctgctgaccctcgcgatcttaatatttgccagtgatgcctgcaaaaatgtgacattacatgttccctccaaactagatgccgagaaacttgttggtagagttaacctgaaagagtgctttacagctgcaaatctaattcattcaagtgatcctgacttccaaattttggaggatggttcagtctatacaacaaatactattctattgtcctcggagaagagaagttttaccatattactttccaacactgagaaccaagaaaagaagaaaatatttgtctttttggagcatcaaacaaaggtcctaaagaaaagacatactaaagaaaaagttctaaggcgcgccaagagaagatgggctccaattccttgttcgatgctagaaaactccttgggtccttttccacttttccttcacaggttcaatctgacacggcccanaactataccatatactattccataagaggtcctggg

SEQ ID NO: 218925 - DNA, 771 bp, Homo Sapiens
  misc_feature (2)..(2): n is a, c, g, or t
  misc_feature (8)..(8): n is a, c, g, or t
  misc_feature (10)..(10): n is a, c, g, or t
  misc_feature (698)..(698): n is a, c, g, or t
  misc_feature (740)..(740): n is a, c, g, or t
gnaccagnanaaaactccccagctaaacacccgtaagacttcatacaacacaatactctatactgtgatgatcacagctgccaaggctacctaaaagaagacagttatctcatatttggctgccagctttttatctttctctcgaccacttaaaacttcagacttcctgtcctgctggtatcatggagaaagtccaatacctcactcgctcagctataagaagagcctcaaccattgaaatgcctcaacaagcacgtcaaaagctacagaatctatttatcaatttctgtctcatcttaatatgtctcttgctgatctgtatcatcgtgatgcttctctgaagttctgctacaacctctagatctgcagcttgccacatcagcttaaaatctgtcatcccatgcagacaggaaaacaatattgtataacagaccacttcctgagtagaagagtttctttgtgaaaaggtcaagattaagactaaaacttattgttaccatatgtattcatctgttggatcttgtaaacatgaaaagggctttattttcaaaaattaacttcaaaataagtgtataaaatgcaactgttgatttcctcaacatggctcacaaatttctatcccaaatcttttctgaagatgaagagtttagttctaaaactgcactgcccaacagttcacttcatatataaagcattanttttactcttttgaggtgaatataatttatattacaatgtanaagcttctttaatactaagtatttttcaggt

SEQ ID NO: 218926 - DNA, 718 bp, Homo Sapiens
gcacgagccggggagggggcgggccctggccgcggctgctacgcggggctgccaccgccccgggcgacccaatttcgcggcctagtggggcgtacgggcctcttttgaaagcctgagttacgatgtattgagcgcgtcgtatgcggccagcactaaggtccttctggcactcctctggtggaccgcccccatcggccacacttgccctgctctccagtgattctgtagctcctggctccgtagtctcgcggacagctctctttcctggaagatgtttctggtgggcctgacagggggcattgcctcaggcaagagctcagtgatccaggtgttccagcagctgggctgtgcggtgattgacgtggacgtgatggcccggcacgtcgtgcagccaggataccctgcccaccggcgcatcgtagaggtcttcggcactgaggtcttgctggagaacggcgacataaatcgcaaggtcctgggggacctgatctttaaccagcctgaccggcggcagctgctcaacgccatcacccaccccgagattcgcaaggagatgatgaaggagacgttcaagtacttcctccggggataccgctacgtgattctggatatccccctgctgtttgagaccaagaagttgctcaagtacatgaagcacaccgtggtagtatactgcgaccgggacacacagctggcacggctgatgcggcggaacagc

SEQ ID NO: 218927 - DNA, 762 bp, Homo Sapiens
  misc_feature (628)..(628): n is a, c, g, or t
  misc_feature (662)..(662): n is a, c, g, or t
  misc_feature (691)..(691): n is a, c, g, or t
  misc_feature (711)..(711): n is a, c, g, or t
  misc_feature (735)..(735): n is a, c, g, or t
tattgggagatccacagctaagacaccgggacctcctggaagccaaaaatgggaccattgcaatttagagatgtggccatagaattctctctggaggagtggcattgcctggacactgcacagcggaatttatataggaatgtgatgttagagaactacagtaacctggtcttccttggtattactgtttctaagccagacctgatcacctgtctggagcaaggaagaaaacctttgaccatgaagagaaatgagatgatagccaaaccctcagtgagcttccttcaagttcacagtgagagccaaagtcctcttcatgacatataagagactgcacagtgtggctgcttttccataatttttgggacgcacaaatgtctgcatgattttgagaaactaaaattactctcaaagttctctttttgcatcagatctgaaatgtctgagagtaatagtttctgttgaatttttttttgttcatttttctgcacagtccattctgtttttattactatctaggcttgaatatatagtttgaaattatgacatccttcctctttggtattttcctcatgattgctttggctattcaaagtttattttagtttcatgtaaatttttgaattgnattttccattattgggaaaatagtaccactgcantttataggaagttattgaatctatagatnactttggatatatggcactnaataatattctggtttcattctanacaaaatttaaaattattggatctttc

SEQ ID NO: 218928 - DNA, 663 bp, Homo Sapiens
  misc_feature (596)..(596): n is a, c, g, or t
  misc_feature (617)..(617): n is a, c, g, or t
ttaggtaaatgagatcatgattctggaaggaggtggtgtaatgaatctcaaccccggcaacaacctccttcaccagccgccagcctggacagacagctactccacgtgcaatgtttccagtgggttttttggaggccagtggcatgaaattcatcctcagtactggaccaagtaccaggtgtgggagtggctccagcacctcctggacaccaaccagctggatgccaattgtatccctttccaagagttcgacatcaacggcgagcacctctgcagcatgagtttgcaggagttcacccgggcggcagggacggcggggcagctcctctacagcaacttgcagcatctgaagtggaacggccagtgcagtagtgacctgttccagtccacacacaatgtcattgtcaagactgaacaaactgagccttccatcatgaacacctggaaagacgagaactatttatatgacaccaactatggtagcacagtagatttgttggacagcaaaactttctgccgggctcagatctccatgacaaccaccagtcaccttcctgttgcagagtcacctgatatgaaaaaggagcaagaccccnctgccaagtgccacaccaaanagcacaacccgagagggactcacttatgggaattcatccgcgacat

SEQ ID NO: 218929 - DNA, 344 bp, Homo Sapiens
cgcagtccgctcttgcccctgttctttgcttctcgttttgttggtgaagatatcacagtgatgtctgcattcaacctgctgcatttggtgacaaagagccagccagtagcccttcgagcctgtgggcttccctcagggtcgtgtagggataaaaagaactgtaaggtggtcttttcccagcaggaactgaggaagcggctaacacccctgcagtaccatgtcactcaggagaaagggaccgaaagtgcctttgaaggagaatacacacatcacaaagatcctggaatatataaatgtgttgtttgtggaactccattgtttaagtcagaaaccaaatttgactc

SEQ ID NO: 218930 - DNA, 452 bp, Homo Sapiens
ttacgaaagctgaaagcgtgcgaggggggtggggtggaaatagcggctgcttcttttccaaggatttatttaatggggatgtgttcaaggcaagaccgaattcagaaggatatcgacgtcgtgatccagaagtccagagctgaggactgcctgtttgcagatactgtacaggacaacctgcttttcatattctctgtgaatttcaaagacgactgggattttcttcctcctctaccaccctgaacagcaagaccaatacatcctgtatttcctcctcttcagcctacttgtgaagacaaggatgaagacctccatgatgagccatctccacttaatgactgtctcacattggccggcaacttgttccaggtatagttgtgccggatgtggaactccacatctatgttcatgatgcggcggccagggccggcggcgggggccacgaccgcgac

SEQ ID NO: 218931 - DNA, 675 bp, Homo Sapiens
accgtatcttttgccaggctagagacagggagagcagagtaaaaccctcaggctgctgaaatttctaggctgttaggaagcccctcgaattctgtgaaaatgagggtttcttaactcacactgagagcggaaaggggcagacccttttcataactccctcaagtgtgtgttacctttctttaccagcatggtaagcaacaggacatatcccagcctcggacatgtctgtatgatccaaggtacccaaagtcagacagagtaaactcaagcctggcactggctttctgccgcttcatgtgctttggaaaaagcaggagaagcaatagcagcaggagtccccagcagctggagccgcaagaatgaactgcaaagagggaactgacagcagctgcggctgcaggggcaacgacgagaagaagatgttgaagtgtgtggtggtgggggacggtgccgtggggaaaacctgcctgctgatgagctacgccaacgacgccttcccagaggaatacgtgcccactgtgtttgaccactatgcagttactgtgactgtgggaggcaagcaacacttgctcggactgtatgacaccgcgggacaggaggactacaaccagctgaggccactctcctaccccacacggatgtgtttttgatctgcttctctgtcgtaaccctgcc

SEQ ID NO: 218932 - DNA, 755 bp, Homo Sapiens
  misc_feature (698)..(698): n is a, c, g, or t
cacgaggagaaggagcgcggggaggacgtaccttgtgagatgcgagccggccaacagcttgcaagcatgctccgctggacccgagcctggaggctcccgcgtgagggactcggcccccacggccctagcttcgcgagggtgcctgtcgcacccagcagcagcagcggcggccgagggggcgccgagccgaggccgcttccgctttcctacaggcttctggacggggaggcagccctcccggccgtcgtctttttgcacgggctcttcggcagcaaaactaacttcaactccatcgccaagatcttggcccagcagacaggccgtaggatctccatcggggctggcccatgcctaggcgcctgcaccctttccatgaaggggcctgcttgttcactagggatgaccgggagctcaccacctcttatggcagcccattcttctgtgctcctactgttggaaattcctggagtctccttcctggcattctccgagattgccacccagccaggccagcccttcagagacgtggtcacaaccctggggcctgctcttctctggcagagtggccccaggttcttcatctgggcctcctaggtctggaaactgggcccttcccctccacagggtgtatccccaggctctccacacctttgacctgctgtccctacaagcctttggctgtctacccccagaatggngatatcaacgcagccccgtctcaccccactcccagtgctgacggtggatgctcgtac

SEQ ID NO: 218933 - DNA, 423 bp, Homo Sapiens
gtgctaccttccagaaacgcccagggccgcaagcctccaggggcttccagacccttgagacactggctgacattccggcctccccacagctgctgaccgatggccactacatgacgctgcccgtgtctccggaccagctgccctgtgacgaccccatggcgggcagcggtggtgcccccgtgctgcgggtgggccatgaccacggctgccaccagcagcccttctgcaacgcgcccctccctggccctggaccctatcgtacagaacctgctaaggccatcaaacctattgatcggaagtcagtccatcagatttgctctgggccggtggtactgagtctaagcactggatgaagaagataatagaaaacagtctggatgctggtgccacttaagttgatttttagcttaaagactatggaat

SEQ ID NO: 218934 - DNA, 378 bp, Homo Sapiens
  misc_feature (9)..(10): n is a, c, g, or t
  misc_feature (176)..(176): n is a, c, g, or t
  misc_feature (178)..(178): n is a, c, g, or t
  misc_feature (181)..(181): n is a, c, g, or t
  misc_feature (189)..(189): n is a, c, g, or t
  misc_feature (193)..(194): n is a, c, g, or t
  misc_feature (198)..(198): n is a, c, g, or t
  misc_feature (206)..(207): n is a, c, g, or t
  misc_feature (222)..(222): n is a, c, g, or t
  misc_feature (228)..(228): n is a, c, g, or t
  misc_feature (233)..(233): n is a, c, g, or t
  misc_feature (238)..(238): n is a, c, g, or t
  misc_feature (362)..(362): n is a, c, g, or t
accaccagnnttaaaacccattttactttcccctttttatatggagaaacatatttgagtcagggaaggctttcctctaaacatcagtcctacggagaaactgggaaaatcctgatatttggcttatcactttggacgcaaaatccactttgctgtaacgggcatccgaactcccntnagngagcaagnaagnnaaantaagggtnnatactgggggctatngatggnaaagntttcnaaaaagtattaagggaaaattactgcagtttacccaaaaatatgaggggtgggtcaacattttctgataggaatgggtaaactgtttttttcttttttttttttttttttttgaggacaaaggntcccctctgccgcccg

SEQ ID NO: 218935 - DNA, 489 bp, Homo Sapiens; identical to SEQ ID NO: 60435
  misc_feature (385)..(385): n is a, c, g, or t

SEQ ID NO: 218936 - DNA, 524 bp, Homo Sapiens
agtaacaggcattttattgggtggcatctgagcgaatcccattgccacctcacagtgtagaaccagtagaactaagaatactccagcctgtgcccccacccagccacctgccccggcccctcatgggaaatgacacagatcctggaaggacacagaacccacacccagcccaggtggcaccagcacccacccccatccatgggccagtggcactcggggaatggccacaccagctccgggtggggtcccatgcaggcatcctggaggaagacccaacactttcacagtcccctaagaaccatccttgaaagtcatgctttacagatctctgaccactcagaatccaagcaggaggcatctgtgggaggaatcgtggtcacagattggctgcgtcaaaaaaagaatgggccagtgagggactggtccacacagagccccctggcttgtcattggttccagaggctcgggcccccccaaagggctgctgacccactatcgagccagtggacttgtcgttgatggga

SEQ ID NO: 218937 - DNA, 560 bp, Homo Sapiens
  misc_feature (543)..(543): n is a, c, g, or t
tttacatcttttatgccacacaaaaataatcatatggaacagccccatccccaagacactgactcggtcctcagacctatgggcttcctatgacccacctctcaccagtctctcagaagtacatcagtatttcttttacctgattgattacatatgagttctctgatgagatccttctaaggatggaagagatgagctctttctaaagatgaacggaactaccctgagctcaggtaatataacgaaaaaaaaaaaaacaagatccagtggaactaagagaaacaggaatgcaatcaagccacatgcagctggtcaaagcacacctcatctcagggagaaatcccccacggtggtgggagaggagctaattgcatcggtactatcatatgactaaagcaggatgaatggtttacaagtcagaacttctacatcagtggactcaacacttacaaattggactgaaacatttatatggacattaaaacggggcagaaatcaaagtagatgatatatatggaaaattaccatgaagagaagcacatnctgtggagctgtatata

SEQ ID NO: 218938 - DNA, 462 bp, Homo Sapiens
ttttgctcatgtaatagaaatcatttggttttgcctacccagaattccttacccgttctgtttaaaaataaaaacataaaaacaaaacaaaacaactccgtattattattatacattggtattttcaatcacacagtcatgcctcctcaacctcagaggtggcctggtgattaattagacgggggaagaggggaagatcaaaaatgcttgataagaagggataaatacgggctgggaaagagaggatgctctttagctgctagctataagaatgtcagcctagctttaccactatacagagaaaaggagaattgaaacatggaaagagaatcaagtccctatgacatcatccaaatccctggatccagccattcctaaaaccagtgtcacaatttggctttcccagttacatgggccaataaatcttctaccccgctccctttttgttttccttaagctcat

SEQ ID NO: 218939 - DNA, 502 bp, Homo Sapiens
gataaaaatccttttaataaagtatatcagtgacaacttcctgtttaaatatattgttaaaaaatcatgcaagagcattttgttatcattatgaggaaagatttgagactactgttccttctgcagaaacgctatgcacagatgcaaaatgatcaaaggctgatacaataatgaatctcaagtaagtagcggagccatcatgtgcctgtatgggaaaaaaatcaatataaatgcttttagcagtgctagttaactgttaacaagcagttagcaaaagaaacagcttgatgcaagagtaatattctaaatatataacaacacataaggccagctacatataatagttgtggtacatatcagctaaataccagccttgatttgatgaaaaatagcaactggagctaaaaactgcaactctcattttttgtagggacagggtctcaccgtgttgcccaggctggtcttgaactagcctcaaagctagtctcccaaagtggctgat

SEQ ID NO: 218940 - DNA, 508 bp, Homo Sapiens
tgttttaaaatgtagttttttaatatgacaacttccatatcagagtcataaacttttagtcccctcaacttttttacaagacagacattataatttatgtaacatgttcgtctgcttattagaagttaacctagcactgagatttatataaaaggttacatttcttgcttattaaaactttactgtactttcacagattcttcagagcatggctaacccaacaagactaaaatatccccaacaagactaaaatatctaataatcaaacattaatcaggaagtgttttattgagagcagtggtttaaagcatagggaataatccagtataaaactgatttgaggcatattacttcccaattagtaatatgtagaatgcaagtaatttattttttaaagttgatatgaaataaataggtaagaattttgaccatgacccagcaaatcagtaactgagctttttatagaatggaaggtgatgatcagagacagaaaccatagaataaataa

SEQ ID NO: 218941 - DNA, 390 bp, Homo Sapiens
ttttgtttttttttttttcacaataaagtctgcctttattgatgggtatcatgtttactatcccgggtaaggggggagttcaggaaaatggcccacaacctgtcacagcctgtacttcaagagacactcagcaagatgatgacgacgacaatgatgatgatgatgatgatgactcagcaagatgatgacgacgacaatgatgatgatgataatgatgatgtgtgtgtgtgtgtgtttccgggtatccacatactctgctcttcctcactcattcacctcagacccactcagtcctctttagggcatctctttcacctgattctctctaccaaaaatttttctaactctctcctccctctgtccaaaacctccccatccttcagggcctgg

SEQ ID NO: 218942 - DNA, 330 bp, Homo Sapiens
cgactgtaaccatgctagcaaacttagtaccctttactgtaaccctgatatcttttctgctgttagtctgttctctgtgtaaacatctcaagaagatgcacctccatggcaaaggatctcaagatcccagtaccaaggtccacataaaagttttgcaaactgtgatctccttcctcttgttatgtgccatttactttgtgtctgtaataatatcaagtttggagttttaagaatctggaaaacaaacctgtcttcatgttctgccaagctattggattcagctgttcttcagcccacccgttcatcctgagccagaatcaaaaaaaaaaa

SEQ ID NO: 218943 - DNA, 1000 bp, Homo Sapiens
gggttcaggtgatcctcccacctcaacctcccaagtagctaggactataggtgcatgccatcacgtccagctaatttttgtatttttcggagagacagggtttcaccatgttgccccactagtcttggaactcctggactcaagtgatccacctaccttggcctcccagagtggtgggaacaggcatgagccaccacacagggccctaaaacacatttttttaaaacacatttggctatttagtttttattttcaccaaaatggacatgaggaaactatggatcagatataagaggactgccttaccaataggtcattattctttttgcatcaactgccttcccaaccactgaccaatataataaagactacagaactacctctcaataagaagcaggaacataaccttaaaccagtatcttccttgttacgttcttcctaactacttataaaatctccagttctcttcctactacataaccttcccacaatcaaaccaacagctcaaagacatctaaaattacaagatcatttcattacgtgctcctaaaagctgctcctacaacttagacaactacttagggaagaaagaataaaatgttaactaattttaaagtcccatttgctataaggaaacagcctattttgatgctaaaaaggaacttaatttaaaataattccaatcactttgtgctcaaattgagctagacaaaaaatctaatcatactaaagctcctcagaaacctaacaaaaagtatcagaaactatgctgattactctggaggaggatgccttctacctctcctcatcctcttatcccacctttttgcctcctacaagttatccacaaaatattaagtaactaatcttgtacttgcaaagtggcagagttccatatggacttaagaatgtctgatggaaattactttcattatattcaaattagtagcctagaaacaaaagctaaatattgtattaatttcctaaaaaaaaaaaaaaa

SEQ ID NO: 218944 - DNA, 454 bp, Homo Sapiens; identical to SEQ ID NO: 144065

SEQ ID NO: 218945 - DNA, 500 bp, Homo Sapiens
  misc_feature (424)..(424): n is a, c, g, or t
  misc_feature (448)..(448): n is a, c, g, or t
ggcaataggaaacattttttaatgaacaaacaactttcacacaaactgtctgtatcacattgttattacaacacagatgagctgaaacgtttttgtacagatttggaggatgggaatcctaaaaagaaatcaagcatatagaggtagttgaatagcaatatggggggaaaaaagcattatcttatatttcccttcagttcattacagtgcaagagtaaaatggctgcttaccaaacaaatggaaaacacacacacatttgccactgtttacgtggcttgcttgatattttaatcctggcattacttacaactgcataagatgatggaactaatttacctaaaataagcctatggtgccacattggcctatttgctttccttttattccattattagtgttgctttaacaatagataaatgttantcaacttttaaaattatgcattanctacagtgttgctttgtaaacttctgttaaatcgcgtttgctgcaaaaacat

SEQ ID NO: 218946 - DNA, 504 bp, Homo Sapiens; identical to SEQ ID NO: 40555
  misc_feature (489)..(489): n is a, c, g, or t

SEQ ID NO: 218947 - DNA, 586 bp, Homo Sapiens; identical to SEQ ID NO: 141290

SEQ ID NO: 218948 - DNA, 447 bp, Homo Sapiens
tttttcagtttctagcttcagtaatggatgagcatatggagagcacaggctagagaggaacaggatttgaaagaggaaaatggtgatttctgtttgaggaatgtttttcaaaatgtcagtatcatctccagggggacattactggtaagacacgcctggagttcttaaaagaaggagcactggagtttgagattttgaagacatctttacaagagatattctctgttcagggattcagtttcttcctggttcaatcttgggaggttgtatatttccaggaatgtatcatttcttttaggttttctagcttgagtgcatagaggtgttcacagcagtttctgagagtttgtatttctgtggagttggtggtaatattccctttgtcatttctgattgtatttatttggaacttctctctttttttattagtctagctagcctcgtgcc

SEQ ID NO: 218949 - DNA, 501 bp, Homo Sapiens; identical to SEQ ID NO: 154226

SEQ ID NO: 218950 - DNA, 551 bp, Homo Sapiens
gctttataagaagcaatgtccacagaattaaaggatgtcaaacagggctgacttttggttaaaggttttctattagtagagtctttagtgtgaaaagaagctgcagtaaccactgtatatgacagaggtctggtgttagtaatttgccgtgctttcattgcttgctgttgtttttccagagcagctaacatgtcccctaaatctagctgcacaggtgttttattcttttttccagctgcttttgataaagcttcctgtaattttttttgctccatacttatttctgaatactcttgagctgtggcaagggctgctgctaaagctttcttcttctgactttttgcacgtttgggaactgaggtggtaataggaattggagtctgaactatattgattggtgagttttcaggtaaatcatccaatactttagaagaaagtttttgttgaatattctcatccttagcatttccattctcatttagttcttgaaacccatcttcatcctcaaaatataaagactcagaatttggatcgcttctatgggattgact

SEQ ID NO: 218951 - DNA, 476 bp, Homo Sapiens
  misc_feature (317)..(317): n is a, c, g, or t
gcggccgcctactactactactaaattcgcggccgcgtcgacgtatcttataactgcctttaatacagaagtttgttcagtgactggccattccctatgtataccaccaccttagttctcacccacaacttgaaaatcatgtttaagtatgtgtgtccccaaccacattgtaaagtccatggtattgcattcataattgtttacccatcattaagacataatagtgctcagtaatctgatgtaaatatatattgaactgaactgaaatgaatgtagacagtacattggactgccttcaaacagaggaaaacgtgtanggtccagtcctacggggcttagcaggtgttctccctgtgtgcagagacaagagattgtgataaataaagacacaagacaaagagataaagagacaatagctgggccctggggaccactaccaccaagacgcggagacccgcagtggcctcaaacgactg

SEQ ID NO: 218952 - DNA, 596 bp, Homo Sapiens
ttcactttgctgtagttttaatgtttcactggaacatatgcttctgtcacccacatatgtcacctccagacacacacaaaacacacgccaacaccaagttcagagagtctggcctgacccgcgctcagtcaaggctgaggccatcattctgaccacaggtcagggaagggagactggggaagccccctcaggtggacaaatgacatcccctggcattgcaaggaatggagtgacgccactcagcctggctggactgagccaacggcccacctctcctgcataagctgtctgccaagaaaactattgaactacataaaaatccatccctgaaatcccagaggcatctttagaatggagcatggactttacattagaatgtgctttaacaaaaaaaaaaagagagagagagagaaagaaaaaggaaaagcaggttttgcctgtaacttgagttcaggtttgtgacactgggtggccaaagagcactgcctaccctggccgaggccaccaggctcagttcctgcaatattggctgtgaagggaaccccagccacaccgggttcagcgcagaaccagcacatgttcccatggaaactctg

SEQ ID NO: 218953 - DNA, 494 bp, Homo Sapiens
aagtttaaaaaagaactttattgacaaaagtaccgggaccagctaaaatagacattctacaagatataaacagattattggcctctaattttctacaggcagaaagcaggttgaagaacccatttatccaccaaaaagggcatattctctaatgtcctttgcaagtgactaaggaagatgagggaaaaagaatgattccctagagtgtagaacaaagagctgtggaggatagactggaaagtcatttttaaggagcagaaacagtgcctaatcatgaaacacaattccctccaatggaggaacctgacaaccattgtccaatgagttttcctaattgttatggaccagtggctgtgatctgcttccatttctcccctttgtgaataagagtatttttttgtggttattattgtctctattccatcatttgttgtatgtttggtatgtgataaaaagatgcttgctcttttaattcataggtctctatatcaaga

SEQ ID NO: 218954 - DNA, 453 bp, Homo Sapiens
ctttcctctcactcagcgtcctgtgattccaaggaaatgagtctctgctgtttttgggcagcagatatcctagaatggactctgacctaagcatcaaaattaatcatcataacgttatcattttatggccccttcttcctatatctggtagcttttaaatgatgaccatgtagataatctttattgtccctctttcagcagacggtattttcttatgctacagtatgactgctaataatacctacacatgttagaaccattctgagtcctcaagaatctcatttagctcttattatcagtgaatttatcatcatccccaattttacataaggaaatggggttagaaagaccaaataacattttttcaacatcaaaacactagcttgagatcaagcccagacttggatctgttgtctgaattccaagctttttgttatttattgatatgttttg

SEQ ID NO: 218955 - DNA, 573 bp, Homo Sapiens; identical to SEQ ID NO: 59880

SEQ ID NO: 218956 - DNA, 511 bp, Homo Sapiens; identical to SEQ ID NO: 62021

SEQ ID NO: 218957 - DNA, 488 bp, Homo Sapiens
aaccaagcttaaaatgaagctttgtgtttgaaagtaataacaagctcagacgaagatggtggttgtacattattcatctagaaaatataaaaattcattttgttttgaagctagttattaaactggaatagcagttatatccctgagaatggggcccttctcttgacattcctttgttgtttaattctttagaatcttaataaatgtttttttaatcctgagagattaaacagtagtagacttgttaagaatgaaactgtaaccaaaattttaaaataaagttttttttaaaaaaaaaacctgatttttagatattttttgttcttgtctatttgaattggttcataatatggcctgaactctaagccaaggtactagaaattaagatttcaattttaagtggttatttttgtgattgacaataaaatggtaccttttgtgaaatgttagtgaatgttactggacgtcattcaagtttgatgaattgg

SEQ ID NO: 218958 - DNA, 467 bp, Homo Sapiens
agtttttcttttttaatatattttaaatgcttatttatatttatgaaaagattcataatatattgcctggtgagaaaagcatgatgtcttataagagtatgattccatttttaaaaacaaaatgcatgaatatgtataaatattaatataacattctcaaagatagctttgaaaatgcaatatagcaaagtatctgaaaaataaatcaagaacacaattgtatttacaatagctataaaatgataaaatacctaggaataaatttaatcaaaaaggtaaacaattcttacacagaaaactgtaaaacattgatgaaataaattgaagaagacacaaataaatgaaagatatcccatgtttgtagcttggaggggttaatattgttaaaaatgtccataacaaccaaagggatctacagatttaatgaaatctctatcaaaataccaatgacattctccattgaaata

SEQ ID NO: 218959 - DNA, 497 bp, Homo Sapiens
ttttttttgtttaactgacaatagctgacacctagtacttactatgtaccaagcacttttaagccccttacatgttttacctcatttaatgctcacagcaactctatgaaataattactattattatatatgatttacagatagtaaatggaacagagagaaatcaagtaaccagctctaggtccctagctagaacccacgcaatctggccctggtgtgtgtgttgtcactttatattacccatctatgacagtcacttccaaaatgaaagatacagatttgtactgcaaagacatgaatgcaaaacgcattttttaaagggctgcacaagacgatcaattgaaaagaaatttcgatttccacaaaattttttaggagacaactgaggaaagaccttaaattgtaaactatagcctataaagtttactgaaatttgacagtcccccccaaaaaaattactaaagcgacaccaaaaattggcatattactgtgacagg

SEQ ID NO: 218960 - DNA, 513 bp, Homo Sapiens
ttttaacattttttgtccattttttattgagatacaacttacatagcatcagattcacagaattcaccttttaacacgtaaaattcagtggcatttagtgcattcacagtgtggtgtggctgcctccactgcactcagccacatgtggatttctttatgcgtggagtgcttctgccttgaaggcagtcagagccttccttagacccaggtgtcgtagtaactgtcatgcaggcctaggaaccccaactgccccggtgttccccagtgtggcccgcttggctcccccagccctcctgccgccctcatcctttcttctgtggtggctggaggcccccggggtctgatggagctgctcttggccacctgcaggttctcttctgctttgagcagtttgatgagctcaccctgctgcaccttcgtgagtttgacaagaagaagctgatctctgtggagacggacataggtcgggatcactaccaagaggagaaggttgaggacaggtcccccagtagc

SEQ ID NO: 218961 - DNA, 492 bp, Homo Sapiens
tatactttgtttaaaattttctacaaaattgtatattttttaataattaaggaaagagaaatctttttttaaaaaaatacatttatttcaaccatattgtaacttctgtttaactccattgcctaattccaatggaaaaaatgtatctatctgtagccttctttggaatattttccagatcttctccccgtcatcatttctatagccactactgcaggaaggttttatcatcgtgtatcccctcttcggtgtgattatgtcaggagcagtcaatgctagagaaatttttgctcctctaatttaataataataactaacatacattaggtacaccaagtaccaggctccttgtaaataccctgcatacaatatctcatatgattatcttttattttagagtgaagactattggaggctttggaaaagttaagcaattgctcaaggtcacaaactgggaagctgggactcaaagcctttgctctgacttaaagg

SEQ ID NO: 218962 - DNA, 470 bp, Homo Sapiens
ttttactgtagttttaatcaggaacagtcccagatgatgagatgcgcgctttcccactagcttggatgcaaatcgcgcttgggttttgggagggagccctctgcccctggacctaccaggtaatttttttcccctttcttcttttcgggaagacagaggggcttcttctaccctctttccaaaacaaatagacaaagtggcgagggagggaagatgagactttcttctcatagtttaatttaaacgctaataaaacaagaaaatggcctataaccgcatagactgctgaaggcgctccctgtttcttttctgaaccctccctcggcaaacctgagggagaggccgtctgtctttctgatcagcttacctgacactgttgtctataaccggagctaaactcataagcggacccctctggtttttacaagcccattatctctcgggttttagcaggttcccccttttcccca

SEQ ID NO: 218963 - DNA, 623 bp, Homo Sapiens
catttagaaaatattgatctttgtttaatatgcatcatttaataaaacgcagggagggagctgtacaatgcagttttaaaatatttttattggactggattaaaacatcactctgagaacacttagtcccctcacatgctagatttccttttcaaaatgtaatcttgatgatataataatgcataacttaaacttcccttcccttcaaaacatccttggttctactcaaggacctctaattccatagtatcttttgtagacacagaaagtatgcgttttctttgtctttgtgatgtattacacctcccagtgcagaattttaatatattccacatatcatatcttcctgtttcggttacaaaacagtacagaattggatcagcaacacaatttaaacttgttaatgcaaccgtgattctatacattgtgtaagttcgcttcccagaattgctgtggtcttcgaagttcacagcatgctctaaaatgcagcgaatcagcaacatcacatgaaagggagttaagcataaaacaaaagttactgtgatgctgacaagtagttgtatgattctcttctttcccttgttttacgtggctttattgggccgcacagcttggtagaactt

SEQ ID NO: 218964 - DNA, 537 bp, Homo Sapiens
tttaacgggagagaattgttttaaattcttaatttgttaatgacatgcataatcacatagtacatagactgtgttcatggcaattacttgtattcttagaatgccagtttttgcttcatgcagccatttatattagagcagtggttctcagccaggcacatttttgccccctggggatatgcaatatctggagacatttttggttgtcacagctggggagaggggtactactggcatctagcaggtagtggccagggatgctactaaacattctacaatgtacaggacagttcccttccccaaccctcaacaaagaattaggtggcccaaaatattaatagcactgaggataagaaatcctgtactagaagttgtaagtttttcatcccccatgggctagatctgatatgcagatgtattttattttgcccatacaatatttctaagtaatttttaaattagttgatagcatacaaatttctggcttgatgaaaatgtagttgatgtagtaactctgagcctatattccagcaggat

SEQ ID NO: 218965 - DNA, 516 bp, Homo Sapiens
gttatttgacgagatgggcttttattaacctctttgttagtttcatcaatcgagaagagaggggagggtatgcaaaataaaaatgttagaaaatgggccacactttacaaattgagattatgtctccagttaaatgagttcccctattgctgtgtaattcacaagaaattctccaagagggagttaccaattcaacacatatttacccatgacttccacggtggctcttctgtaaggaaatgcttgaacccaaagagagaacatgcagatcataatcagttcatatttataatcttgggctggaggcaaatgcatacagtttaccaaatatgaaaaggtgaggtgggcaaagggaaatgcccttgagatcccaattcctctggccaacgaaagacaaccaaggtttacttccagaacatcatggggtgaatgaatgatgcacagtgaacacctgcctcgtggccgacataaaatggcttttgccagataaccgacatcatgtctggcaagggaacc

SEQ ID NO: 218966 - DNA, 546 bp, Homo Sapiens
tacatcaaaaaggaaatatttttgacttgcttttcttctgtaaatcctcccatctcactaatatttacaacaatccagagtagcgtttatgagacactgaaaaagacagggaggaaatcctttttcaagatatgaagtcagaacctgaatgtagacatcggacagagaagtcctcaaccacaaacctgtcctccagctctagagagagtaaggctgtatttccaaccttgagatttttcattacattttcccctttttgggtgttaaattctttccaagaatgctgtacttgtaaaaatgattttattctagctacaaaacatttcatttaagaaaaccgcattttatatccttgtgtgaaatgctcccaaaagccatcaagatatggagacaacagattttaaaaacataaatctaatcatatgggcttgaaacagtatgaacatttaacagagtgacacgatatcattattatatttgtttgtcatgagatgaaaggcctggaggcagatggtgattaatcataattcctgagcttctacagaa

SEQ ID NO: 218967 - DNA, 463 bp, Homo Sapiens
  misc_feature (76)..(76): n is a, c, g, or t
  misc_feature (312)..(312): n is a, c, g, or t
  misc_feature (392)..(392): n is a, c, g, or t
  misc_feature (402)..(402): n is a, c, g, or t
  misc_feature (407)..(407): n is a, c, g, or t
gtgtaattccatttatatgaaatgtttagagaaggcaaatccatagacacagaaagtagattagcagttgccaggnctggtgaggcaggggaggcaggctagggggaaatgtggagggactgctaatgggtgcagggtttcttttaggggtgatgaaaatgttctaaaattaattgtgggccgggcaccgtggctcacacctgtaatgccagcactttgagagaggtcgaggcgggcagatcacttgaggtcaggagtttgagactagtctagccaacatggtgaaacccgtctctactaaaaatacaaaanttagccaggcgtggtggtgtgtgcctgtagtctcagctacttgggaggctgaggctggagaagcacttgaacctggggangcagaggttncagtnagctgagatgatgccactgcactccagcttaggagacagaggaagactctgtctca

SEQ ID NO: 218968 - DNA, 558 bp, Homo Sapiens
agtttttggcctctgctgcagccgtcatactgttccaaatgtggcagcgggaacagagtaccctcttcaagccccggtcatgatggaggtcccagccacagggaaccatgagctcagtggtcttggaacagctcactaagtcagtccttccttagcctggaagtcagtagtggagtcacaaagcccatgtgttttgccatctaggccttcacctggtctgtggacttatacctgtgtgcttggtttacaggtccagtggttcttcagcccatgacagatgagaaggggctatattgaagggcaaagaggaactgttgtttgaattttcctgagagcctggcttagtgctgggccttctcttaaacctcattacaatgaggttagtacttttagtccctgttttacaggggttagaatagactgttaaggggcaactgagaaagaacagagaagtgacagctaggggttgagaggggccagaaaaacatgaatgcaggcagatttcgtgaaatctgccaccactttataaccagatggttcctttcacaaccctgggtc

SEQ ID NO: 218969 - DNA, 546 bp, Homo Sapiens
  misc_feature (73)..(74): n is a, c, g, or t
cccgggcaagaacctcctaccttccagtttaaacactagtggtattgtcagatgccgttagtatctgagatgnncttacggcagggttctaagagctctgaaagaagcgctctgttagatgcagactggcagcatcctccttgataaaagcagaaaagcaaagaggtaattggagttgaatcaagttaatagggaaggttggtagtaaatgctgttagtgtgacatgattctgaaacccagagctcagaactaactgtgagatgtaccatgaactaacaattctttgaaaggacctgcagaagcatttttaatacctcattctgtctatgcaagatgaaaatccatggagttttttcttggcttttgtaccaaatttaggggtcttgcatgtcagcaagtgatatatattgtttataaatgcaagctatttctggaggggaaaaatgtgtgtggctcttacgttttctgggaattttgtaacaagttacacgcacaagtgttagaaactttggcataactcaatttggagtattttttaaatgctg

SEQ ID NO: 218970 - DNA, 556 bp, Homo Sapiens
ggcaagtaggtggaggatctcggtttgcaaattagataatactctgtgtataatgctacatatcaataactaccatcatggttaggcacgataactaatctttgttctgtgtaaaaaaatatggagagtgaaacaaagtgcagacattcaaagaaataagaaatctgctccaatgctcttgttctaatctctaataggttaacgttaataatcttgtatgggagttggaaaggaaaattttggaagtcaagaaagtccatttaggccggacgcggtggcttacgcttgtagtcccagcgctttgggaggctgaagcaggcggatcacagggtcgggagttcgagaccagcctggccaacactggtctctgtgaaactccgtctctgctagagatacaaaaattggctggacgtgttggcgggcatctgtaataccagctacttgggaggctgaggcggaggaatcacttgaacccgggaggcggaggttgcagtgagctgagatcgcgcccagtacactccagcctgggtaacagagctagactccatctcaaaaa

SEQ ID NO: 218971 - DNA, 537 bp, Homo Sapiens
taatgaattgctgtgaacagtgtggagagtacttgcccagtaaaggtgctggaaataatgttctggtgattgatggtcaacagaaaagattttgctgtcaaagttgtgtcagtgaatacaaacaggtaggtagccatccaagcttcctgaaggaggttcgagatcacatgcaggactctttcttaatgcagcctgaggtaagcaggaatgtaaatggagttcaaggccttaacatttttgagcactgctactactgtcattaatatgtatctgaaaaatcttgtccaatttgaaatatattaaaatttccaaacttaaattgtatcaaatgatgaatgttttatctctgagacatagatttctaatttcactaattttacatgtattttcttgtgatatgctcatttgtctttagttatttatgttcttaggaaattattttcagatttttttagtgcacaataccttgtacacagtaggcatttaataaagggatataaaaatcctctcttttgtgcctacctgaaaagttaaaaa

SEQ ID NO: 218972 - DNA, 546 bp, Homo Sapiens
cttacgtctatgatttttgaagaaactttggtcagtgttaactatgaagaaacatttaaacatttttgctcatttgtaacaagccttgtttaacttgtacttattttgcttgaagcatcacttgaaaaggtttactcctattcataatttaattgtaattataataaaccatatcattttattaaaagtcaaaacaataaaaaattttgcacttcacagttataagcacaaataggttccagcaaccaaaattgaagaaatcttgaactttgaccgtctttacctaaagattaggttaaaatttgagtgagaatgcattctctctgcatgatttctctgctctacaaatgttttaactgcctctttgaaggtggagaagtcatggtagcgtttgaaatcatcacagacatgttacataccttttccttgagtatacgctccccaaaattgtttcacaaaaagaatgaaaataattttatgtttttggcctgctatttatatcttggctttctgaacatatattaaatttgacaagaaactgtaaaa

SEQ ID NO: 218973 - DNA, 418 bp, Homo Sapiens
  misc_feature (6)..(6): n is a, c, g, or t
  misc_feature (29)..(29): n is a, c, g, or t
  misc_feature (273)..(273): n is a, c, g, or t
  misc_feature (387)..(387): n is a, c, g, or t
  misc_feature (395)..(395): n is a, c, g, or t
cttcgnagccttgccgtccaagggtccgntgcagtcggtgcaggtcttcggacgcaagaagacagcgacagctgtggcgcactgcaaacgcggcaatggtctcatcaaggtgaacgggcggcccctggagatgattgagccgcgcacgctacagtacaagctgctggagccagttctgcttctcggcaaggagcgatttgctggtgtagacatccgtgtccgtgtaaagggtgggtggtcacgtggcccagatttatgctatccgtcagtccnatctccaaagcccttggtggcctattaccagaaatatgtggatgaggcttccaagaaggagatcaaagacatcctcatccagtatgaccggaccctgctggtagctgaccctcntcgctgcnagttccaaaaagtttggaggccc

SEQ ID NO: 218974 - DNA, 538 bp, Homo Sapiens
gttaatgcaaggtaaagtattagaggggggaatatgaaagtatatatataaattttaggtactgaaggctttaaaaataattaagatcatcaaaaatgctattttgaatgttatcatggctattacacttttacttcctgactttaatattgatgaataaagcaagtttaatgaatcaactaaaaagctgcaaaaatgtttttaaaatgtgtgccttttattacctatcagtctatgttttgggagaaatgggaagcaacagatcactgtgtcctgatgtgcaggacgcatgttaccacactcacaaatgcctaatattggtctttatgtggccattgagtcctgttgactttccactcatgtgctttttactctagcattatggaatctgggctgtacttgagtatggaaattctcttatagacttagttttagtactctattacacctttactaagccacataaaagtaatctgtttgtgtgtaactgccagatataccacctggaattccaagtaagataaggaagaggatgaca

SEQ ID NO: 218975 - DNA, 534 bp, Homo Sapiens
ccggagctcaggagttcccaaaccgactcagtcgcaccaagtttccgtcttttggaattggggaaggagtttctttctttcttttcttttttcttgagccagttttaatcgctttgaataaatactcccttaagtagttaaatataggaggagaaagaatacatcggttgttaaagcaggagaggaagagagacctgccctgtagcgtgactcctctagaaaaaaaaaaaaaaagccggagtattttactaagcccctaaaatgtcgagatttgtacaagatcttagcaaagcaatgtctcaagatggtgcttctcagttccaagaagtcattcggcaagagctagaattatctgtgaagaaggaactagaaaaaatactcaccacagcatcatcacatgaatttgagcacaccaaaaaagacctggatggatttcggaagctatttcatagatttttgcaagaaaaggggccttctgtggattggggaaaaatccagagaccccctgaagattcgattcaaccctatgaaaag

SEQ ID NO: 218976 - DNA, 528 bp, Homo Sapiens
ccgaactataatctgctttgctatttatgaaagtttaaagaagtatctgaaagaagctccattagcctcttctgcaaatgggactgagaaaaattccacaagtttttttggacttatggcagctgctgctctttctaagggctgtgcctcctgcattgcttatccacacgaagtcataaggacgaggctccgggaagagggcaccaagtacaagtcttttgtccagacggcgcgcctggtgttccgggaagaaggctaccttgccttttatagaggactgtttgcccagcttatccggcagatcccaaatactgccattgtgttgtctacttatgagttaattgtgtacctgttagaagaccgtactcagtaacaggccggaaaattgtgctctagaagaataaaactgaaaaactctagagaattttttttccccattgatgtttagaaagtttgagactgaaacaggaaaggccataaaatatctggttcatatcacctgttggacatttccttttggattcatgc

SEQ ID NO: 218977 - DNA, 494 bp, Homo Sapiens
ggcgaatggggggggaggcacccgagctggccctggacccggtgcctcaggatgcgtccaccaagaagctgagcgagtgtctcaagcgcatcggggacgaactggacagtaacatggagctgcagaggatgattgccgccgtggacacagactccccccgagaggtctttttccgagtggcagctgacatgttttctgacggcaacttcaactggggccgggttgtcgcccttttctactttgccagcaaactggtgctcaaggccctgtgcaccaaggtgccggaactgatcagaaccatcatgggctggacattggacttcctccgggagcggctgttgggctggatccaagaccagggtggttgggacggcctcctctcctactttgggacgcccacgtggcagaccgtgaccatctttgtggcgggagtgctcaccgcctcactcaccatctggaagaagatgggctgaggcccccagctgccttggact

SEQ ID NO: 218978 - DNA, 550 bp, Homo Sapiens
cccgggtgaggggcggagctgggggcatggcgtccggagcggctcgctggctagtattggcacccgtcaggtccggggctctccggagcgggcctagcttgaggaaagatggcgatgtctccgccgcatggagcggctcaggccggagcctggtaccgtcgagatgtccttcggccttctccgtgtgttctccattgtgatcccctttctctatgtcgggacactcattagcaagaactttgctgctctacttgaggaacatgacatttttgttccagaggatgatgatgatgatgactaacaggaattacagaaaggagaaagcactaactgaagaaatggtgatgctctcagtttctctgccttccctatcagcagaaaggctcggggaaggccctcagcctcccagtctggtgaagcttcctgtatggtccatgaccgtattccaccccaggctctgggaggctccctgagatgtgctgtccactaagcactgcacaaacaagcaatcaaattatgaataaacataataaatatcagccgtgaaaaa

SEQ ID NO: 218979 - DNA, 513 bp, Homo Sapiens
gggaaatcagtgaatgaagcctcctatgatggcaaatacagctcctattgataggacatagtggaagtgggctacaacgtagtacgtgtcgtgtagtacgatgtctagtgatgagtttgctaatacaatgccagtcaggccacctacggtgaaaagaaagatgaatcctagggctcagagcactgcagcagatcatttcatattgcttccgtggagtgtggcgagtcagctaaatggcaggggcagcaagatggtgttgcagacccaggtcttcatttctctgttgctctggatctctggtgcctacggggacatcgtgatgacccagtctccagactccctggctgtgtctctgggcgagagggccaccatcaagtgcaagtccagccagagtattttatataggtccaacaacaagaactacttagcttggtaccagcagaaagcaggacagcctcctaaattgttcatttactgggcatctacccgggaatccggggtccctgaccgatt

SEQ ID NO: 218980 - DNA, 469 bp, Homo Sapiens
gtagagacgaggtctcactatattgcccaggctggtctggaactcccgggctcaagcgatcctccagcctcagcatcccaaagtgctgggattaatagtgtgagccaaggtgcctggcctagatttctatttaaataccatcaaaatgccctattgtagattctggagtcagtacaatttcagctcagatctttaaatagtggtgcagtccaataggactttatgtggtgatggaagtgttctacatctgcactgttctacgtggtagccactagacaaatgtgatggttgaacatgcagaatgtggctagtgcaaataaaaaaatctgagtctttaattttacttcaatagccatacataactagaggcgtcataatagtgcaagtctgtatttataatccctgagacatttggaaaattatattgcaaatcaccctaaagtatttttgtttttaattaagaaaaaac

SEQ ID NO: 218981 - DNA, 586 bp, Homo Sapiens
cttctactttgagggcttctttgacctcattgctgtggtggccggcgtagtccagaccatcctatactgtgacttcttctacttgtacattacaaaagtactcaagggaaagaagctcagtttgccagcataagtgccaaagaccatcaccagcatctgtccttcagggtgctcggacagaattcttaccacagcaaaggcataagatgcttgatacggaaaatcagaaacttaactcttttgttgcagatagtcatcagtggctctgtaaaaacgcagaggaaaagagccagaaggtttctgtttaatgcatcttgccttatctttttttattactgtgtacaaagatttttttacacaaagaaacttaatgctgtattaataaattcagtgtgtagcttcaattgggatagttccaaaagtgaagattttgtgaggaataagtgcaaattttttttttattttaaaaaattctttgaaactcttaagtctttgtgtctgcaatgaaattgtactccttgacagttgatagattatatattcttccatccctcaaacttgcattccactatatttattttttggc

SEQ ID NO: 218982 - DNA, 505 bp, Homo Sapiens
ctttcatgttatgtggcattgttaatttttcctagatacccatccacttaagggccagagaaatccttattcatttaactctggtgggcatttatgtaacatacccaaataaaaacgttattaaacagccacaatcgcattcagtcaacttggcactgaatgtagcttctaaaatcagttctctaccctacgaatggaatgttctaccaagaaagagaagcatcaccatgtcatcttgtgttctacaccactatagagagttacagttgcccccaaacacgaatgctattcccaaagtgctgggattacaggcgtgagccaccgtgccccgcgtgtttttttctttagctgattgacaggtccccttcaaagttacaaaaaaaagtgctaatttttgctgttaaattctggttgttatttaattgacagaagtctcttgatgcacgaataaatatctctacatctagcctttgttaaaaataaaaattaatattctacaaacacc

SEQ ID NO: 218983 - DNA, 501 bp, Homo Sapiens
tggattggagagggctcactggatcccaatccttggagctggatcattggattcaaatcataatgtggataggatagggaggatgaattaccaggattcatggagcgggatcagattaccaggaacataggagtggattcctgccccaaccaaaccgcattcgtgtggatttttttattcaacttaattggctattccaaagattttttttttcctatttttgacgattggagcccttaagatgcacgatggaattgtgttttgcgttttttggtaaaaggagcaaagcgaggacctggagataaacgctggagcaatctccttggaaggattcagcacgagtagatggtaaacatttaaaggggaaagggggggtttgtttaaaatagtaaatcagtaagtcacttctaaatttaaagaaaacaaaattggagttgaagaataagtaggtttccaattggctattgccgttttctttgaaaaaataaacattttttaaaa

SEQ ID NO: 218984 - DNA, 507 bp, Homo Sapiens
agatagcttgaggccgggagtttgggaccagcctcggccaccgagcgagaccctgtctctacaaaaaataaaaatgaactgggcgtggtggtgtgcacctatcatatctagtctttggactagaaaaatctaaaatggtttggtaagactttgctgttgctttaaagcaatggtccccaacctttttggcaccagggaccagactggttttgtggaagacagtttttccactgataaagttgggggtatggtttcaagataaaactgttccacctcagatcatcaggcattcgattctcatacgcagcatgcaaccgagatcaccacgtgcacagttcaccgtaggttcactctcctacaagactccaacgctgccactgacctaacaggaggtggagctcaggcggtgatgttcgctcacctgctgctcacctcctgctgcgtggcccagttcctaacagaccacagacggatctgctggggactcctgcatataaagtaagtgtg

SEQ ID NO: 218985 - DNA, 427 bp, Homo Sapiens
ctcccagagatgctcatcaaacccacctgtacagaaactatgctggctgtgaaaaatatcacaatgcacctgctaaagaaatgtccctgagacagcccaaggctcaggtcaactgccataggattctgagcaaggcctacttggccctggatagaaattgttttcaaagagaagggcagctgcttagagtgaacatgtctatggactttaaaaagaccccacgcaatttgactttgtggcaatagaaaacagtaaaaaacagggcatagcctagtttgttataagaaaaagcatccattttctatccttttagagtcttatttgattatggtgggagggaatgttttcaaatttcccatttctcaagaaatgttcatattaattgaggatttcccttcaataaatctcatgtcctcaattaggaaaa

SEQ ID NO: 218986 - DNA, 515 bp, Homo Sapiens
aaaacctggtcccgtttcaccagacatgaatttcaagtggagtcgtcgttctctgagagtgagtgtcttgacattttcacccaggccctcctgtcatcacatcaccggctgtcactggcgggtggccgtaaacgtcctgcgttgctatattaggatctctgcagttcaggcttcaaaaccagttcagtgtatccgggcgacgggtagtggtggtgcatgcctgtctgtgtgccccgctggcgagctgtagttgcggcttgcgtgcctcgcggcccactacagggctgcagacaatcgaggcgagggcgctggccgccagcagctcacagcgcgggggtcatgtggtcgctcctcgagggtttcgtttttgttctgcttcattaagactggaatcaagcttacatgtaaactattggtaatttaagtttccttttgtgtcattcagtgtaaaactgtctaatttgaaaaaaaatgtaggttatgaaaataaagatttaggcactgttcaatttttc

SEQ ID NO: 218987 - DNA, 512 bp, Homo Sapiens
agaagaccgtttacctagaagaagctatgtcaagaggctgaattatttttatttttaaacaggtggtgagaaatttctgtgaaacctgtgaagctgaaaagggggtgggatgggggtactcaatggagtatgtctgatggatcccgaagaatggagaggaacacaggcgctgagtatggagcagcctggagacccaccccacctgcagggctgccctgagcgcctggatttctggttctgatgccaatactagtcaccccaagtagtctgctcacagtaacccaaacctcaagtaaactcccctttccctcgctatgtgcactgatatgggtttataattttctgaaagttacccactgaagcccatttctccgttgagtcatcttgtaatttccagctttctccccgctaaggaagatatctagtgttggggatcctggcccctcaacctcctgtggaacccagcagttctgttatatcccctgctaccctagatgaattaagacggttaa

SEQ ID NO: 218988 - DNA, 371 bp, Homo Sapiens
ctcctcttgctcgtcatgtctggccgcggcaaaggcgggaagggtcttggcaaaggcggcgctaagcgccaccgtaaagtactgcgcgacaatatccagggcatcaccaagccggccatccggcgccttgctcgccgcggcggcgtgaagcgcatctccggcctcatctacgaggagactcgcggggtgctgaaggtgttcctggagaacgtgatccgggacgccgtgacctatacagagcacgccaagcgcaagacggtcaccgccatggatgtggtctacgcgctcaagcgccagggccgcaccctctacggtttcggtggttgagcgtccttttctaccaataaaaggcccttttcagggccacccta

SEQ ID NO: 218989 - DNA, 505 bp, Homo Sapiens
taaaattccttttaagtaattttttcaaagaatcacagaattctagtacatgtaggtaaatcataaatctgttctaagacatatgatcaacagatgagaactggtggttaatatgtgacagtgagattagtcatatcactaatatactaacaacagaatctaatcttcatttaaggcactgtagtgaattatctgagctagagttacctagcttaccatactatatctttggaatcatgaaaccttaagacttcagaatgattttgcaggttgtcttccattccagcctaacatccaatgcaggcaaggaaaataaaagatttccagtgacagaaaaatatattatctcaagtattttttaaaaatatatgaattctctctccaaatattaactaattattagattatattttgaaatgaacttgttggcccatctattacatctacagctgacccttgaacatgggggttaggggagctgacaattcgtgggtccgcaaaatct

SEQ ID NO: 218990 - DNA, 514 bp, Homo Sapiens
attaaagttaaggtcttgcaatgttgtacaggctgggtcaaactgactttaataaaggacaaacacacctagcttaaagaaggttaaaaaaagtctattgatagactatcataaaataaaaatggttactccttcattatactcctgttaacatcaaacaaagaaaatttcaggttagaacaagaaaacatcaacaatctcagaaagtgaggctagtggaattaaaagcttatgaaagactaaatggttggatatttaggaaaaaacttgtgacatatcatttggctgtacttaaaatccttagagaaccaattttgccacatctttacatttgaatttttcagtcacccaaaagactgggtagaaacttaacaatgctgtagagattcattctgtctcattggcaaaatcaacctcttaagagaaaaatggattgtactccctttgcctggaatgacagtgccaggttttgtagaaagatggaactgaatctaatcctaactctcttataaaa

SEQ ID NO: 218991 - DNA, 503 bp, Homo Sapiens
agccatctttgcattgttcctcatccgcctccttgctcgccgcagccgcctccgccgcgcgcctcctccgccgccgcggactccggcagctttatcgccagagtccctgaactctcgctttctttttaatcccctgcatcggatcaccggcgtgccccaccatgtcagacgcagccgtagacaccagctccgaaatcaccaccaaggacttaaaggagaagaaggaagttgtggaagaggcagaaaatggaagagacgcccctgctaacgggaatgctaatgaggaaaatggggagcaggaggctgacaatgaggtagacgaagaagaggaagaaggtggggaggaagaggaggaggaagaagaaggtgatggtgaggaagaggatggagatgaagatgaggaagctgagtcagctacgggcaagcgggcagctgaagatgatgaggatgacgatgtcgataccaagaagcagaagaccgacgaggatgactagacagcaaaa

SEQ ID NO: 218992 - DNA, 520 bp, Homo Sapiens
  misc_feature (37)..(37): n is a, c, g, or t
tgatccccggggcggcggaggctttggcagctcgggnctgagtgcaagaatcagcatgattcttcagaggctcttcaggttctcctctgtcattcggtcagccgtctcagtccatttgcggaggaacattggtgttacagcagtggcatttaataaggaacttgatcctatacagaaactctttgtggacaagattagagaatacaaatctaagcgacagacatctggaggacctgttgatgctagttcagagtatcagcaagagctggagagggagctttttaagctcaagcaaatgtttggtaatgcagacatgaatacatttcccaccttcaaatttgaagatcccaaatttgaagtcatcgaaaaaccccaggcctgaagaaataaagtaaaattaatctggtaatttgtcacggattagttgtacaactagttagaagtttcagaataaacatgcatttcataactgtcaaatgttcttttaattctgagtccaaataaattatttggtgatgtt

SEQ ID NO: 218993 - DNA, 513 bp, Homo Sapiens
tttctgcttgctgatcaggactgcacacagagaactcaccatggagtttgggctgagctgggttttccttgtggctattttaaaaggtgtccaatgtgaggcgcagttggtggagtccgggggaggcttagttcagcctggggggtccctgagactctcctgtgaagtctctggattcaccttcacacagtactggatgcactgggtccgccaagctccagggaaggggctggcgtgggtctcacgtattgatattgatgggagtggcacaatctacgcggactccgtgaagggccgattcaccatctccagagacaataccaagaacacgatgtttctacaaatgaacagtctgagagccgaggacacggctgtgtattattgtgcaagagggggctccggtcatggctttgatgtctggggccaaggggcaatggtcaccgtctcttcagcatccccgaccagccccaaggtcttcccgctgagcctcgacagcaccccccaagatgggaa

SEQ ID NO: 218994 - DNA, 508 bp, Homo Sapiens
tggcggtggccagggccgaggtcttgggagtccagtggctgcaaagggcatcccggaacgtgatgccgctgggcgcacggacagcctcccacatgaccaaggacatgttcccggggccctatcctaggaccccagaagaacgggccgccgccgccaagaagtataatatgcgtgtggaagactacgaaccttacccggatgatggcatggggtatggcgactacccgaagctccctgaccgctcacagcatgagagagatccatggtatagctgggaccagccgggcctgaggttgaactggggtgaaccgatgcactggcacctagacatgtacaacaggaaccgtgtggatacatcccccacacctgtttcttggcatgtcatgtgtatgcagctcttcggtttcctggctttcatgatattcatgtgctgggtgggggacgtgtaccctgtctaccagcctgtgggaccaaagcagtatccttacaataatctgtacctggaacg

SEQ ID NO: 218995 - DNA, 530 bp, Homo Sapiens
tcgcgccgaggggctgcgagagtgaccgcggctgctccagcgctgacgccgagccatggcggacgaggagcttgaggcgctgaggagacagaggctggccgagctgcaggccaaacacggggatcctggtgatgcggcccaacaggaagcaaagcacagggaagcagaaatgagaaacagtatcttagcccaagttctggatcagtcggcccgggccaggttaagtaacttagcacttgtaaagcctgaaaaaactaaagcagtagagaattaccttatacagatggcaagatatggacaactaagtgagaaggtatcagaacaaggtttaatagaaatccttaaaaaagtaagccaacaaacagaaaagacaacaacagtgaaattcaacagaagaaaagtaatggactctgatgaagatgacgattattgaactacaagtgctcacagactagaacttaacggaacaagtctaggacagaagttaagatctgattatttactttgtttattgtctatatgccttttaa

SEQ ID NO: 218996 - DNA, 436 bp, Homo Sapiens
gctcggccaggccggcaccatgcggcccctgctctgcgcgctgaccggactggccctgctccgcgccgcgggctctttggccgctgccgaacccttcagccctccgcgaggagactcagctcagagcacagcgtgtgacagacacatggctgtgcaacgccgtctagatgtcatggaggagatggtagagaagaccgtggatcacctggggacagaggtgaaaggcctgctgggcctgctggaggagctggcctggaacctgcccccgggacccttcagccccgctcccgaccttctcggagatggcttctgagccctggagctggagcccagcagttggaggtggtgcacctgccaggcagcgcccacagaaccagccctgtcctctcgacttccttccttagcttcatgtgaaataaaagctattctggtcaaa

SEQ ID NO: 218997 - DNA, 474 bp, Homo Sapiens
aggccggaggcttgggtgcgttcaagattcaacttcacccgtaacccaccgccatggccgaggaaggcattgctgctggaggtgtaatggacgttaatactgctttacaagaggttctgaagactgccctcatccacgatggcctagcacgtggaattcgcgaagctgccaaagccttagacaagcgccaagcccatctttgtgtgcttgcatccaactgtgatgagcctatgtatgtcaagttggtggaggccctttgtgctgaacaccaaatcaacctaattaaggttgatgacaacaagaaactaggagaatgggtaggcctttgtaaaattgacagagaggggaaaccccgtaaagtggttggttgcagttgtgtagtagttaaggactatggcaaggagtctcaggccaaggatgtcattgaagagtatttcaaatgcaagaaatgaagaaataaatctttggctcaca

SEQ ID NO: 218998 - DNA, 491 bp, Homo Sapiens
ctataatcctagctactagggaggccaaggtgggagatcgcttaaacccaggaggtggaggttgtagtgagccaagattgcaccacggcacgctagcctgggtgacacagcaagactccatctcaaaaaaaaaaaaaaattactttcaacaaggcatatagtctcttgtaatatatatgtatactattacattgtacagaatctgtacttatgtttggtgtgtaatataccaattagttttatataatatcctcataagctattctaatttttgagagaaacacaaaaagttatagattgatagtctgtataatattagacaaaatagtaagctttataaaaagttatttttggtaaatggtaaggaatttggggtggaatgtgatgagattaaaatgtagctttggtataacttcatgtgtatttcaaaatatactgaacgtcaacatgatttgaataaagaaaatgtattttctacttgaaccacaaaa

SEQ ID NO: 218999 - DNA, 492 bp, Homo Sapiens
ttccggggccagtgggtgctgatgtactttggcttcactcactgccctgacatctgcccagacgagctggagaagctggtgcaggtggtgcggcagctggaagcagagcctggtttgcctccagtgcagcctgtcttcatcactgtggaccccgagcgggacgacgttgaagccatggcccgctacgtccaggacttccacccaagactgttgggtctgaccggctccaccaaacaggttgcccaggctagtcacagttaccgcgtgtactacaatgccggccccaaggatgaggaccaggactacatcgtggaccactccattgccatctacctgctcaaccctgacggcctcttcacggattactacggccggagcagatcggctgagcagatctcagacagtgtgcggcggcacatggcggctttccgcagtgtcctgtcttgagccactgcagtctgggccccatcattaaacgggctgcgtttaaaa

SEQ ID NO: 219000 - DNA, 527 bp, Homo Sapiens
tttttaatgagttataaaaaacaaaattaatggcttcatattagacacagaggctatccggcaatctttcaacgtggtaatcttaatatagccatctctgtagctgacactaaggttcaacatcagattgatttcctttcctactctagttctactaaatctagccactaacctaaaaatatggcagcaaagtatctcatgtctatcaaataattaataaatgggtcaaacaggatctaaaaataaagttttcttatcatggattagtttcagcactgtttcagacacaacgtttatgtgtatgtatcacatccgaaatctgaaaggctgaaagtttgactattttaacttaagaaaacacagggaatgaatttcttattaattctggctccactgagatagggaaagtatttcttcaacttctatttgagaatctgaatatagttttaaaagagagcaccaatttaattcttcattaaatttaaaaaaatcaagtattcataaggtcatttctcagtaatgaggct

SEQ ID NO: 219001 - DNA, 503 bp, Homo Sapiens
actctccgtcctccaagccaagtccgatgctcccacatcgtcgagtttcttcaccggcttgaaatcacctgcccccgagcaatttcagagccgggaggattttcgaactgcctggctaaaccacaggaagctggcccggtcttgccacgacctggacttgcttggccaaagccctggttggggccagacccaagccttggagacaaacatcgtgtgcaagctggacagcttaaactgatgacagacataactcatcattccccagaaaccttttttgattacagtatctaacattttgcctcctcttttttggttttgctggttataaaggtttggattggagagggctcactggatcccaatccttggagctggatcattggattcaaatcataatgtggataggatagggaggatgaattaccaggattcatggagcgggatcagattaccaggaacataggagtggattcctgccccaaccaaaccgcattcgtgtggat

SEQ ID NO: 219002 - DNA, 557 bp, Homo Sapiens
tggaagtctcagcaaactgcctggttttgtttgtttgttttgttttaaggtacaggaaataagaggaataatagtggccaaagcaattagaacatcttcattccagaactgtgttcagcaatccaggcagattgatacatttttctttaaaaataaattgctattacagctagacgtcaattgggataaataaagggatgaagatccactaagtttgtgactttcatacacacccagtacatctcaaaggatgctaagggacattttctgccagtagagttctccccctttttggtgacagcaatattattatgttcacatctaactccagagcttacttcctgtggtgccaatgtatttgttgcaatttactacatttttatatgagcctatttataggtgccattaaactcaggtctttcaaatgaaagagtttctagcccacttagggaaaaagataattgtttagaaaaccataaaatcaatggtaggaaaagttggaactggttacctggatgccatggttctctgttaaataaagtaagagaccaggtgta

SEQ ID NO: 219003 - DNA, 514 bp, Homo Sapiens
gttgttttgggcccctatttttgaactgttaaaaaattttgatgcttttcgtggataaaagtagtgcctctctttatacaactgatggggttttaaaaagtgtaaattgccttttttgttaaacttattttaaatgctttagtatttaaagggtgtatgttattaattaatctgcatatttgtaacgcaaataactacttcctgatttacatctcaatatattcttctttcatttgcccaatttaaaaaatacgtagtctctattgttgctgtttactaatagttttagatcccaatgtgtattagaattatagctacaaaaagttgcaagtaaaatttagcaatttcctattcaaacaggatctcattagtatgttttttaatgtgtagaattaacactttaaaataaacaggtgtgaaaattataaaggaatatatatgacaattattttctgtacattaatgtctaaacattatacttactttttcataataaaggaaattttggaaccaa

SEQ ID NO: 219004 - DNA, 696 bp, Homo Sapiens
  misc_feature (38)..(38): n is a, c, g, or t
atccccccccccccccaaaaatacagctgaagggcagntgtgttagctataagtaaaacttcattctccctgccctgaatttactgtcctttctgaaactcttcactagcaatgtatggcaaggcgttgtgcacagagaactagttctaagaagttgtcagaccaaatggatacatagtgggtacatggccaagtacacatgtgaaatcctttttcccagaaaattcaaaataatatagggagcagggagatgcttcctgctagagacctgggcgggctgtatgatgcccagcttccaaaagatgtcacagcacaagtgtccaaatgaaaactgacttaggaaaggtatgagttgagagtaggcttaaagtcagggtttacttcttacattcagggagagaatgaggatacaagggggaagggttttctgtgctaggattgcttgagaatgagaggtaactattccatcattagttgtattgtgttttgatacagtttactctgtgtgaataatacagctctcccctgggggaataaaagtctgaccacttcaagctttcctttgcctatgtatagtcattttcccagcggatttaccttgcttatagttgctgtcttatccttcactttgaaaggattttcactatgaattgatttcaaagtgttaggctagccaaagcataagaatgagttaca

SEQ ID NO: 219005 - DNA, 577 bp, Homo Sapiens
atccccccccccccaataggatcctctggctcctgtccttcctcaggtccatccaactactccttgggcctccttatggtagccctcattgtcttgagttgatttcactaggtttctgttctctgtcatctgcaacataactgacatggttctaaatctgtctctaaggagataacacattagtatattttctacactattgaagcctctacctaatgtatgacttttgtagctcaggtaaagagatctttttaccagtgttatcgtttctagtctgtttgttagtcttcttttaaatagatatggcctaaatcctgtattcctggctaggaagcacttctctccacccctctgctttgagttacaaattcaattcaatttcctatgtatttattaatacctacagataaagtactgtgctttgggggacacaaaggtgactggtacctgctcttttaggaggtcaccgtgcagaggatcctattctggtacaccaatagttataaagcaagccacagcctaggcaacatagtgagacccctgtctctactaaaaaattaaaaaaaaaaaaaaaaga

SEQ ID NO: 219006 - DNA, 644 bp, Homo Sapiens
tttttttttttttttttaaccagaatgacaaaggtaaagcagtgtttaggaacataaatctgacaggtggctcgccaggtcacttggagccaggataggcaggagtagctggccagagacgagcagccctgaaaactgttcctgccctggcctcacctcgtcaccacgtctgctgtggaaagggctgcgacctggaggctgtgctgttgaacaggcacatcgaggaggtccaacacagcgtcagaactcccacgccctcttctcagctctgccccttggtcagctgtcaggtgactcccaggcagagtccgttttgaggctcctgggactggaatacgggaccagcctgagttgctgtcagtcacgtcgcaggagaaaggactggcaaaggctcatggcccttgaaattctgttccttctaggcctttcctaagaagcttgtggccttctcaacttggattgaccggacccgctgggccaggaaccctgggccatgctcgccatcttcatcctggtgatggcaaatgtcgtggacatggtgagctcctgctgtccttgttgaagggaccccctgttctcagtggagaagggttctgtttgggtcaacaagcatttctcagtccaccctccacgtcatgtacttt

SEQ ID NO: 219007 - DNA, 624 bp, Homo Sapiens
tttttttttttttttttgcttaacttcttcagacttgttgatggacctaaggttaacagatttcaggatcgttggtgtaattgcaagggacggtggaggattcgacctcagtgtttctcctactgtgttctgcttattatgagtaaaaacatgcagtggatgacggtggtggaatggtttgttcaagacattatgaagagcacttagatcaagatgggtaggaggtataattggaagttcaaggtctttactcagtgatatagttccatcttttaaagagggttgctgtagtgaggattttctttctgggactttaggttttcttttgctacctccgggagacaatggacctgaaaagaaagctgtagggaaagaggatgttggcgtttcagactggcttgaatagccacttgatggagatgccaagccagccagcttttctggtgaagccagtttaaactcattgtcaacagaaggaagagatggggtggtggctcttgattctgattgtgatgtttgggattcagagctctctggagatttgatgcattcaatgactgtggtacccgtagcggtgcttgaattagatagagatctataaggatcatttgttttcaagtcatt

SEQ ID NO: 219008 - DNA, 557 bp, Homo Sapiens; identical to SEQ ID NO: 61891

SEQ ID NO: 219009 - DNA, 239 bp, Homo Sapiens
tttttttttttttttttgtaaacaagaagaatgtcctggggacaagagccaattaagatctgtgtataagtccaagtttctttggcatgacctcaaggtgacagagcatggcccctgaatagccatgctgttgatatggcccccaagggggtaaaaagcctatttggttgtatgcctctgatttccttccaaatgcttcattgttgacaggaaaggactcttctactgccctcgtgccg

SEQ ID NO: 219010 - DNA, 459 bp, Homo Sapiens
tttttttttttttttttggaaaatccaatgaaacgtgattcttctgtgtgagggatgccagctttggcccccttcatgcttcaggcctgaatgaccaattgccacgatgctaatcacagaatgtaattgacaggcccttacttttatgccttttgctgtcttttccagtccctgagcttctgtagatatggtgtgggcacatggagggcttaaggatggggttctgatttgacctgcctcctttctgcagccaggatttgcatcctgcccgtgtagtcagcatgtatacaaagaaagagcatgtgtgtacgtatgtgctcagagcaagggactttctgcatgtggagaaaacgccttttgccctaagaagtctacctcaaaccaaagggatgaagtgatgtatctgtgttgcaacaccgggcttgggggaaagtgaagctgtgcttgcttttaaagagc

SEQ ID NO: 219011 - DNA, 360 bp, Homo Sapiens
ttttttttttttttgttggtaatgcaagtgttttttattttcttcttaatcctgtacaggcgggtttctggcttgggcgatggagtggacagatggcagagccagtgggatttctccagggctggactttctccatgatctcaaagatctcagccaggacaggcgccaggtgataggggaaggagtcagaacagtggggagggcagctcgttcctgagcaacagtcatgagtgaggttctgtgccaggcactgtgaaggtccctgaggctggtctctgagatagcaccttgagggggcagcatccacttttctggctcactctggcccagcaggggtagaggaccagtgttgacctggca

SEQ ID NO: 219012 - DNA, 646 bp, Homo Sapiens
  misc_feature (624)..(624): n is a, c, g, or t
tttttttttttttttttgcagaaatattcccaacagtgggtatttttacaaacagtatctttcagcctgtctgtagggcctttgatactgtctacagtttttttaattgaatatctaaaagttattacaaaaatggaaatataggggaaatgacctgcagaaatcaaataatttaaatcaaattaaattttactcttctccctaaaaatttgcttcattcttttagaggaaaaagtacatagaaaactgttgctgttctctacaaagatgacggctcctacctttttgattttctttatcagatcctgaaaccagtgatttgtagagactggaagtagggttgattttaatgagttgtaatagatcctgcatagtaaataccttaagaaaaaataggttactaagtagacatatttttatatcagtgtttaaatgataaattaggatatgtttctgaatatgaaattaagaaacatccttcagattaaataagattataactatgctaataaagcaaatttcaagctctttcttacactgttaaataaattactataaacatatcaaggtcaaaaggataaaatatctttatcatctaattaacttctaagtacttcacatcanagatgatatgcctaaatgttta

SEQ ID NO: 219013 - DNA, 543 bp, Homo Sapiens
tttttttttttttttttcaatactgagaggacgctttatttccttgtgcaaaagagcatttcaagtcaaggtagtcagtcacacttgggcgagtccggctcacataggaactgggggtagaagaggtactttaagttgtactcagtttgggctaagcagttagcaatctcctggtcacacttgcacaacagttcttggcatttgttctctgccggtccgcacaggacgctctgattgacgcactgccaggagtagcgctctgtcttggggctgcagccggcctcctcagctcgagtgtaacaacagtcgtggccatggcagcaccagtcaatggcatcgcggggctggccatggcctcccaagccacaaaagcaaccatatttcatataggcgatgggggttcggggaccaacacaacccacagttcctgccagttccaggatcccacgccggtgcacacgtaatatcctggaggcctcgccggacccggggccaggtagaagcagcagcagcagcagcgacggcagtagccctcgtgccgaa

SEQ ID NO: 219014 - DNA, 546 bp, Homo Sapiens; identical to SEQ ID NO: 60840

SEQ ID NO: 219015 - DNA, 478 bp, Homo Sapiens; identical to SEQ ID NO: 60637
  misc_feature (72)..(72): n is a, c, g, or t

SEQ ID NO: 219016 - DNA, 526 bp, Homo Sapiens
tttttttttttttttttgctgaaatccttaaaaagatgctatctcattttataccctttttttaaaaaaaaagggaaattcaagttaattgaatcttgcatattacatatacaaatatcttcctgtctagtaatttctttattcacagagcatatagcaataatttgacatcatactttgatgtctgaaaacctatgcaggatgacatggagtaagaggggtataattgtagaaccaaggcagggaaaaaagtgatgagcacacccagagtttgtcttcatatgagccataggttaaaatcaagcctacattttagatgaatgattattgtatgtatgctgatggaaaataagaatttatcattttaaaatatttaatcttttcatataattaggtgataattattgtagaggcagtgtagtagacatttgattaatttattaatttatgctaatgcagaatttttgccagttatgtaagtacaccaccatttgacctgtattcccccttgtgtccctgctccact

SEQ ID NO: 219017 - DNA, 431 bp, Homo Sapiens
tttttttttttttttttccgtgacccaggcagcattttattctgaggaagctggaaggtgaattcatgaaggcactgaaggctgcttcccatgcacaagacacaggaagataggaaatgcagaaggaggaggaggtgccggagaggtgaggacaggggctggatggacgctgggtggaaggcagggctcggcactccagtgtactaagggagtggaaggagaagggaggctgggtgccagccgagctctgaaggagatacaagtccgtgtcagccactgacttgaaccagagaagaacgggttcaggctttagatgatgtggatgaagaaaccactggggacataccatgagcaggatttccaagaacagagctatttgcactgcaaacacagccagctgctagctgccagcacagctaagcagagacatg

SEQ ID NO: 219018 - DNA, 542 bp, Homo Sapiens; identical to SEQ ID NO: 60490

SEQ ID NO: 219019 - DNA, 553 bp, Homo Sapiens
tttttttttttttttttgctcagcggttgaaattaaaaattgtaaatttattttacagttatatttgacatgttgttatttgaacagtgtatataaatccaaaatgtctgataagttaccaggttgagccacttaaagtagctgccattctatttggacccataaaaatggcaattttataatacagtgcgttatctaaaaacaggtcacatatacttatttatcagttgaattttgtaaaaaacagaaccatttttttaagactagtttcttgtctttcatagctttcctggatttcccgaatactttcaagggggaatattatagtaagtttttgctatcaggagattttccagacagaaagcatggtataatccactctcaagaagaactgaaaaaatttggcctaaaagggcgggataactaatggtcacatttttaaagaatttcttggatgaagaaaaaggaagctgaaataaaacaaaaacactggggttagttataagtcaaattaaattagaaataaaagattagaaataagcatgactgtcta

SEQ ID NO: 219020 - DNA, 552 bp, Homo Sapiens
tttttttttttttttttccagtatggtacaactgaccaccaaccagttaaatgtgctctaggggctccaggcataaactcaactgccaaacaaatacagttttcaacaggagatcccaatttaccaagagagtgtttttttaaaaaaaacaagttaaagatgaacacaactccgcacacttgtagcacattcagtagactgttacccaacacttatatgcactcaaagatggctgcagaaagtcagagactaagaatgtgcctgccgctctgtcaccagccatgccaacagaccagttttaatttcccaaatagaagatgagggcagaaacctgattaaaacaaacaaaaagtaataccaaacttggtacattactaaaccaagagctgaagctagaattcatttggtgaccttgagtttatgacctcctggcagcaagtgaaagttcattgtttatatggctgcctcacattaaagtggctgctgctcattcacacagtctccaaaagaaagggcaagggcaaggactgcggacagcttcacgttcccctt

SEQ ID NO: 219021 - DNA, 664 bp, Homo Sapiens; identical to SEQ ID NO: 58643

SEQ ID NO: 219022 - DNA, 593 bp, Homo Sapiens
ttttttttttttttttgaacatgggtttttctaaaaaagaccagtcattttgaaacttgattttactgtcatgttctcattttgaaattcatcttattgtttgtatgaattggcagtcctatatgggaaatttcggttttgcatattttcagattatttttatttttacatcagagattttgaacagatgctataaaaaagtatttatttattcaacaaaatttagtgctgcttatgttgcaagcacttactgaacttcatgctgtatgtgcctgagatacttttgtgaacgtaatggcaacatcaaaaactttgcccttatgcaccttataaacctttaatttcaaggcatactgatgagtgggcatctgctataacgtactttcatggtcaattaattcaccattatttgggtataccttatattaaagcgattattaaaaactggaaaatatttaacacatcttcaccttgcctttttccttaacatatgtagatcaagggagtcactgagaatcagttttagggatagttataaaaatcttaactttgcaaatataactttgtcctcaatgtaataactggaaaaaata

SEQ ID NO: 219023 - DNA, 587 bp, Homo Sapiens
tttttttttttttttttgttttcttttgagacagagccttgctctgtcacccaggctggagtgcagtggtgtgatcttggctcactgcaacacagcctgggtgacatagggagactgcctcaaaaaaaaaaaagaaaagaaaagaaaagaagtttctcacatcactcagtcaaaactgaaaagactgcttgctttggaggtagtttagtcctgttgcctggcaatgtggctgggaagtgccctgtgacttggttcaagaagcatatgaaccatagagctaacgaggcctaacattcagggtcctgactcacatgagctccttcttaaggtcctagcaggggccctagcaacatattaatgtggcagtatattttcataatgtttgcaaaagtaagatattttagaattctttttcttaaagagagtccccagaattgtatgaccttcaggcctggatccactcctgtgtagcacagagttttgaaaagcactaggcaaggagaccagagttcctgggttccaatcatggcactatgcaggcccaaatgggcagcacagcacttgccctgctttcttcacgggagcgg

SEQ ID NO: 219024 - DNA, 510 bp, Homo Sapiens
tttttttttttttttttgccataaggaaatctgtatttttatgtaatcaaatccatccaactttttttcttggtttccaactttagcatcatgtttaaaaaggccttctccatccaaagagtatgaaaagatttatgaaatacttcaaaaacagacatccaaagatgtgtgtcactttgtaatggatgttgtatctggctttttgaataatgtcataagcaagactcttgttaaggatggagactagagggacagtacccacaaaaatcatgtcttgtttttctatctcattcaccctcttcacccctccttttaaattcagctaaaattaggcttaaaaaatggtaaggattgccatcaaacaaaaacctaagtcactgaaggataagctaaagggatagtaagaaatgtggatggtggaaaagtgaagaaaaccaccatttttctacagtgtcattatggttcatctatgagtcacatatcacattacatacttcaacagaaccatca

SEQ ID NO: 219025 - DNA, 327 bp, Homo Sapiens
tttttttttttgtttttgcttttgcaaagttttgtcgatggcttgtctggcccggtgtgtttgttttgtttgtttctctcggctcagctttgttggtttcggggggctttccgccgggaggggaggggaaggggacaggagagcgagtgggagcagaacgtggagaaagagggaggggagggagagctgaagtcgattgtctggcttcaagacagaagtaggaggcaaaaaaaaaaaatctctccaaagatctcgctcgctctcactctctccctccctctctcgttcactctcgctcttagagctggtgtgcagccgaggagttgg

SEQ ID NO: 219026 - DNA, 499 bp, Homo Sapiens
tttttttttttttttttggcaactctaaaaggattttaatggatttatgaaacccccagatttccttacagccacgagctgtgaatccacacatgccagcaacattgaatacacttttttttctgcctgggcacacttattctagtaaagagagtgtgatgacagaacaccttagacttcaacacgcatctgtgcttaaagaggataaaaaacaaagaacaaaatcaaacaagacaatgtatgagttgaaactactaaggttgattttctccaggtttctcaggatctgggcagcgttttgcttcctcttaatttggaacccttgctgtgtactctgactttttactgattagactgaggtgctggagacccactgttcatggcttgtggaggcactgcagctgggtccatcttgctaatgtgtgtgatgaatcgaagacgaagttttaaagctagttttaagttacagataatcttctctacttgctctttcacgctg

SEQ ID NO: 219027 - DNA, 604 bp, Homo Sapiens
tttttttttttttttttaaccctcatttattttttatttttctgaacctacggattatactaaaacttttatttctagtaagtccccaagtgataccaatgctgctggtccaggaccacacactttaagaaccacgggcctacattaagaaaacggcaggcagagatcctcagacacaaggtcaactctccactaacaccttggtggaagagcagatggacagtcgggggaagaagagaagaaagtgctcatataaagtccaattagctaggggcagagtggagttactgaaaggaagacttagtcctcacggtcattcaaagaaccagactgacaatctttgccatcttcggtggcttccaaacttatcctggatacgaccgtccaaccagcagctgggagaagagaatggaggatcatgcaagaaatgtttatggggcaagcctggattcctatgcccacatttcaccgcctacgacttagtcatatgttctcacagagatgctgggagtagggaaatgtccctggctggattgccacatcttgacaacatatcttcaaagagcaagaatctttggtagacacctagcagtctctgccatca

SEQ ID NO: 219028 - DNA, 556 bp, Homo Sapiens
ttttttttttttttcttaattatttgatggcaggtttcctgctttgtgggcagagtaaattcagactccacactcaaattcggcacagagttgagacctttattttagatgagagtttttttcccctccatcccagagcttgggcggagagcaagcgtccttgtaacttctctgggcaggctggtgggattgttcagtctccttttgtagcctgtgcaaacctttaagaattccagcttgatgcaaatattttacttctcacatgggcacaaggcaattgtctctcatctctgcccagggattaaaatgacagccccttcccttgaggactttgctcaagtgtaagttcctttggctatgtgtcgtaagcagtagtctattgctgtgattttaaataccttttatgtttcaggtacctacaaatctttaattcaccatatttatgtatgtgtaatgggagaagattctgcacgtgctcagtcctccatgttgatggaattggaaatctgagcctttatctggaactgtggtttgaaagggtttgtctcccaatttc

SEQ ID NO: 219029 - DNA, 510 bp, Homo Sapiens
tttttttttttttttgtgactcagtgacttgtgtttattctcagaaaccagagtccacagcgggtgaggggtcaccccgccctcctatagctcggctcctctgtggtgccatcagattcggatgtggaaggtgctgaggaagtctggtgcccggaggatcatgttctggaaatcttccagggacagccgcccatcatggtctccatcagcctcatccagcaccttctcacataccaggctcacctcctcggcactcagctccccccgcgtcagtttggtcaccgtctgctccaggtcccacgcacaaatgtagtcgtcgttgttaaaatcataaattttaaaagcatagtaagccttgaggtcgcggggagccatttcactcatcacggaaaacatgtccaaaaagttgtccagggtcatgtggccatccccatcctcagagaatacctgggcaatcctctggcggaaggggttgtccttcagctcgggcatgctgccaatgaactcgta

SEQ ID NO: 219030 - DNA, 598 bp, Homo Sapiens
tttttttttttttttttcctgacaatatttagtaacctatacctggttctaggtgtcacatcatggtacgggaaggtgtattacatagcttatcaacagttatgcacaacaacccaggttaccactgactcattctgtatggggcgtttcaacacacatactacgtcctaatatgcacaacaacccaggctaccactgactcattctgtatggggcatttcaacacactacctgcttgaatcaccatctgcttaaccagttgtaggagcacaattttccaagcctgactcctgcccacccacccttctgtccttctttagtggtttcctctggaatggtgttcataggcttgggtctaaatgctggctattccttcttcagatactcactcccatcactgggaaagagaccaacaggaagagaaacatggaccaagacgacggttttcaccagtggagatggcaatcagaaccaagtggagcgaggccaccatcaactggaatgggaccgttcccttcttctaaagggaaactagggtgtgcaatgaagtctgaagtgtcagaactgctgggatgcaaaagcctaatgtgggggagac

SEQ ID NO: 219031 - DNA, 474 bp, Homo Sapiens; identical to SEQ ID NO: 60236

SEQ ID NO: 219032 - DNA, 422 bp, Homo Sapiens; identical to SEQ ID NO: 59820

SEQ ID NO: 219033 - DNA, 607 bp, Homo Sapiens
tttttttttttttttttaagggggaactcattcctcttcctttgggcatgggctggacttggtgactacagcagcccggtggagaggcctcctcaaagcagcccttgattttgaattgcaacctgctcctgagcccctcaccccccgtgcctccgatgctcacagaacccactgaggggatggctagaccctcacaagagccaggttgtcccctaaccctccacaagggggcacagggccccagccctgagtgtgcagatgtgcgtttaacaaggacacccattcccaattcatgacttcccacttcatgactttgcttcttttgagataattaccagctttgcgcaagcagcactgagaaaactattagtttcctagttactaaactgcaatgtttgctacttttctatgaaggcaggcccctataattagcacccacatcacagctgctgaaactcggccgcagtaacgcaggcccagctgtgggtgtctttcctgcccaagtgaagcccatctggctgagtgccagctctctgccatcaatacccaattgccagcatcatgctcctttgtcaggggtgagcccccctcctcgtgccgaattctt

SEQ ID NO: 219034 - DNA, 485 bp, Homo Sapiens; identical to SEQ ID NO: 60222
  misc_feature (470)..(470): n is a, c, g, or t

SEQ ID NO: 219035 - DNA, 456 bp, Homo Sapiens
tttttttttttttttttaaattgagacagggtctcactatgttgctcaggttggtctgagtaatgatattatcttgcatttatgtggtgctttactttttgttacacattcacagtaattaacctcatttgattttcaacatctctacaacagaggtttggcaaatattttttgagtggctgctaagtggcaatcattccacaaggtatttttacatttgttacttcacttaatcctttcaacaatcctgagaggtaagcatttgctttacttaacagaggaggagacggagactcaaggaacttaaatcttaaaaaaaaaaaaaacccaaaacacccaaaaacaattatttatgttttacagataagagactataaaaccaattaacaggtactttcaccacatcagcttgtaagatgaaatggtttatcatcctaatgttagtgaatgacagag

SEQ ID NO: 219036 - DNA, 528 bp, Homo Sapiens
tttttttttttttttttggtgagggaggtcatacttaagcacctactatataccagggatagtactatgcaaagtcacacacgtttacgttaaactcatttaagaaatactgattagaatttgtaaaatcatctaaccatttggccttactgactatactgacataaatataagaagttctatcatctccaacctaaaatagcctagaggctcaacaccagtaagtcagtactgctgcattagtgacagcgctaaacctgagcctaagcagttcagcaagaaacactgcctgtagctgaaaggtaactctactttctctagcagcccactcaaacaagagtttaagtgctatgcattactgtcaagtcctacagcacatacatctttaaatctggtttatgctcatcagctgtgaatcagtacaagtaaaaacataaccttgtagccatcattttttattaaaaatgtaagaaatatcactgcagacccatttcggtgtcacaatcttccatttcggggtcatgttta

SEQ ID NO: 219037 - DNA, 430 bp, Homo Sapiens
tttttttttttttctttattacatttgttaaattatatttttcttgaaatctgtccaatgaatcaaagttttgaggcataggattctgagattatgtatgctcaaaaaagtatgtcaaaattgccactgaacggaaaactaaatggtactgttgtgatcctctagttcatcttctacccttatagaggagaatattaaagttaaaagagatccagagatccaagtactcttccctcacctcacctcaacacatagctgttaagtgacagaactgggactagaatctaagtctagtgctctttccaatatgctatgctcatttcttaaatggactgcatccatcagtcagcaaatcaaagggagaacagataagagagctgtaatcaggaacaacttcaaccactgagaagagagaatgtttactgtgtat

SEQ ID NO: 219038 - DNA, 460 bp, Homo Sapiens
ctgttaaaagcatctttttatttgctgtaagaggataatctgcatttctatacaatccattatgcaaaaaacatggtaggcattttataagcagtgcaaaatctcaacatctgtacatttgctccattaaaatattagcaaaggttgaaaaaaactcacatcttaggagaaaagaatacagatttgttccccaggaacatggcttccaacatcaagacgcacagccaagaaaacacagcctcattaaattctcaatacctaagatggaaggtattgacagataggtagggaacattatttgaggaggctactactcccatgggcctcctcagtgtgtagccaaatgactttgtacagcaagcgctaaagcatctgtgtataaacagataggaattacctgttgagttaacctaatccaggtggaacagacactaccagcctgcagaagggccttctaacc

SEQ ID NO: 219039 - DNA, 566 bp, Homo Sapiens; identical to SEQ ID NO: 55545

SEQ ID NO: 219040 - DNA, 542 bp, Homo Sapiens
cacagatctaacatttcttttctccacaggacagtttgacactagaaaacattataaaataaacataaatatggcttctacaataaagcagtttgtagaatatatcgaatattatagatttaagagttctggtaggatataagcgacatatgactaaaatagaaaaatagttacaatactatcacatagtattgtaatttttcattgttctgaaactgttcataactatttaggttgagtgtaatcataatggcaatcatttgctttaaaaatcagaaataatgtaaaatatataaagtatataaagaaagtttgatcctagctcatgggtgcccaactggagttattttggaaggctgtaagaccacgaattatgagaagatagaaggtacagattaaataataaatctatttgttattagaaattggcttataggaaatctatcataataaagtctagttttagatttcagaccacacaagaacaagagaaaaaaacgagggtcaagtaaatagttcttgctcataggtcttgctgcctc

SEQ ID NO: 219041 - DNA, 577 bp, Homo Sapiens; identical to SEQ ID NO: 61040

SEQ ID NO: 219042 - DNA, 534 bp, Homo Sapiens
gagctggggctcctaaaggttttatccacttggctgccaaggaaggcattggacaacagccagctttctcccagagagcccagctgacagaaactagctgtgaccacacagacagtaggagtatgcaaatgtccctccttgtccacatttcttgtttgtgtcccaaggagctatttccctcttagccaggatctggagtttcagggcaggcctggcagtgctgaggctgctaaagatggtctctcaggcttatttctgaggccggctgagtctccggagtttcttgagttgactgagcagctcagagataaaagcctctgtggggcgggggcagttcccaagaatggcctccagctgagtcttctgctcctctgtggatagatccatgagagcttccaggtcaatctcaggctcagaaggggttgcttgatcctggaagagctcctgaacttgagcatccacccattgctccatctccagccagcgctggagctggccccggtcatacttcactgtcaggcggctgggtctccg

SEQ ID NO: 219043 - DNA, 507 bp, Homo Sapiens
ttttttttttttaaataaataaacaaacaaaatgtattaaactttcaaaatacaaaagcaccatcaaaaagtcacagcatttctctacattaataactatcccaaaatgaaattcaaaaacaattacatctacaataactatagtttgaaataaatttaaccaaaaagttgaaacgccttacattctaaatagaaattaatacataaatggactattcatgaactgacattaatatttgtattacacaaaatgacctacaggtataatgcaacctctatcgaaatacgtgatatacttcatagaaaagttttaaaagtatatctaaaattcatatggtatcacaaaagaccctgaatagccaaagcaatcaagacaaaataagtgactaactttgaaatacactacatagctatggtaaccaactgtatggtacttgaataaaaacagagacataggtcaatggagcagaagaaaaaaacagcagaaatatatccatgtatttacag

SEQ ID NO: 219044 - DNA, 540 bp, Homo Sapiens
tgagcggtagcaagctttattgtgaagaggaaaatgacaaagctcccacagcgtagaaggggacccgagcgggttgcccatcactggtcctttctgggggttccttccccaagtttcatagggatttacaggctagagcttttgtccgctattcagtagcaggtcacaataccttcaatcctgctctaatcagaggcatctctgccataacttcaggaggaattgagggagagggggcagcaggagccctctgtgtactggggaaggaaagaattcctggcttatactccctaaagacaggactacactcagatgtggatgaagggcaggaattctaacccctgcccctcaacacacacatccctgctacattccctctttctcactagaaatttgagatgaagggtcctaatcacatcttctgcttgaaacagcagagatttcaggctccacccatagtcaatagaaagaaaggggcaaggggactgtgaagtcctgaatgcccagctctgcgcaggaagacaggcagagccagctgca

SEQ ID NO: 219045 - DNA, 426 bp, Homo Sapiens
gaaataggttctcacaatgtttggggggcttttttcaaactcatgggctcaggtgatattcccacctaggcttcctacagtgctgggattataggggtgagccaccacacccagcctggagctaagttttgaacccagggatgtaactattcacatgcactatccaccatgctatagcagaaatctgagcacctgcctgcccacgaagacttggagtcctcgttattccttttgcaaaataattattaaagtagtagtcatgcaccagtgttggctcatatcccaaacgtacaaatatatttagcattctaccatcggaaacagcaactgctaaggtatcatggaataataaaataaatcagcagacaaaggctttgtaagtctgttattattaatcaaatgcctaagaacttctcaagtaaagtt

SEQ ID NO: 219046 - DNA, 529 bp, Homo Sapiens
aaaatacttgcatgctttattcaaaatacactgtgagtacatgtctatgctaatattctgtagtatcatttgaagtggctatattatcttatagaggtgccctgattttgtttttaaaaataaatatcctctgcagaacacactgtcaagagaatgagaagacaagcaacagactgggagaaaatatttgcaagagacatacctaacaaaagattgttattccaaatattcaaagcactcttaaaacttaataagaaaacaaaacaacaacaaaaggaagatttttaaaatgggccaatggtataaacaggcaccttatcagagaagacatacagatagcaaacaagcataatgttcaacattttatgtcatcaggtaattggaaatcaaaatgagataccacttcataatagtataatccaaaatactgacaccaccaaatgctggccaggatgtggagtaataggagctctcattcactgcttggtgcaaatgcaaagcagtatagccacttggaataatttggcag

SEQ ID NO: 219047 - DNA, 608 bp, Homo Sapiens
ttttatttttgcgaatcttctctgtatcgggccaattttagtatgtgtcctgccaaagcaagcatgtgacgtctttgttagtgaatctgagtggattttctgcccctctgccaagttctagcacttctcgcagagtcctgactgatacagtacttgtcagggtgcttgctcgctattccttgaatcgagctgagtgacagcagagccatgaggtcttgtgtgtagggagattactttgggaagcgatcctgtggggtgtggctgtgcatgcatgaatgcttagttctgaggcagaaatgaagagatacgtggtatcgctggggtgggtgctgtcatgttacatctgtgtaaagatagttgccatagcgatggctgcactaaaaggtgggcagaaagcttgtgaggcaaggctgaggtatagctaaaattatacagctaaaattatatatctaaaaatgagtaaggagcaagtaccttcagctcgtgcaaccacactgccaatcacccaggcttcttccttgtgctgctggatatccctcagaatctgctctgtctgctcctttgataccagcaggacagcgccaaccccacagataaatgttctggcc

SEQ ID NO: 219048 - DNA, 573 bp, Homo Sapiens
tctgatttactataatatttctagtaagccattggcttagaaaccagattcactaattaattcatttaccctttcatgatacaaaattttttaactgagtgaggcctttcctgagaattgagcacatgagctttggtgcatggacctggaaatctctgcttcttgaactcctaggggcttcctttacttcattcactcctggtgctcagcaaatttctgaatgggggaggttggccagcctgggagaggtcacccacgccaggaagtctcagtacctctctatttatcctatcacttgggaatcctctaggatctgtttcagggagtctctggttagccctgagacataagtggtgcgggtgagactcctggggcctatctcagaggtcctcacacccctaagattaaatcagtcaggaggcagggtggagagaggagtgtcctatcaggtctgaggaggttgtcaacttcctggacttcttgctaaggactcctcttcccacccttcatgggtagctgaggtcagggaatctgtagggacaagactttcttttaaatgctaatctgctgact

SEQ ID NO: 219049 - DNA, 531 bp, Homo Sapiens
  misc_feature (515)..(515): n is a, c, g, or t
ttttttttttgctgtataattcttatttattaatgtgcaatatttagttcttaaaaaacaaaaacaaaaaacacatacgcaaaacaagacattaaacaaattctttcatgcacggcttctctacctgacaaggttccgctgcatgattttttgaggagttcccttgctcagggttggcatatgtttttcaattttcactatccaaagccatatttgcagaaagatatacgaatattgtaaatggtgggatgtgctgctctcatatgatgaaaacttcagttccttggttgtctgggactttgtgtaaatgccaataaatttgagagttcgcccaactgtgtctcttaacctttgttcccaaaggtgaagggcaggatttttaatcaagtagcaatttatctttaattaggaaaacataattaggtatcatcacctcatttcaattactggtgggagaaagtcacatttcacgagtagtgacccatgttgggttatggatctcctattactgaatnttgcatctgtatttat

SEQ ID NO: 219050 - DNA, 463 bp, Homo Sapiens
gtgtttcatttctagacttttattctcaaagggatgatgaggaagagacacggcttaagaagttttgagctgagaaatgaaaagaagtcacttttctttgctgccacagaactaagtagggggaaaattaagcccaggggttcatttaacctgttacaacaaaacacagaaaccagacggcaaagtgtcatttgcaaggtgatgtgtctttgtcggagctgaaggctgtcgccggtcggctgtctccatggagtccccatctggccctgcactccccacagggatgatttcatcaggagcgtctgcatctgctgcgtttctgtcggggatcagctgctgactgtcggcatagctcatgacggcagcagttctcctgtcttcatttccctgagcacttgcttctgcaaaaaaccgtgagaggaaggaaaagtgaggacggttgcatgagtgggcttcatggctg

SEQ ID NO: 219051 - DNA, 486 bp, Homo Sapiens
caaaatttccaggaatttattggaaacacaatacaaattggttagtagatggcatctccttacagacagacaatccacactgtggtatcatgctcagaacgaattatcctgcggaaacactcatgagcacaggtgcgtgctctgggttagcttccctggcagggaaaatcagagacatagtgcagaggaacaggaggggtggacagaaaactgggacatggccttcctggggggaatggtgaggaggggctgctaactgagtaaattcccccaaaggaaaacagggacaacagtaaagaataaaggcttccccctccctccccaaagccgtttcctctctaggcagagtaaaacagaatctccaaacacccacggggcagctcctccacctcccctcgccagggacttaggacagcagtggggcataaacaccaggctcagacatgacaccgagtgcactgaggccacgcacagccccacctgctt

SEQ ID NO: 219052 - DNA, 573 bp, Homo Sapiens
  misc_feature (472)..(472): n is a, c, g, or t
ttagatgttttaaaatacatttatttcatgtcgtttgtccccagggtttggagtttgatgttctggaccaagcgtaggctctgagcaaatgctaccagggctggagaatcagttctgccacttcctagttatgtgatcttagacaaatttccgcgccttagttttcttctcagagaaatgagaactagtctatccacactatggacaagtggtaggaggcgaaggagctcacgtttgtaaagagccttgcacggtgcctgagacaaattcagtgcttagcaaatgttagctcacctctcccttttcttcctgtatccgattttgtatacaaatgtgtagaaaatttacatgaaataatgcagaaagatgaaaatccatgtttattcttcttgcatttggtggatgctagtttacacttcggtggaatggtcaggttcttccctcgatgtgccttgtgcagactgccccctgngttgaagtggggtgttactacgcagatggaaacagcggcagaggtatttgctaaatgtcccatcaagaaacgcatacagggagagggttgatgcagcagtg

SEQ ID NO: 219053 - DNA, 514 bp, Homo Sapiens
actttgtaaggggaattttaatcaatatacggttacgttatcattaatcttttacaattctaagttttcatattaggattaactgtactttgggaacacttattcagtgacaaaaaagagtagatgttttacaacacaggtgaataatgtgcttgtttcttctatccgttaaactatcctcatttgtgaaagtagagttacctatgtttttctgttcctcttttcaaatgtggatgtgagtggagaaaattgtccttagtatgcttccatcttcagattaggtttctccctgttttccgatgagcattgagctctttcaagtcaaactaagtgtccagcctattattcaaaagtaatatttcaaagttcagagataatggatggtgaaaaacacattaggtatgttctttccagattgcactccccagcgtggctgcagcacaaggaagaatctcatggctcatgtactttaccttctgcctgacaaagtttaagcacttctattttagggtat

SEQ ID NO: 219054 - DNA, 451 bp, Homo Sapiens
tttttttaactcttcactgcttctttattatgatgcacccacagtacagaacctctcacacatctgtgaaaggggaaggttacatttctttttggggagcaccttcatttttgtttctgttaccactttgaagaaagcaaatcatttccaaagaaaaacattttaaattccaagtgtttaagactcagcttgtattttgtggtgtttgaaaaggaagtagcatgttttagccagaggtggaagattgttttgtggcattttaagtttgatgtggatcagaagtcttcactgtctggttgaaccagtctataattttcatatgcaacttttcatatcaaaaatgtttcatttttacctctactcacaaagagatgctgtttaaaaaaacacacacacagctaaatttaaaaccgatcatgaaccacagcattactaacagggaaaatgaact

SEQ ID NO: 219055 - DNA, 236 bp, Homo Sapiens; identical to SEQ ID NO: 50079

SEQ ID NO: 219056 - DNA, 421 bp, Homo Sapiens
ttttttaaagccaacaaatatttattgagtacatactatacagtaacactgctgttggccctggagataaaacagtcacaggtcagcccttgctcccatagggcttacactccagtggggacacccacaaagcatgaaaataaaagcagtaaaaataaaacagggcattatgttacagaggggtgggggaaaaggctctactatgttgaaggcagaaaaaggcctcccaaaagagggagcatttaagctgagatgtaaggacaggaaaatgccaaaatagggttacaaaaattgaggtttatacccccataagtgtataattatgatttgtcaatcaaaaatatttatattttaaaaagattggaggcctctaaaaaattgaggttaataataagttcacatttttaactaagagaaaaat

SEQ ID NO: 219057 - DNA, 466 bp, Homo Sapiens
ttttctctgaggaggctgtatttataaaatggttttcaatgtcaaattactcagtatggcgacccaatgagtatttttactttaaaaaagaaaatggtagtcttaaaaaaaggtaataaaagcttgaactgcagccaatcaatagcttcctttgttaaagatgctgcatcctcacgactaaagaatgaagcacaatagtgaaaatggtctctttggcagcacaagaggtactttctggcagatataattgtcaaacagtaaaatgattcccagggaggctctgggatctctctagtgggctttgacagaggagttactcccctgtgtgtgggaaggaagctggggagctgatgtgataggcaggtcgtctctggtcccaagtgtgtggtcttagctactcatgcaattgcagctaaggtatcatgcctacatcttaaaccactggtctaagtatcttgttagccta

SEQ ID NO: 219058 - DNA, 426 bp, Homo Sapiens
gaaaatgagtacattttattgtatataaatgacacctcaataaaaacgaaagatgtgagcaacatcctgggaaaagaaaatgtgatttcaccttaagtgctttagcagaattctattatatgcctcagctcttactctttcttcttttttgagacagagtctcgctctgtcacccaggctggagtgcagtggccacaatcacagctcactgcagcctcgacctcccaggctctaagaatcctcccaccttagcctcctgagtagctgagattacaggcatgagccactgtgcccaggaacttactcttgcctgtaaaaatacagctctgaagtgaagaaatcccaggcgccacatcaaggaggcgaaactagagtccgcaggaggccagccccgcacgaggagtgtcaaacactaaggatcctgac

SEQ ID NO: 219059 - DNA, 528 bp, Homo Sapiens
  misc_feature (501)..(501): n is a, c, g, or t
ggtttaactactggctttgttgcaataatcctcgaataccacacagtggcagcttttggcatcataaaaatgggacataactgaagggaaggcttcacacatcacaaagaccgggttggttaatgactaaatctcactacatgaatacgcaatcttaaattactgtgcttatcagccatttctcgcattcatgtgtagaaaaaaccatggagacgtgtccctggagggcaggttgtaaactgcaacagttactaggaagtcagtcctttacatgctcgtaacatgggcgagctcttgagatgggatctgggtggcaggagaggttgcttttcagaggaaagctgcctgggacccagcatggtggagcagctttgaagttgagtcccctctgggtgcatactgggttccaggggatgatccttggcttgagggcaggctgcttgatggaaggggacgctccacaataagaaagaacaaaggctttggtttgtcctcatcctncagtctgtcccacacacctgccatctc

SEQ ID NO: 219060 - DNA, 473 bp, Homo Sapiens
tttgactatccattttgtttttattctcttggtgtgggacaggtccaaactaaaacatttttagtttgttgtcccatccagtttcccgatgggttacctcagatgtgaaccataataaccaggagaagtggcatgctgggcccagggcccaactgaggaatgtgaggccaactaataacttagctccttctaaactaatatccattcaaagaaattttcaagtctcatttaatgtggatggagctggtgccagggaggactatttattgagatcttaattcacaaatgtctcaaagcagtttaaaatgttcttgatgttacgtaatgagttagaaacctgtccaaccacataccagatgcatgggctggggctgggacaagttacttgaccaatctggacttccattattcatgactccaggagctccttcactcatgaactgtgtacctagacagagacacagctcagggca

SEQ ID NO: 219061 - DNA, 1000 bp, Homo Sapiens
ccaactgtccaggcactgctttcctcagacaaccgtgtcaaactcattttcaagcctgactaacttgtgtgagtttgtaaaggaatttgatgctttcttagatgcatagcttccaaattgaaggaccaatgtgtgcgttaataacctacagtaatacttttttgatttccgtgaaattgttaaaagtggaaattcaaatcggtaccttcccaaagtattagtgcctttcgatggtgccatagccatacttctgtcatcatttttcttataaaccacttcattcaggtatctttaaatcagtatactctaggctgacacctggctttggaacacacttttccatcgtaaagacagagcactggagtatgttttttatataccgtaaaagattttagaatgctagctttaggttttcagcaaagcttaaagagatatggtctagatcaaattagttaattctatgttttctcaggaatcttgacttaaaacatttctgttttaaaataaattaaaaaaatacttgcaattaaattgaaatgttctttgctttttttcacatttacaagtataactactatgattttatctgtgccatactatctcatgcaactgaactatccaggcatgactaatcttcaaaatgaaagaatcctttatttcagaatattaggccttcaacagtaagatttttactggccaggtgtggtcactcacacctgtgatcccagcaatttgggaagtctgggaggtcaaggcggtggatcgcttgagtccaggagttcaagaccagcctggacaacatggcaaaaccccatctctaccaaaaatacaaacgtcagccagctgtggtggcgcatgcctgtagtcccagctaccttgggggctgatgagggagaatcacttgatcccggaaaggctgcagtgagccaagatcacgccactgcactccagcctgggtgataaaacaagaccctgtctcaaaaaaaaaaaaaaaaaaaaa

SEQ ID NO: 219062 - DNA, 562 bp, Homo Sapiens
  misc_feature (5)..(6): n is a, c, g, or t
  misc_feature (68)..(68): n is a, c, g, or t
  misc_feature (70)..(70): n is a, c, g, or t
  misc_feature (499)..(499): n is a, c, g, or t
  misc_feature (504)..(504): n is a, c, g, or t
  misc_feature (521)..(521): n is a, c, g, or t
gttanngatttatttatttatttgagatggagtcttgctctgttgcccaggccagagcgcagtagcgntncttcggctcactgtaacctccacctcctgtgatctcctgacggtgaactcctgactttgtgatccacccgcctcggcctcctaaagtggtgggattacaagggagagccaccgcgcccggtctttttattttgttttttaaatgtttagtagagatgcagtctcgctatgttgtctaggctggtcctgaactcctgagctcaagctatcttcctccctcagccttccaaagtgttgggattacaggggtgagccaccgtgctcagctgctaaagacttttaaatcataaggaaaaggataactgcaggaacatcatcaggaactcagacgcctgggcaaaggtaaaccacactggtttcttatgacagaaaccctccttgattcccttcaccaccaccaaattctcccctttgcccagcagcctagggngaggnaataggggactgctttntcactacccatgaagagagggactttggatccctgatattt

SEQ ID NO: 219063 - DNA, 421 bp, Homo Sapiens
ccccaaatattttcaatttgtgattggttgaatccatgttccggatacagaggaccaactgtaatagagtaagcattcatcatgtatttgttgatttattggcaaagccaaagtcacaaactaaaacttaaaaacttttaaaaatctatgatcttttctcatacatttttccttagccaatagagctctctctctttaaaattagttgtttgtcaacactgctactgtcataaacaaccagaaagctacccttgtctggatatcaaaaccaaacagggggtcggccatggtggctcacgcctgtaatgtcagcactttgggaagccaaggcgggtggatcacttgaggccaggagttcaagaccagcctgggcaatatagtgcgatcttgtctctatgtaaaataattaaaataaaataca

SEQ ID NO: 219064 - DNA, 427 bp, Homo Sapiens
ttcagttttttatgaattttcctcccatacagaattaaaaggcagaccatccctcttcttttaaaatcatccttgcacaaatgcattccctggcttctttctcaattatataaatgaacctaattaaagacccaaccatttgcacatcaaggtagctattccatcagttgccaactttatctgtcctgatttgaagaactattcaggagtattacaagaagttatgcacctttgccctagagtaaaaacaagcaaacccttctttaagaaataattggtttcactgtctacggggatgtaagccagtctaattagtttactgttatatttgtttggctcaaacaaagttaaatggacatttgcatgactgtaaaccttatttccatgtgttgacaggttcattgctgctaaatgatgtttactagtt

SEQ ID NO: 219065 - DNA, 1000 bp, Homo Sapiens
cccgcacaggcctggcagggcactcagcttcaagtcttcagttctgaaggtacctgagagtcaagaatgctctaccgactctagttatggtgcttctggcctttactgtgctgtcatcacttgggggctcttcttaaacatggattctgatttaggagatctaggctgggtctggagaatctgcatttccagggcggtggggctcatgctgctggtctgggacacacctctgggtcaagcctgcaggcatggcatgtcctcatgtaggctgggaagattcttgctgcccagacattttagaaccagtacccccttgagtatccaaaattgtcaagtgctagggaaattagtttcacaacttcatttagaaacccatgctagaactttaaattatgaagtaaatgttatgattatgtatatgtttgctgtaagaaatacacattttaagtgcacatttaaattcagatctttacatagggtaaataaatataagttcccaatttttgtaagtaatgtttttagtacaatatgtctcacttcaaagcattcagcatatgaaaatctgcatttatataaaaataagttggctgatatacattcactttacaaaaaaatgcttcgctttataagccagatattcacaagttttttaaatagtaagctaccctaagttatataataaactttgaaattcaaattgcaggccggcacgtggctcacacctgtaatcccagcacttggggaggctgaggcagggcggatgacctgaggtcaggagtccaagaccagactggccaacatggtgaaaccccgtctctactaaaaatacaaaaattagccgtgcctggtggcgcgtgcctgtaatcccagctacttgggaggctgaggtaggagaatcacatgaaccctggaggtggaggttgtagtgagctgaaatcgtcccactgcacccagcctgggtaacacagcgagactccatctcggggaaaaaaaaaaaaaa

SEQ ID NO: 219066 - DNA, 765 bp, Homo Sapiens
cgggcctgccagacacctgcgcccttctgcagccgcccgccgcatccgccgccgcagcccccagcatgtcgggcccagacgtcgagacgccgtccgccatccagatctgccggatcatgcggccagatgatgccaacgtggccggcaatgtccacggggggaccatcctgaagatgatcgaggaggcaggcgccatcatcagcacccggcattgcaacagccagaacggggagcgctgtgtggccgccctggctcgtgtcgagcgcaccgacttcctgtctcccatgtgcatcggtgaggtggcgcatgtcagcgcggagatcacctacacctccaagcactctgtggaggtgcaggtcaacgtgatgtccgaaaacatcctcacaggtgccaaaaagctgaccaataaggccaccctgtggtatgtgcccctgtcgctgaagaatgtggacaaggtcctcgaggtgcctcctgttgtgtattcccggcaggagcaggaggaggagggccggaagcggtatgaagcccagaagctggagcgcatggagaccaagtggaggaacggggacatcgtccagccagtcctcaacccagagccgaacactgtcagctacagccagtccagcttgatccacctggtggggccttcagactgcaccctgcacggctttgtgcacggaggtgtgaccatgaagctcatggatgaggtcgccgggatcgtggctgcacgccactgcaagaccaacatcgtcacagcttccgtgg

SEQ ID NO: 219067 - DNA, 780 bp, Homo Sapiens
ccgatttggccgccggggcatccttcttctctccatgacccttaccggcattgcttccctggtcctgctgggcctgtgggattatctgaacgaggctgccatcaccactttctctgtccttgggctcttctcctcccaagctgccgccatcctcagcaccctccttgctgctgaggtcatccccaccactgtccggggccgtggcctgggcctgatcatggctctaggggcgcttggaggactgagcggcccggcccagcgcctccacatgggccatggagccttcctgcagcacgtggtgctggcggcctgcgccctcctctgcattctcagcattatgctgctgccggagaccaagcgcaagctcctgcccgaggtgctccgggacggggagctgtgtcgccggccttccctgctgcggcagccaccccctacccgctgtgaccacgtcccgctgcttgccacccccaaccctgccctctgagcggcctctgagtaccctggcgggaggctggcccacacagaaaggtggcaagaagatcgggaagactgagtagggaaggcagggctgcccagaagtctcagaggcacctcacgccagccatcgcggagagctcagagggccgtccccaccctgcctcctccctgctgctttgcattcacttccttggccagagtcaggggacagggagagagctccacactgtaaccactgggtctgggctccatcctgcgcccaaagacatccacccagacctcattatttcttgctctatcatt

SEQ ID NO: 219068 - DNA, 733 bp, Homo Sapiens
tttaatataactttacaactatatctcattgaaaataaagtcattggggatttttacctctaatttggatggaaagcacaagaagccacacattcattaatatgcaacaaatgttgtatttatgttactgaatatttctatggattaaaatagaaaaagtttaattgattttttcttttaaattttaataacaggttcaccagctggtagaaaatagagacacatgatgatttgcattgtaataatttctgtgtgtatgtgtgtgtgttgttttgtttttataaagaaaagtgtgtttgtacccatgagttcagcatttctgccatcttgctattttcattttccctgtggaagatgcatggttgcatccttttccttctgaccaacacttagtctttaactttgtaaggttcggtttaaggtttcagggttagcactatagttttggttcattttctcattaacgataaaatatgctgtaaggcactataagaatataaatgattctattacaattgaaagttacttgacattacatgaattgaactgcctttcattatcttcagacactttgttttagtatttttttttaatttgctaggtttgtatatagaagatcctttcattatcaagaatgagtatggttgcttttgccatggttgcttttactattaataaatgtatctagcccacccaaactctgtagtaacttttgagattctcttaatttccc

SEQ ID NO: 219069 - DNA, 727 bp, Homo Sapiens
gtttcggtccggaattccgggaggaggcccagtgtaagcaataacagatctgccacatgcagaagcaaatatcaggcctgtcgcacacgggcggcatttaaataggaatttctatttttgaaataagggatggtctatgaggcatacagtagatttgatgtgatccttttctccctcccttccataatggatcgtggtctgtgtgactgaacccacacagagtgtcatgggtgacagtttctggttgaagtagctccacgctgggcttctgtggacagcagattcttttccttctcacaaggggctcatttaaaatttggaggctgggtgctgtggctcacgcctgcaatcccagcactttgggagactgaggcgggcggatcatgaggtcaggagatcgcgaccatcctggctaacagtgaaaccctgtctccactaaaaatacaaaaaattagccgggcgtggtggcgggcgcctgtagtcccagctactctgaagactgaggcaggagaatggcgtgaacccaggaggcggagcttgcagtgagctgagatcgcgccactgcactccagcctgggcaacagagtgagactctgtctcaaaaaaaaaaaaaaaaaaaaaaatggaacgcagggcaagaactcgtatttggaaggagatgggggaaaggagcggtattatacctaagttgtatttgcaggcaaatgagatggagccctctctgtaa

SEQ ID NO: 219070 - DNA, 571 bp, Homo Sapiens
ctagttctagatcgcgagcggctcatggcctacctcggcaccatcaccaaaacgtgcaacaccatgaaccagtttgtgaacaagttcaatgtcctctacgaccgacaaggcatcggcaggagaatgcgcgggctctttttctgatgagggtacttgaagggctgatggacaggggtcaggcaactatcccaaaggggagggcactacacttccttgagagaaaccgctgtcattaataaaaggggagcagcccctgagcacccctgctggtggctctgtcctctgttaggcaccacactggttggtcaacttggatgttcatcgaggctcattctggccttgctcagaagcccttctgatgctcttcagtgagggaggcactaccatttgaagtgaccccatgtcagtcacatggactggtctttagcaaagtccaaggctgcctgcttccacctaagtggtctctgttctacactttaatgtcaccctctacatcatcttacctagcccacccaaccttataaacatgataattgactactaaaaaaaaaaaaaaaaaaaaaaaaaaaaa

SEQ ID NO: 219071 - DNA, 771 bp, Homo Sapiens
atttttaaccatattaattgttatattttgtatttcataattatattatgtgttagtgtgtactggaataacatgttttatttggttagttggtgcaaaagttttctaaatctactgctgtattagaaactgaaaagggagggaaattccagatgtttgatgggaacatcactggtgaatatctaggattggtaagtagactcaaggttgaagaagtaaggtgggattaactcttaatattactttttgtatatgctgtttttagcaccgaaatcacgagggtctgtgttgcctcaaccttaacagcagccctctgttctggttactattactgtacttaaaacattattatatattcctgctgtccttgatgttactgctgttctgagacattttggcaataaagacaattatcagtggtgctgatgtataaactggaagaaggaccgtatgttgttcattgattcttctaggagtttcaatgaaaggatttttctgtgttgtattgtgggaagtcttaaaagattttcagtggaatttcccctctcttttcagttaacaaataagaagatcatcatgaaatggagatgtgggaactggccagaaggtatgttactaattactgcccttcatattaaaggtcccaaaacactaaggctaggtttttcgtatggataaattttccttttcataatgcggtaataaggttcctattttttttcttagaacactatgccatggttgcactgaattttgtgcctactctagggc

SEQ ID NO: 219072 - DNA, 772 bp, Homo Sapiens
ctgccctcaccaaaatggcgctagctcggaagctgccgaggtgctaggagttgccgaagcaagtccggaagctaccgagcgagtccggaagttgccgaaagggagcagcggggaaggaggatggcggatatcatcgcaagactccgggaggacgggatccaaaaacgtgtgatacaggaaggccgaggagagctcccggactttcaagatgggaccaaggccacgttccactaccggacgctgcacagtgacgacgagggcaccgtgctggacgacagccgggctcgtggcaagcccatggagctcatcattggcaagaagttcaagctgcctgtgtgggagaccatcgtgtgcaccatgcgagaaggggagattgcccagttcctctgtgacatcaagcatgtggtcctgtacccgctggtggccaagagtctccgcaacatcgcggtgggcaaggaccccctggagggccagcggcactgctgcggtgttgcacagatgcgtgaacacagctccctgggccatgctgacctggacgccctgcagcagaacccccagcccctcatcttccacatggagatgctgaaggtggagagccctggcacgtaccagcaggacccatgggccatgacagacgaagagaaggcaaaggcagtgccacttatccaccaggagggcaaccggttgtaccgcgaggggcatgtgaaggaggctgctgccaagtactacgatgccattgcctgcctcaagaacctgcagatgaaggaacagc

SEQ ID NO: 219073 - DNA, 711 bp, Homo Sapiens
ctcaatagcattttcttacagataacaaatcaagagtgaaatttgaggttatactccagtaaagtttttaacacttgtgaatatggtcagctagactaaacttgactcttttttttaatggcttttttatctgtgaacattcagataagtggattttcaagtactggttggggatgggaatcgtgcttttctttaaacttcagtttacgagatgctttgagagcgttaggcaaaagcagaaataaatatcaggagcaacggggaaagctttgtaaaagatcatggtggccactgttgcagctttgaagaatgagtgctggcttgaacagttctttgcctgcatcattggtagctgcactgaaaggaaaaaactttcaccttaagaatttgaaaaggaagaaacctgggctctggtcttcatggcatttagactgagatgcttaaacagaacagaagtaatacgcatttcctgccataggatagggaaaatgtaacaagctggttgctcttgaggttagaaaattgtctgtttctctgtggatgaagctggatttacttgaaaatggagagttggcttattgtttgaatattgggacatcaagctatctatagccaagtttcagtcgcaaccagttttccctttgtctggggtaaattcgatacaaaatgattctttttgaatcctgaatccataaattacacttttttttt

SEQ ID NO: 219074 - DNA, 742 bp, Homo Sapiens
cgctgacccagtgctcggaaaagctggtgcagctcatcctgcacgaatacaagatcttcaatgcagaagtgcttttccgagaagactgctccccggacgagttcatcgatgtgatcgtgggcaaccgggtgtacatgccctgcctgtatgtttataacaaaatcgaccagatctccatggaagaggtggaccgcctggcccgaaaacccaacagtgtggtcatcagctgcggcatgaagctgaacctggactatctgctggagatgctttgggagtacttggccctgacctgcatctacaccaagaagagaggacagaggccagacttcacagacgccatcattctccggaaaggggcctcagtggagcacgtgtgccaccgcatccaccggtcactcgccagccagttcaagtacgccctggtgtggggcaccagcaccaagtacagtccgcagcgggtgggcctgacccacaccatggagcatgaggacgtcatccagatcgtgaagaagtaacggcgcctgccgggcctcccgcccacctgcctcgtctccctggggaggtggtcccactgggacacacaaacacccaaacagaaaaatacaaatacacgtaccccaggaaggggtccctcaagtctctgctatttacagaagtttcttcagtaggcagacgaagagtgtgttggggcaaaggggctcggttggaggcatttcccataagactgagccctctcatgggg

SEQ ID NO: 219075 - DNA, 729 bp, Homo Sapiens
ttttttttttttttttttttttttagaaagataattttcttttattacatttttataaagtgtagaaatgtgagtaggcagattaatcttgatactatactgagctacacaattttattcttttattttttaaattaaaaaaatatatagacaggggtctcactctgttgatcattctggttttaaactcctggcttcaagtgatcctcccatctcagcctcccaaagtgctgggattacaggcatgagccattgcacccggccacaattatttatatttattttactttattttatttatttttgagagggggtcttgctctgtcgccaagctggagtacagttgctcaatctcagctcactgcaacctacacttgccaggttcaagagattctcctgcctcagcctcccgagtagctgggactacagttgcgcaccgccacgcccagctaatttttgtatttttactagagatggggtttcaccatgtttgccaggatggtctcaatctgttgacctcgtgatctgcctgtctcggcctcccgaagttctgggattacaggcatgaaccactgtacccggtcgtattagctatttaaaaactcagacagctaacatttaaataaatccctgctgtctgggaatgatgtctgaatgaatattgtgaatacatatgctaatttataccatattaagattctaaacaatacagctatttaatatatcttg

SEQ ID NO: 219076 - DNA, 803 bp, Homo Sapiens
tgaaaacaaacccccttgttatctgaacatgttttcttcaggaacaaccagaggtatcacaaacactgttactcatctactggctcagactgtactacttttttttttttttttcctgaaaaagaaaccagaaaaaaaatgtactcttactgagataccctctcaccccaaatgtgtaatggaaaatttttaattaagaaaaacttcagttttgccaagtgcaatggtgttgccttctttaaaaaatgccgttttcttacactaccagtggatgtccagacatgctcttagtctactagagaggtgctgccttttctaagtcataatgaggaacagtcccttaatttcttgtgtgcaactctgttttatcctagaactaagagagcattggtttgttaaagagctttcaatgtatattaaaaccttcaatactcagaaatgatggattcctccaaggagtcctttactagcctaaacattctcaaatgtttgagattcaagtgaatggaaggaaaaccacatgcctttaaaactaaactgtaataattacctggctaatttcagctaagccttcatcataatttgttccctcagtaataggagaaatataaatacagtaagtttagattattgaattggtgcttgaaatttattggttttgttgtaattttatacagattatatgagggataagatactcatcaaattgcaaattcttttttttacagaagtgtgggtaacagtcacagcagttttttttaccaacagcatacttaacagacttgctgtgtagcagttttttt

SEQ ID NO: 219077 - DNA, 864 bp, Homo Sapiens
tgggtgttcgtttctcaggtaaaacatggctaaaagcttacggagtaagtggaaaagaaagatgcgtgctgaaaagagaaaaaagaatgccccaaaggaggccagcaggcttaaaagtattctcaaactagacggtgatgttttaatgaaagatgttcaagagatagcaactgtggtggtacccaaacccaaacattgccaagagaaaatgcaatgtgaggtaaaagatgaaaaagatgacatgaaaatggagactgatattaagagaaacaaaaagactcttctagaccagcatggacagtacccaatatggatgaaccaaaggcaaagaaaaaggctgaaggcaaagcgagagaaaagaaaggggaaaagcaaagcaaaagcagtgaaagtggcaaagggtttggcctggtagactcttaaaaccttggaaaatgccacatgggatagatgacggattagaatgtatacacatgtatactttgatttcaactgccaccaaatgaaaaccatttgttttcctattttaacttggccttttttcttcaattcaaacccagcataactcctcaagtttgttttgggaacttgaataaaatattttctttgatacatccaagctctactgatactttaactggatgctacccaatatccagttataatcaggcctcaacgttctgtcaggtattaatatggttagaattgttcttacaactggtaattatagtcaatagagataaaacagatgatgtactgacaaatttttgtgaacttagattttaaagaaagttgttgtataatcatatcatttaaaaatactacattagggctgggcatggtggctcacacctgtaatcccag

SEQ ID NO: 219078 - DNA, 823 bp, Homo Sapiens
cgggctctgctaaagccaaacaaagtcaggaatgaaactaaagagctgaggttgctctgtgcagaggacgagcaaaccaggacgtgctggatgacagcgttcagactcctcaagtatggaatgctcctttaccagaattaccgaatccctcagcagaggaaggccttgctgtccccgttctcgacgccagtgcgcagtgtctccgagaactccctcgtggcaatggatttttctgggcaaacaggacgcgtgatagagaatccggcggaggcccagagcgcagccctggaggagggccacgcctggaggaagcgaagcacacggatgaacatcctaggtagccaaagtcccctccacccttctaccctaagtacagtgattcacaggacacagcactggtttcacgggaggatctccagggaggaatcccacaggatcattaaacagcaagggctcgtggatgggctttttctcctccgtgacagccagagtaatccaaaggcatttgtactcacactgtgtcatcaccagaaaattaaaaatttccagatcttaccttgcgaggacgacgggcagacgttcttcagcctagatgacgggaacaccaaattctctgacctgatccagctggttgacttttaccagctgaacaaaggagtcctgccttgcaaactcaagcaccactgcatccgagtggccttatgaccgcagatgtcctctcggctgaagactggaggaagtgaacactggagtgaagaagcggtctgtgcgttggtgaagaacacacatcgattctgcacctggggacccagagcgagatggg

SEQ ID NO: 219079 - DNA, 767 bp, Homo Sapiens
tttttttttttttttttttttttcccccggtcatgaaaattgttttattaaacttcctatgtttactgtaatcagatgtagccaaagaaacaggaccttacaaaagtaggtaactaaaaaaaacatgtagttacagtgccttggctcaagcagatgctgaataaatgtaatgtgaaccaatgagcaagcaaacatgtgactacggaataagagtgagttacattaaagtcagaaatatggtcaagttagagtgtccagtgaagtgataataattcagagatttgtttcacagattgtattttatttaagcatacttactccctgacttttaaaaactgtttaagtcatatgctcctaatagtgcttaaaaatctattgcaagaagttagttctccaagtacatacaatgtactcttcttaagtttggcttcattcattaaaccgaattattttgaggtccatctaggttgttgagagtatcaactgttctttttattgccgagtagtattccattgtataaatacaccaaatttgtttatccatacacttgatggatatgggagctgtttacagtttttagctattaccaataaataatagctgctgtgaatgtttgtgtacaagtcttttttgtggatatacagtttcatttctcttgaataattagaaatggaatggatgaatcgtatggcatcttcacatttactttgaaagaaactgcccaattgtcttccaaagtagttgatccatttcacattcctatcgt

SEQ ID NO: 219080 - DNA, 717 bp, Homo Sapiens
cccttttttttttttttttttttttttttcttggaaatttttttattctccttgccaacatttcttttgacattttattacttaattatgtgacattaagaaataatttggttgcatattattttcaaaaagcagtaagaaagtagctattgagaaagaaggagggccataggtttttcaataaaacgttagaaacattataaaaaacgagactcccattacatggaaacacatgatcaaagatcagactaacacacattcaaacaggcttggttcgaaatagagttctccatttctttcagatgagccttttttcttaggctctttcagaagcacttcacaatgaacagaggtcttgccagctcatttcattagcggagaagcaaaggtatgatggcagaatcatgagaagatggaaataaggcctgaggatatggcttgatctctgagaccaattatctttgagttattcaggccaggatagaagcttagagaggatcgaggcaaaccatgaagggaagggaatgcaggacaatgcccattactggctttaccacaaactccaaatctcctggacccacttcgcaaggttgtaaagttaaatgaggaaggagcctgcattgtttgtaacataatacaatactttcactttgtcttattttttaaggtgcagctcttcaagaatttcattttttaaaaaatcatctttcacagcac

SEQ ID NO: 219081 - DNA, 815 bp, Homo Sapiens
cggagctgacggtggaggttcgcggctctaacggggctttctacaagggatttatcaaagatgttcatgaagactcccttacagttgtttttgaaaataattggcaaccagaacgccaggttccatttaatgaagttagattaccaccaccacctgatataaaaaaagaaattagtgaaggagatgaagtagaggtatattcaagagcaaatgaccaagagccatgtgggtggtggttggctaaagttcggatgatgaaaggagaattttatgtcattgaatatgctgcttgtgacgctacttacaatgaaatagtcacatttgaacgacttcggcctgtcaatcaaaataaaactgtcaaaaaaaataccttctttaaatgcacagtggatgttcctgaggatttgagagaggcgtgtgctaatgaaaatgcacataaagattttaagaaagcagtaggagcatgcagaattttttaccatccagaaacaacacagctaatgatactgtctgccagtgaagcaactgtgaagagagtaaacatcttaagtgacatgcatttgcgaagtattcgtacgaagttgatgcttatgtccagaaatgaagaggccactaagcatttagaatgcacaaaacaacttgcagcagcttttcatgaggaatttgttgtgagagaagatttaatgggcctggcaataggaacacatggtagtaacatccagcaagctaggaaggttcctggagttaccgccattgagctagatgaagatactggaacattcagaatctacggagagagtgctgatgctgtaaaa

SEQ ID NO: 219082 - DNA, 874 bp, Homo Sapiens
ttttaattatgcaatttaatttttaataacaaagatactgtattttaacatggtgaaatatacttggctaagtccagattaaaaaaaaaaagtatctagcccaacagtacaattatacagctttgtacagaacattccatagatcaacagaaaatacatttgagcacaaaaataaaaaatatttaaggagaatctctaagcagcattttatttctgcaaaagacatatcttgtactgattaaatatctacaagtgcttttcctttacaaaaatacatatattcttaatagactaagtcattaacaatgacctggtaattctttcacttcaatttgaatgatttataagctaaatcttacaaccacaaaaaggtttttatttgtattaagatgttaccacttttgacaaaaagcttaaaatattttatatttcaaaggaaaattagcaacataactttacaatatattctatgatattttgattgtgagggctactctatttaaaactgatgatctctgttgtgttgctcagatgcaggaaagcagcagaaccctggtactcccccaacaagctcctgtcgtggaccacagcttcataaggacacttaggcccccacccccattctaaaaaatacaacaaaagaacaccaaacaatgctaggctgatcccattacatttttaatgtgtagaactcctgctccagtggactgatgtgcagaggatggataaataaatttgttgactatctctccatcacccagaaatatttaatcttcatttgcactagattagtttcttattccatgaagctccataagatggaagaaaactagactcagtatttaacatatctgtttcacttgattctagattt

SEQ ID NO: 219083 - DNA, 726 bp, Homo Sapiens
ttttttttttgggttctttcatgtttaattcacgtttgttgtgatttcgaaaaatgtatactctttaaaacaattgctcgctgtgcaacagtgtgatggcaagggaacacaaaacaacaaaaaaacttgattgaatacttcaatcaaagtgcttctttattatgtgaggataaatcatactgaattaaggggaaatttaagaatattttttaagaaataacaatttcatgtaggcaattgtgaggaaaataacaatcatacaagccaaggccacgtgattcttccacaagccccagggtgagagatcgatgccctgctttaccaaatattcttcgccagtacatgttgcatagttacaaggattgtttcctgttgcattgagtcctgagcagaagttttgtcccaaaaattcattatgctgcaaagccgtaaatccatatcgtggaatgctgaagtactgaagccatgacagccaagatgcaatggttgtgagattgaccaacagacctgaaaaaatcatcataaacacaaaacagatggtcatgagaagtgttgctacagaaaccacactctgacctgctgctatggccagtgccatggaactggctgaataagccaccatcataagggtaaacatcataacgaagaaggcatctgcctttggcttcaatcctaacatgaagtacactatacaggtaaatataatacttggtaacatcctcatgg

SEQ ID NO: 219084 - DNA, 696 bp, Homo Sapiens
ttttttttttttaaaattaaattttattattttgctctaacaaagtaacctcctactttttcaaggctcagaggtggtcaacaatttgcccaactcacatggcagatagtggcggagtcaaacagggcactcaggtagggctattccagcccagagccgtttgcttggcctgcagtaccgcctttggccataagagccactcatggctggtcctggaggaggcaggacatccccaaagatgcttattgacgccagctggacgtggctggcgggaagactggcacctgttcatgaaaataaaatctcctgataaggttttcttgcggagcctggttgagcctgaatcaacaaacaacatcctgaacctgagcaccccttgctgagctaggaggaaaggaagggtgaggggaaacgtactccagctctgtttgtcagcttcattagttcacagagtttatgacctgctgcagggaacatttttgtgtgtaattcaaacacattctgttttatcattccctcggtaccctgctgggacaagaatgggctgatgacagccagcccctgggtggtgacttcagggaaaggcaccagcaagatgtgtgtgtggggagcttggaccgccagtcacaggcacaggtgtacggggagcaggggtgagtccagccagccacttaccccagggttgacaccaataac

SEQ ID NO: 219085 - DNA, 693 bp, Homo Sapiens
cttttttttttttttttttttttttatttttaccacccataacagtttatttttactttgtacaaaatacaaaaatgcaaatccaaggagtacagaccagtagtgacaggcacactgcacaacagcaaccttgtctagcaagacaggagttttttaaattttattttagtgaatacatgcattatataaaacaacaacaacaacaacaacaaaaacacaaagaggctagagatttcaccgtttctacccccaaaataacgcttgctatcaagactttggagggggatgggggaaaagaatttaaaaggcaaataatttttttttcataaaaagtaaaagctaccataaaacatttttttttctgtcacactgattaaatttcttctgaaaagccgcacatatagacaaaacaaaacaaaaattcctgaactggacaaacagcaaatactcaacagggttgttaacctaggtaacagttcagtagtttaaagaatcttttagacatctggaagcctttctattcattcctcagtacagtgttccagccatcctgcttgttttttccctccaatacctcccagaacagaaacacttgcatcgagtctgttcctaagaactagttttgaaaaagaagcgatgtacaaaaatatttaacagaactatgaaagatgcaggaaaggagtctttcttcgt

SEQ ID NO: 219086 - DNA, 786 bp, Homo Sapiens
cttcttttccaggatttatttaatggggatgtgttcaaggcaagaccgaattcagaaggatatcgacgtcgtgatccagaagtccagagctgaggactgcctgtttgcaggacaactgtgcagactacaaagcttcggaaaaccggagaggctgagtcgactaatcgtgttgttgcacgttagaaacgcttgcattgcctgactctgaaaccagaagggcggccgaatggccttcaccctccattaaccctcgcctccttcagaagccagtgcctctggaaatgcctggatctgcgaccccagcctgagcctagtagggcccaagggaagctgaacgccccgacggctctcatgggcaccggcaacagttttccgtttgtgcctactccacctgctgtctttgttgggtcagcgaacatcgcctccctctaccgctcaatcagcaaaagggaccgcccttgaggacctcacccgcggctcactcccctcccaacttcgcgggcatcgcctccggtcgcctcttccgaaggcctaacgagcatgttagctgcgaacggaggtgaggaggctccgctgactgaccggtgcccatgtccagggcacgcacaaacgccatgacttggcttggcctctctcttagttattcacaagctcagcccgataggcacctctggggcggcgacggcaaagagggtgcgcttattaagtgcagctccacggggactggcctctgcacggctgtgtacacctgagcgagacgctcagtcgctctctaaagccgcttct

SEQ ID NO: 219087 - DNA, 617 bp, Homo Sapiens
ttttgagttcagttctttatataacgtcccttgtaaaaatgaaagaataaaaacaaaccgaaaaagaggggcagggtaaaattttttaaaaaaaggaaaggaaagagaggaaaagaaaataaaataagacgatttattgcttctcctcagcatcctccttggtctcctccttcaccgagagagcttctagcttttccgccactttttcggcatgatcatttttgcctgatcctgctttcttttctctctcttcgatctctttcctgcattcttcaaactttgttttgaatttctgtgcattctcagcattcaggaagcggatggccagcagctctggcttggggcactcgtcggcgaagtcagcgtgggtgttccagacccaggcacggtcgctacctgcgttgggcttcagctccatcatcggcgtgatgtagtggttggcacagatcttcagggtcttgtccctccgcatgaggaggcggatggcccctttctccttgtgcttcaggagcttgacgtcaccagtgcctcgctccttccattctgggagatcgttctcagaggcaaatcggaacagttttgcccgcattttaaaaagttcctcttcatcttcttcc

SEQ ID NO: 219088 - DNA, 790 bp, Homo Sapiens
cagatgctggccatccagagtaagaacagcagctacttcgtggagtggattcccaacaacgtgaaggtggccgtgtgcgacatcccgccccgcggcctgaagatggcctccaccttcatcggcaacagcacggccatccaggagctgttcaagcgcatctccgagcagttctcagccatgttccggcgcaaggccttcctgcactggttcacgggtgagggcatggatgaaatggagttcaccgaggcggagagcaacatgaacgacctggtatccgagtaccagcagtaccaggatgccaccgccaatgacggggaggaagcttttgaggatgaggaagaggagatcgatggatagtcggaatagagccgccccaactcagatcctacaacacgcaagttccttcttgaaccctggtgcctcctaccctatggccctgaatggtgcactggtttaattgtgttggtgtcggcccctcacaaatgcagccaagtcatgtaattagtcatctggaacaaagactaaaaacagcagagaattgcgggttctacccagtcagaagatcacaccatggagactttctactagaggacttgaaagagaactgaggggccacaaaataaacttcaccttccattaagtgttcaagcatgtctgcaaattaggagggagttagaaacagtctttttcatcctttgtgatgaagcctgaaattgtgccgtgttgccttatatgaatatgcagtatgggactttgaaataatgattcataataaaatactaaacgtgtg

SEQ ID NO: 219089 - DNA, 756 bp, Homo Sapiens
cttgctgttgtttgcagcgtcagggtgtcagcagccgcatttgtgtttagaacatctgtggggacgcttctgatatgtgcagggctgttgatcaaagtcatctgtagcctgaaaagcctgaatccagctgattggtcatttgatcagttagagtaaggctttgcctattcagttttaaaaatcattgtgtattatctgtttgcaactatgattttgtatttttaaaaagtgagaaccacagctgtcacaaactgattagttataaaaatatacattatttcattaattttactggaaaaaatggcttagtattgaaaggagagagaagtattggtctttggtggtttactttttaaaaattttggaaagtgtgaatcaataactatttttaattatactatttgcccattctttttctctgcagtgcatttcacagaataaatcctctaacttgttttgctgctctgagccatttttaaaagtatagaaaaaacgccgggtatggtggctcatgcctgtaatcccagcattttgggaggccgagacgggtggatcacgaggtcaggagatcgagaccatcctggctaacacgatgaaaccccgtctctactaaaaatacaaaaaattagccaggcgtggtggtgggcgcctgtagtcccagctacttgggaggcagaggcaggagaatggcatgaacccaggaggcagagcttgcagtgagccgagatcgcgccactgcactccagcttgggcaac

SEQ ID NO: 219090 - DNA, 732 bp, Homo Sapiens
cgcgacgggggttcagggaatatttactgggcctctccgctccctctgctcttggaggtgccatgaggtcagttagctacgtgcagcgcgtggcgctggagttcagcgggagcctcttcccgcacgcaatctgcctcggagacgttgataacgatacgttaaatgaactggtggtgggagacaccagcgggaaggtgtctgtgtataaaaatgatgacagtcggccatggctcacctgttcctgccagggaatgctgacttgcgttggggttggagacgtgtgtaataaaggaaagaacctgttggtggcagtgagtgctgaaggctggtttcatttgtttgacctgacacctgccaaggtgttggatgcttctgggcaccacgagacactaatcggagaggagcagcgtccagtcttcaagcagcacatccctgccaacaccaaggtcatgctgatcagcgacatcgatggagatgggtgtcgtgagctggtggtgggctacacagaccgtgtggtgcgagctttccgctgggaggagctaggtgagggtcctgaacatctgacagggcagctggtgtccctcaagaaatggatgctggagggtcaggtggacagcctctcagtgactctggggccactgggtcttcctgaactgatggtgtctcagccaggttgtgcgtatgcaattctactgtgtacctggaaaaaggacactgggtcccctcctgcct

SEQ ID NO: 219091 - DNA, 778 bp, Homo Sapiens
gggatttttacagaagacaaaacaataccctttttatttttaaaactctggtgaaataggtttccataggacatcccattcaaaaaaaaaaattaatgtaaaccaacctgcctgtgggttagtcacactatacagacttcatcagagtgtttacagatacctagagtatttacaaatgctatccgttaggtagtaaagtgttgttgcaatttttccagcacatattccacagtaaaataaagggggtatattggtgttcttgtataaaaattcttaacaaatagagaaaggcaattttcctgagagaagatttgttcttgaaatatttttctttaacaattggaaatataaaatgggatgtagttgtaaaagaagcataagaatgtctaagttaacatttttcttttaaattattttaagtaccattaagttaaaatgtttacattcattataaaaaatgctgttaaatcttatgcaaatgatttaacactgattgctgcaacgcaaattgcactttttaaaaaaattattgtatacatggaagaaaaatatcttgtttgctaccctgtttacaaattccgactgacttcagatcagccacacaatatgaactttgagaaacgtcagtcacagtgtatgttaaagttacaatgcagtcttgcaaactgagtaatatttttgataagagacctcatgaaccgactcagcctccagagatgtgtaccaaatggcctcaagtgatcttctccatgaacgcacatgaaatctggatgtggaa

SEQ ID NO: 219092 - DNA, 793 bp, Homo Sapiens
ccgccctttttttttttttttttttttttttaaaagaaaaatgcaaacacaacttaaccatactttatttgactgcatcttatttagacagcttgcacatttcaaatcccattaaatctctctccaaaaggatatgggacaatagaagaaaattatgcagcaatatccagtcaaacagcagtccaatattttgagatacacgtgatattttatagatactcaactcatatctgacgtcaatataatttatggttatgtttttacaaacctgaaagccctgtaacattacagcactcattttagtgatgtcatggtgcactgaaaagtaactctgatgtactaccaatttgattttatctatactcctgaaaagtgatgaacttcatgatttttagacaccataataaatatacacatccagtcttagacatgtcagccagtaccataacacagggcaaggtaaagttaaaacatgaaaaaacaaactgctttacatagatttgtcgagcaagtgggaagggtaatttgggaaagaggcagaaaatattaaaatcgattttttattttttcttattttgctggtttcaacttcaaaaactaccgtctggtttctgatctgtggactttgctaaagtagtttcatcccaatgtacaggaaatacaggaaattataatcagcccacacatcaaaaatgatagtatacccgttagcttcttcaatactaacatatatagcttcatggtagcatgtataaaaatgttcagcagtaccaactgccaaaccagtgtcagt

SEQ ID NO: 219093 - DNA, 800 bp, Homo Sapiens
ctcctggggcagcaatcacccctttgccatccacacagaatggacctgtctttgcgaaagcaatccagaaaagagtaccctgtgcttatgacaagactgccttggcattagaggttggtgacatcgtgaaagtcacaaggatgaatataaatggccagtgggaaggcgaagtgaacgggcgcaaagggcttttcccctttacgcacgtcaaaatctttgaccctcaaaacccagatgaaaacgagtgattgctgttgccctgtttcctgctgctttgttgttctgcctgtcctagtctcctttgaagtgggaaagcattttctctcataggcaagtcacactgcattgccgaagtccagctttctgcagactggcagtcgcacacacatttggaatgcacacagcggctgcctcctgatgtttgtatcatagtcgtattgtcaaagagtagccgattttagagttcttttggatcataaactggaaatactgatggaagcacacaagtggagagaagttgacatggaaagggtcttccttctcattgctgcccgtttgtacatgggactgattctgttgtgttcaccagagaaagcttgaggccatggcgagatactgcatgtttgctgttccacaaagcagtggcttagctgccatcttgcttttctttggacaacaggaagtgaaccttaaggaagagagaattctgttctaaaactccaaaatctggcttttttttttcttttgttttggtttggttttggaaaactaattaattagactgtgtggggggttttttt

SEQ ID NO: 219094 - DNA, 648 bp, Homo Sapiens
ctttttttttttttttttttttttttggaggcagggtctctccgtagcccagcctggactacagtggcaagatcacggctcactgcagtctcgaattcttagaatcaggtgatcctcctgcctcagcctcccgagcagctgggactaccagggcataccaccacgcctggctaatttttgtactttttgtagagacggggtttcatcatgttgctcaggctggtctcgaactccttagctcaagcaatctgcccgccttggcctttcaaagtgctgggattacaggtgtgaaccaccgtgcctggctgactacagttttttaattgcacgtttgttctttgaactgaccactgtgggcattccatgccttcctccactgccgcctttttcccaagctgaaaagacaaggaagatgtggcatcaaattaactagaaagagcacgcccgtgacttcccatcaccacgtaacaacaggtgcatatcaaagctgtactcaagaaaaggtagacatagaatgataaatcccccaaaatgccgtaagaggaaaaaagtacaaaacatgatttattgtgtaccatccttggaaattcagaaggacactgaccaatgaagccataggaagaaactaagaactgggcttcaaagtga

SEQ ID NO: 219095 - DNA, 767 bp, Homo Sapiens
tttgtataacttttatttacctgttaatgaaatcatcaaaatacaatgagtaggcaccttctatgtacatctgtcctagtgcttttgagtgttaatctaaactcatacatcaacaaacattctagccggacaagtaggtggctactcagtccattaagaaacttaattactagtttctagtagccttaaagtctcatttaacatttaacaaatcaaagagcatgtcagaggctggacatcaatggcagatgatgccaaagtcatagggttttgcctttgtgtacagtgcataggctccaaagcatgacctgcacgtcttgatactcaggaatttttggaaaaagaaaatcacactcttttgtccacttttaaaaagtgaaaagtagagccttcattaccctagtagagcttaacctaatacaatacaatgaaccaaacaggaagaaaggcatcttctacaaaccctattcaaaagtcattggccagctctttaaaaagtttattaataatttaaatatttaaataacttgtaggtttatccattagtctcttctattaggctctacaccgcctcttttgggacggggttagaagttccagttttacatgctgttcctcccagcaaggccccatttcttcaagtgagtacaggattgttgatagctccgtttacaaagtggaagtgatgacagctcccattgatgtggacagttctctaaacaacgcgaggtgacttcagcttatgtggctcgttgcctgacctcttc

SEQ ID NO: 219096 - DNA, 821 bp, Homo Sapiens
cgccgggactcgggctgccggccgacaaaggacggtcctcgggggttctgaagtctgacccggccagtgggaaagccacctgcatcacaaagcgaggggcacacctgaaccggggctggcgggaagagaaacagggaaaattgaccaagagattcacaaatacaacaccccaggattcactggttgcctctccagagtccagttcaaccagatcgcccctctcaaggccgccttgaggcagacaaacgcctcggctcacgtccacatccagggcgagctggtggagtccaactgcggggcctcgccgctgaccctctcccccatgtcgtccgccaccgacccctggcacctggatcacctggattcagccagtgcggattttccatataatccaggacaaggccaagctataagaaatggagtcaacagaaactcggctatcattggaggcgtcattgctgtggtgattttcaccatcctgtgcaccctggtcttcctgatccggtacatgttccgccacaagggcacctaccataccaacgaagcaaagggggcggagtcggcagagagcgcggacgccgccatcatgaacaacgaccccaacttcacagagaccattgatgaaagcaaaaaggaatggctcatttgaggggtggctacttggctatgggatagggaggagggaattactagggaggagagaaagggacaaaagcaccctgcttcatactcttgagcacatccttaaaatatcagcacaagttgggggaggcaggcaatggaatataatggaatattcttgagactgatcacaaaaaaaa

SEQ ID NO: 219097 - DNA, 398 bp, Homo Sapiens
ctttgcattgttcctcatccgcctccttgcccgccgcagtcgcctccgccgcgcgcctcctccgccgccgcggactccggcagctttatcgccagagtccctgaactctcgctttctttttaatcccctgcatcggatcaccggcgtgccccaccatgtcagacgcagccgtagacaccagctccgaaatcaccaccaaggacttaaaggagaagaaggaagttgtggaagaggcagaaaatggaagagacgcccctgctaacgggaatgctaatgaggaaaatggggagcaggaggctgacaatgaggtagacgaagaagaggaagaaggtggggaggaagaggaggaggaagaagaaggtgatggtgaggaagaggatggagatgaagatgaggaa

SEQ ID NO: 219098 - DNA, 738 bp, Homo Sapiens
  misc_feature (678)..(678): n is a, c, g, or t
cgacagcgaggccaccggcagcgcctcttccgcccctgactccatgagcgagagtggggctgcctccccaggcgcccgcacccgcagcctcaagtcccccaagaagagggccacaggtctgcagcggcggcgcctgattcccgccccactgcccgacaccactgccctgggccgtaagcccagcctccccgggcagtgggtggacctgcccccgcccctggctggctccctgaaggagccgttcgagatcaaggtgtacgagatcgatgacgtggagcgccttcagcggccccgccccaccccgagggaggcccccacccagggtctggcgtgcgtcagtacaaggctgcggctggcggagcgcaggcagcagcggctgcgggaggtgcaggccaagcacaagcacctgtgtgaggagctggccgagacccagggccggctgatgctggagcctggccgctggctggagcagtttgaggtggacccggagctggagcccgagtcggccgagtacctggcggccctggagcgagccacggcggccctggagcagtgcgtgaacctgtgcaaggcgcacgtcatgatggtcacctgcttcgacatcagcgttgcagccagtgctgccatcccggggccgcaggaggtggacgtctgaggctgggcgccggacaagagganggggcgtgcagcgggctggaggacgggacgtgggacggagcgaggatgtggtgggggctg

SEQ ID NO: 219099 - DNA, 642 bp, Homo Sapiens
tgtagggggcacaagtttacctgaaacaggtcagtggtctctcccaagaagcgcacgccacctctggtccctggccctgaaccctgccttcttcctccctccacggtttcttcccagactttctcaagctcctcctcactgcccttcctccccagcccagcctgggaacacagatgccccgcgggtaggaggcctcgagggaggagccgggctgatgcggggctgctcagggcaggccccagggcgagcttgccgtcgtggccaggcagcctccacctgtgcttcagtggcccctgcccccctgaagcatgtggggtttgtccgctaggaggaggcaaggcccccgaagagaggagagacctgggagtgggagctcaggtcagggaggaggcaggggagtggggtctcccagacccaacggtgagctcagagcaagcttcacgcaggacgctccgaaacactgtgtggagggggctgtgttgtgggcaccttggggcctgattctccttcctccgaacgggctccttgatggcctggccacaggggcagctccccattggctgttaggaccagagtgtgaagaagaagtgaaatataaatatgtatacatatataaatatatttttaattacatgtcgtgtc

SEQ ID NO: 219100 - DNA, 798 bp, Homo Sapiens
acgcccagctcctgtcatccttccttaggtcctgcagtacagtcttcccctgaatgccaccggggacccagggggactccacccccctaagcaagcacacacatactcacagttgatgagttgctggtctttgagtcccagctctcttaccctccctttactccaccagcccgacgacccatgactgaggaggggatttctacagtctcaggatttagaaagtctgtaagccatccatgctccagaaagcaccgatctgttgtagttgcaaaaacaactctgtaatttgttgaggttctcaaactgacagccagcgagactgggtgggaggccctggatctgttctccctgactgcgggaggagcagccactaggactttagcaggaagcccacatggaggctccgccaggctgtggcccagctggtgatggcccttttgctcctggcagcctgaggcacagctgcctgtattgtcctcatctgttctgactgaaggatggaggtgctgaataaattaggcctcaggcctctaccaccagagagctggagaatgggtccacgtcattcaaggacctgaattttttatgctcaggagcattggaatcctcttcttccagggaggaattagcctgcaaggttaggacttgaagagggaaggtatttaataactgggcgaggatgggtgtggtggctcacacctgtaatcccagcattttgggaggctgaagtggccagatcccaaggtcagaagatcgagaccatcctggctaacatggtgaaaccccatctctactaaa

SEQ ID NO: 219101 - DNA, 734 bp, Homo Sapiens
ccatgcctgaggatttagcagagaggaacactggcgtctttaaatgagaaagtatacaacttctttttccttctacagcatgtcagcatctcaagttcatttttcaacctacagtataacaatttgtaataaagcctccaggagctcatgacgtgaagcactgttctgtcctcaagtactcaaatatttctgatactgctgagtcagactgtcagaaaaagctagcactaactcgtgtttggagctctatccatattttactgatctctttaagtatttgttcctgccactgtgtactgtggagttgactcggtgttctgtcccagtgcggtgcctcctcttgacttccccactgctctctgtggtgagaaatttgccttgttcaataattactgtaccctcgcatgactgttacagctttctgtgcagagatgactgtccaagtgccacatgcctacgattgaaatgaaaactctattgttacctctgagttgtgttccacggaaaatgctatccagcagatcatttaggaaaaataattctatttttagcttttcatttctcagctgtccttttttcttgtttgatttttgacagcaatggagaatgggttatataaagactgcctgctaatatgaacagaaatgcatttgtaattcatgaaaataaatgtacatcttctatcttcacattcatgttaagattcagtgttgctttcctctggatcagcgtgt

SEQ ID NO: 219102 - DNA, 792 bp, Homo Sapiens
ctggctagctgcgtgggtactggaacaagcaaacgaggcagcgagcgaaggacgggagccggaccctgggccccgtggaactccagcctgcgccaccacgtcacgcacacgctcggcgctgcgatccgcgcatataacgatatttggatttgacctgcattttggaatttatctacacttaaaatgccaccagcagttggaggtccagttggatacacccccccagatggaggctggggctgggcagtggtaattggagctttcatttccatcggcttctcttatgcatttcccaaatcaattactgtcttcttcaaagagattgaaggtatattccatgccaccaccagcgaagtgtcatggatatcctccataatgttggctgtcatgtatggtggaggtcctatcagcagtatcctggtgaataaatatggaagtcgtatagtcatgattgttggtggctgcttgtcaggctgtggcttgattgcagcttctttctgtaacaccgtacagcaactatacgtctgtattggagtcattggaggtcttgggcttgccttcaacttgaatccagctctgaccatgattggcaagtatttctacaagaggcgaccattggccaacggactggccatggcaggcagccctgtgttcctctgtactctggcccccctcaatcaggttttcttcggtatctttggatggagaggaagctttctaattcttgggggcttgctactaaactgctgtgttgctggagccctcatgcgaccaatcgggcccaagccaacc

SEQ ID NO: 219103 - DNA, 536 bp, Homo Sapiens; identical to SEQ ID NO: 40502

SEQ ID NO: 219104 - DNA, 1000 bp, Homo Sapiens
gcccagaagcccagggggagaacatgtgtgttcaaggtggttgcatgttcatggtaataattacactaatacccaataacagagaggttaccttgtggttatgagcctgggctctggagccagcctgcctcaagtcctacctctgcatcttctcgctatttatgttctgtcagattgttttccccctctgggccccagttgcctcttttgcaaaattagaataataattatacctcataggatgttgtaagagtttattaagcatgtagagcaggagtcagaaaccttttctattaaggactcaatagtaaatgtttttggcatttatggccatatagcgtcagtcatgactacttaactctgccataagttggtagaaaattcaggcatttaaaaaatctgtttgccataggaaatttgcagaagcccacagcaggcaaatgtctcttgatttataaatgaaattgtataaaatagtagccatagaaagtagacttctgattccaaattatcagcaaagtcatgcagaaaacaggcaactttttaaaaaatataaggttttagtctgtgtaaggtgattataagaggaatattccttctacgggtctgcttagctttctcctaaccactgcttttgatttatccagttcatcatcttttttttaaatagaaaatataatttggcggctgggcacagtggctcacacctgtagtcccagcactttggggggccgaggctggcggatcacgaggtcaggagatcgagaccatcctggctaacacggtgaaaccccatctctactaaaaacacaaaacaacaacaacaacaaaaaaatagccgggcgtggtggtgggcacctgtattcccagctactcgggaggctgaggcaggagaatggcgtgaacctgggaggcggagcttgcagtgagcagagatcgtgccacagcactccagcctgagcgactgaactagactctgtctcaaaaaaaaaaaaaaaaa

SEQ ID NO: 219105 - DNA, 1000 bp, Homo Sapiens
ctgagcggtctgagggcccagccacatacagtcaaccattatgaatatgtactggctggtggcagggcttctctccagcagaaaacaacagtgaggttagagaaggcacatgatttgattagatgttgaagatttacaaggcgagcagaggaaagacaaaggaggtagtatgctgaagatgaaaacagtatcttcaagtttatcctgcctaaggaaggagggatatcataaatgggataaatggcagggatgtaacagagaaactgagggaatggagattaggatgaggccaaacagcgtgtgttctgagagtcagggtgagtgttgaagggatggaaagaggcaggcaattatctttccttcatcagacaacagatttttactggacacagtattagggttctccagagaaacagaaccactaggatgtaagtatacatacatagaaaggtatgttttaaggaattggcccatgcagttatggaggctggcaagtccagaatctgcagtttgatcccaaaggctgcctgctggcagagttccctcctgcttgcgggaggtcagtcctttgttctactcaggccttcacctgattggatgaggcccacccacattaggaagagtaatctacttcactcaaaatctaccagtgtgaacagcagtctcatccaaaaacatcctcacagaaacatctggaataatgtttgatcacatatctgggcactgtgatctagctgagtagacacattaaccatcccttagcccagtagggtgactactgtgtagttaacaacagtatattgtatatttcaaaatagctagaggagaagacttgaaatgttctcaacacagagaaatgataaatgtttgaggtgatggatattctaaacttgattgttacaaattctatacatgtatcaaaatatcacacgtaccataagtatgcacaaatattatgtatcaataaacaaaatggacattcaaaaaaaaaaaaaaaaaa

SEQ ID NO: 219106 - DNA, 1000 bp, Homo Sapiens
ctttctcccattttccctgttaaacatcctcccttaggtgcctttggaaaaagatttgatgaactgaagaacagggaggtattggcccattgacttcatgttttactactgcttacgtgtttgtctgttgactgggaacggtttctctagttcaacaatgaacccaataggtgggttttcacactggctaggctttggaggattgcatttttttagacataatgtgtggggcttagggagggcagccaggcagtgtgggatgcaatctcttctctgaagcagctggttctcgctataagctcagccacgtacattccactcccaagtttccttggcgctaaaactgcttggaatagcctaagcctacggaagcaaagatgacttatttaaacagcttcatggttcctattacctttctttttctgtatcttctaactttccatgtcttcctgaaggacatgttccttttgtcactgatatttccagtcaaatttagtgatcttaaatttgatcgagagtgaggtgtaactcctaggagaaattctgagtgtttataactaggtttccgaaataatgtgtttggggaagtctctgagatgttattaattttgactttttattggtaagatctctaaaaatgaaagagtattttcacaacagttcatgtagatataatttcttggcatgtggttttggcaatcagagttttatttatttatttttttccctgtacctgcttggttaggggagactttaaaatcttgtcctggcccaattgagaggagttatctaggaactgaaaaataggtaggccctggctgctacctcctttctgggctaagacccgtaacctgggtttcttcatttgaagtgtgagaatgcacgtgtaatcccagcactttgggaggccgaggcaggtggatcacctcaggtcaggagttcgagaccagcctggccaacatggtgaaacccctgtctctactaaaaaaaaaaaaaaaag

SEQ ID NO: 219107 - DNA, 753 bp, Homo Sapiens; identical to SEQ ID NO: 58316

SEQ ID NO: 219108 - DNA, 1000 bp, Homo Sapiens
acagaggaaaagtcaatgcctgcctggcttcaaagcttcaaaggacagtctgactctcttgttagaggctaatatagctgatggctttaagttgaagctaatcctcatttaccactctgaaaaccctctggctcttaagaattatgctaaatctactctgcctgtgttttataaatggaacaacaaagcttggatgacagcatatctgtttacagcatggtttgttgaatattttaagcccactgttgagagacctactgctcaggaaaaaaaagatttctttcaaaatattactgctcattgacaatgtagttggccacccaagagctctgatgcagagatacaaggagataaatgttgttttcatgcttggtaacacagtgtccattctgcagcctatggatcaaggagtgatttcaactttcaagtcttattatttaagaataaattttgtaaggttatagctgcaatggatagtgatttttctgacatatctgggcaaaatacattgaaaatcttttggaaagcattcatcattctagatgccattaagaacacttgtgagctgagcacggtagctcacacctgtaatcccagcactttgggaggccgatgtgggtggatcacctgaggttaggagttccagaccagcctggccaacatggtgaaaccccatctctactaaaaatataaaattagccaggcatggtgacacactcctataatcctagcactttgggaggccgaggcaggtggatcacctgaggtcaggagtttgaaaccagcctggccaacatggtgaaaccccatttctactaaaaatacaaaaattagctaggcctggtggcagaggcctgtaatcccagctacttgggaggctgaggcaggagaattgcttgaatctgggaggcagaggttgcagtgagctgagatcgcaccactgcactccagcctgggcaacaagagtaagactctgtctcaaaaaaaaaaaaaaaaaaaa

SEQ ID NO: 219109 - DNA, 592 bp, Homo Sapiens
  misc_feature (589)..(590): n is a, c, g, or t
ctcacagctgcctgtggtgaactttggctccctgccgccagcaccacctcctgccccacctcccctttctctgttacctgtgggccctgctctgcagccccccagcctggctgtgcggcccccacctgctcctgctactcgggtgctgccttcacctgccaggcccttccccgctagcttggggcgagcagagctgcatccagtggaactaaagccgttccaggattatcaaaaactgagcagcaaccttgggggacctggatcatcacggactcccccaactggaaggtccttctctggcctcaattcccgtctcaaggccacgccttccacctacagtggagtcttccgcacccagcgcgtcgacctttaccagcaggcctccccaccagatgccctgcgctggatacctaagccttgggagcggacagggccgccacctcgagaagggccctcccgacgggcagaggagcctgggtcccgaggggacaaggagcctgggttgcccccaccccgctgagggagttcctcttgccccctacccccggggcttgtatatagattataaatatataagggggaaaggggnngg

SEQ ID NO: 219110 - DNA, 911 bp, Homo Sapiens
  misc_feature (809)..(809): n is a, c, g, or t
  misc_feature (855)..(855): n is a, c, g, or t
  misc_feature (865)..(865): n is a, c, g, or t
  misc_feature (874)..(874): n is a, c, g, or t
  misc_feature (891)..(891): n is a, c, g, or t
  misc_feature (897)..(897): n is a, c, g, or t
tccgctgaaaggcaatagagaaagtgatggatttagagaagaaaaaaattataaacttaaagagactggatatgtagtggaaaggcctagcactacaaaagataagcacaaagaagaagacaaaaattctgaaagaataacagtaaagaaagaaactcagtcacctgagcaggtaaagtctgaaaagctcaaagacctctttgattacagtccccctctacacaagaatctggatgcacgagaaaagtctaccttcagagaggaaagcccacttaggatcaaaatgatagcgagtgattctcaccgtcctgaagtcaaactcaaaatggcacctgttcctcttgatgattctaacagacctgcttccttgactaaagacaggctgcttgctagtacacttgtccattctgtcaagaaggagcaagaattccgatccatctttgaccacattaagttgccacaggccagcaaaagcacttcagagtcatttattcaacacattgtgtccttggttcatcatgttaaagagcaatacttcaagtcagctgcaatgaccctaaacgagcggttcacttcgtatcagaaagccactgaagaacatagtactcggcaaaagagccctgaaatacacaggagaattgacatctcaccaagtaccctgaggaagcatacccgtttagcaggggaagagagagtttttaaagaagaaaatcaaaagggagataaaaaattaaggtgtgactctgctgaccttcggcatgacattgatcgccgtagaaaagaaagaagtaaagaacggggagattccnagggctccagggaatccagtggatcaagaaagcaggaaaaactccnaaagattacnaggaatacnaatcttacaagatgacngtaacntaaagagagcagat

SEQ ID NO: 219111 - DNA, 463 bp, Homo Sapiens
tcttgtctctttttaggtgagaaatacagcattacaggtaatcagtcatgtatatgtgaaggtctatattatctgaaaatgaccatatgattgattgtgatcatgttatacatacacaatcttcctatctttctttttaacaaaaacagggtctcgcaatgtcacccagggttgatctcgaactcctgagctcaagctatcctcccacctcagcctcccaaagtgctgggattacacaggtgagccactgagcctggcccatatgtttgtattttgtttatatacaatgaacttttaatgcttagaaatatttgttgacataatgggtaataaataacctaacacaaggatggaataccatcttagggataaaaagtgctgccaggttctattttcagtatttgaccctaccaataactcaatgtgctacaagctgtgcttgaggttttggttttttaaatgg

SEQ ID NO: 219112 - DNA, 307 bp, Homo Sapiens; identical to SEQ ID NO: 60900
  misc_feature (13)..(13): n is a, c, g, or t
  misc_feature (57)..(57): n is a, c, g, or t
  misc_feature (246)..(246): n is a, c, g, or t
  misc_feature (261)..(261): n is a, c, g, or t

SEQ ID NO: 219113 - DNA, 771 bp, Homo Sapiens
  misc_feature (702)..(702): n is a, c, g, or t
  misc_feature (707)..(707): n is a, c, g, or t
  misc_feature (724)..(724): n is a, c, g, or t
  misc_feature (740)..(740): n is a, c, g, or t
  misc_feature (742)..(742): n is a, c, g, or t
  misc_feature (745)..(745): n is a, c, g, or t
  misc_feature (748)..(748): n is a, c, g, or t
  misc_feature (750)..(750): n is a, c, g, or t
  misc_feature (756)..(756): n is a, c, g, or t
  misc_feature (761)..(761): n is a, c, g, or t
  misc_feature (764)..(764): n is a, c, g, or t
  misc_feature (766)..(766): n is a, c, g, or t
  misc_feature (771)..(771): n is a, c, g, or t
cagttccaagcctttagcacaagtttttgtgagttgcaatttctgtggcaagtcaatctcctacagctgttcagctgtgcctcatcagggcagaggttttagtcagtatggtgtgagtggctcaccaacgaaatctaaagtcacaagttgtcctggctgtcgaaaaccacttcctcgatgtgcgctttgtctcattaatatgggaacaccagtttctagctgtcctggaggaaccaaatcagatgaaaaagtggacttgagcaaggacaaaaaattagcccaatttaacaactggtttacatggtgtcataattgcaggcacggtggacatgctggacatatgcttagttggttcagggaccatgcagagtgccctgtgtctgcatgcacgtgtaaatgtatgcagttggatacaacggggaatctggtacctgcagagactgtccagccataaaatgttaccaccttaagagaacccttcaagtgtggagctttctagtaggtgtccttcatagctcagaaacatacctcagaacaagccattcatgacttacctgtaatgggaaaataaatcattctatcagatcagcagttttgatgtttgagtgattttgatatgcttcacagagacaaatgctgccaaaataaacatcgaagtatagacatgagttctgttcagcaggttgaaaagtctgatttaanaaaancttttctaagttttggntgaaattatgaacccncntanaancnaaattnctggnaananccaan

SEQ ID NO: 219114 - DNA, 636 bp, Homo Sapiens
  misc_feature (632)..(632): n is a, c, g, or t
tccgctgctcccccacactgcaggaggatttgtctctaagaggtgctgccccaaagctccccaagcatcaatactcctagggctcaggacaagtggctcccctggccaggagagccacagccatgatacagggctcttatggagccctggagttgttgggcaaggatgctgtcattttttgaaccaaaagacaaacaggttaaaaggaaaaaaagtaatctgaatttcccaagtgcctacgctgcatattccccttgttagatcccattttcatgttactttgtagccttggccagaggctcaaaaaggacacaaccagtttggggaaggggtggctaaggaagatggtataggtgaaggcggctgtgtgaccactttcccccacccttcccaccctctagacaactctctcccttacctgtttttgctatggctgtaaaggtatttttcctctgccccactccctgccatacctttatcctgggatcctattttgggcctggggtgggtatacctggggctggtcttaggagggtgctaggctgcagactgccttgtactccctggacaccctcaaatggggttttctgtgttatttcataaaattctttgaagtccaataaagcatgtangaga

SEQ ID NO: 219115 - DNA, 508 bp, Homo Sapiens
ggctcagccttcccggtcagcggtggtgacggtatcccagagtgccagagaaccgttgcttttccgagttgctcttcttccaggctccgttggtggtcggcatggcccgtggaaatcaacgagaacttgcccgccagaaaaacatgaagaaaacccaggaaattagcaagggaaagaggaaagaggatagcttgactgcctctcagagaaagcagagggactctgagatcatgcaagaaaagcagaaggcagctaatgagaagaagtctatgcagacaagagaaaagtgatgactggctatttggaaaacctgggtgctactgccaactgggtgtatcataagctctaagatcaagattttgtagagtggacagtcattacatatgttataacttatcctttaaaaactattttaaactttatcctttcagctttacttagtgcgatgttttagaagcagtcttcaaagaataaaacactaaccatgcatgtgaaaaaaaaaaaaaaa

SEQ ID NO: 219116 - DNA, 711 bp, Homo Sapiens
cagctggctactgctttgtagaatttgcagatttggccacagctgagaagtgtttgcataaaattaatgggaaaccccttccaggagccacacctgcgaaacgttttaaactgaactatgccacttacgggaaacaaccagataacagccctgagtattccctctttgtgggggacctgaccccggacgtggacgatggcatgctgtatgaattcttcgtcaaagtctacccctcctgtcggggaggcaaggtggttttggaccagacaggcgtgtctaagggttatggttttgtgaaattcacagatgaactggaacagaagcgagccctgacggagtgccagggagcagtgggactggggtctaagcctgtgcggctgagcgtggcaatccctaaagcgagccgtgtaaagccagtggaatatagtcagatgtacagttatagctacaaccagtattatcagcagtaccagaactactatgctcagtggggctatgaccagaacacaggcagctacagctacagttacccccagtatggctatacccagagcaccatgcagacatatgaagaagttggagatgatgcattggaagaccccatgccacagctggatgtgactgaggccaacaaggagttcatggaacagagtgaggagctgtatgacgctctgatggactgtcactggcagccctggacacagtgtcttc

SEQ ID NO: 219117 - DNA, 771 bp, Homo Sapiens
  misc_feature (657)..(657): n is a, c, g, or t
  misc_feature (728)..(728): n is a, c, g, or t
  misc_feature (731)..(731): n is a, c, g, or t
  misc_feature (744)..(744): n is a, c, g, or t
  misc_feature (761)..(762): n is a, c, g, or t
  misc_feature (764)..(764): n is a, c, g, or t
tttcccgtccagagaccctaggagcctgggcccaatggtcccaagcctattgacagggatcacactggggcctcccagaatggaaagtcccagtggtccccacaggaggctcgggagcccacaagccattgaggaggctgccagctcctcctcagcaggccccaacctaggtcagtctggagccacagaccccatccctcctgaaggttgctggaaggcccagcacctccacacccaggcactaacagcactttctcccagcacttcgggactcacccccaccagcagttgctctcctcccagctccacctctgggaagctgagcatgtggtcctggaaatcccttattgagggcccagacagggcatccccaagcagaaaggcaaccatggcaggtgggctagccaacctccaggatttggaaaacacaactccagcccagcctaagaacctgtctcccagggagcaggggaagacacagccacctagtgcccccagactggcccatccatcttatgaggatcccagccagggctggctatgggagtctgagtgtgcacaagcagtgaaagaggatccagccctgagcatcacccaagtgcctgatgcctcaggtgacagaagggcaggacgttccatgccgaggctgccccctcnacccagaagtctgagcccagcctcaggaggggccaagaaccagggggccatcaaagcattcgggatttggnatnggttccagatganctttaaagcaaacatannanttgtttg

SEQ ID NO: 219118 - DNA, 644 bp, Homo Sapiens
  misc_feature (589)..(590): n is a, c, g, or t
  misc_feature (592)..(593): n is a, c, g, or t
  misc_feature (597)..(600): n is a, c, g, or t
  misc_feature (602)..(602): n is a, c, g, or t
  misc_feature (604)..(605): n is a, c, g, or t
  misc_feature (612)..(612): n is a, c, g, or t
  misc_feature (621)..(621): n is a, c, g, or t
  misc_feature (623)..(623): n is a, c, g, or t
  misc_feature (630)..(630): n is a, c, g, or t
  misc_feature (636)..(636): n is a, c, g, or t
  misc_feature (639)..(640): n is a, c, g, or t
acgccaccctgttcggacccaaaggcgtgaacatcgggggcgcgggctcctacatctacgagaagcccctggcggaggggccgcaggtcaccggccccatcgaggtccccgcggcccgagcagaggagcggaaggcgagcggccccccgaaggggcccagcagagcctccagtgtcaccactttcaccggggagcccaacacgtgcccgcgctgcagcaagaaggtgtacttcgctgagaaggtgacgtctctgggcaaggattggcaccggccctgcctgcgctgcgagcgctgcgggaagacactgacccccggcgggcacgcggagcacgacggccagccctactgccacaagccctgctatggaatcctcttcggacccaagggagtgaacaccggtgcggtgggcagctacatctatgaccgggaccccgaaggcaaggtccagccctaggctacagcggctctcatgatgtgggctcacctgcgccccagaccctgcaggggcccccctgcttggctctgctgggagagtgctcagccgcccagtcctgcctgcaagcccagggcgagtattgggaggagggnnanncacnnnnanannaccatgnccatccccnantctctgntgtgtntgnnccct

SEQ ID NO: 219119 - DNA, 736 bp, Homo Sapiens
  misc_feature (19)..(19): n is a, c, g, or t
  misc_feature (57)..(57): n is a, c, g, or t
  misc_feature (132)..(132): n is a, c, g, or t
tgtgcagcccctgttctgntgcatcaaaaattcaacacaaaatcaaacttgaagacntattttgaacgcaaacatgaaaatcaacaaaaacaatatatatgcagttttgaagactgtaagaagacctttaanaaacatcagcagctgaaaatccatcagtgccagcataccaatgaacctctattcaaaggaaatactatgtgaagtatgccggaaaacatttaaacgcaaagattaccttaagcaacacatgaaaactcatgccccagaaagggatgtatgtcgctgtccaagagaaggctgtggaagaacctatacaactgtgtttaatctccaaagccatatcctctccttccatgaggaaagccgcccttttgtgtgtgaacatgctggctgtggcaaaacatttgcaatgaaacaaagtctcactaggcatgctgttgtacatgatcctgacaagaagaaaatgaagctcaaagtcaaaaaatctcgtgaaaaacggagtttggcctctcatctcagtggatatatccctcccaaaaggaaacaagggcaaggcttatctttgtgtcaaaacggagagtcacccaactgtgtggaagacaagatgctctcgacagttgcagtacttacccttggctaagaactgcactgctttgtttaaaggactgcagaccaaggagcgagctttctctcagagcatgcttttctttattaaaattactgatgcagaaca

SEQ ID NO: 219120 - DNA, 642 bp, Homo Sapiens
ctgcggactgcgctgcgcggcgcgccgaggttgctgagtcgcgtgcagccccgggcgccctgcctgaggcggctgtggggccgcggggcccgtccagaggtcgcggggaggcggcgggcctgggcctggggctggcggcgctcaagctccgagcaggggccggggcccgcggcggctctggggcgcgtggaggcggcgcactaccagctcgtctacacctgcaaggtctgcgggactaggtcctccaagcgcatctccaagctggcctatcaccaaggcgtggtcattgtgacctgccccggctgccagaaccaccatatcatcgctgacaacctgggctggttctcggacctgaatgggaagagaaatatcgaagagatcctgacggccagaggcgagcaggtgcaccgtgtggcgggcgagggggccctggaactggttctggaggctgcaggggcccccacatccactgcagctccggaagcgggtgaggatgagggtccccccagccctggcaagacggagccgagctgactcctgcgctccccggcactgtgggacttcggccttccagaaggaggttttggccctgggcctctctggacgtggcctgttttctatcaataaacagacattacttcc

SEQ ID NO: 219121 - DNA, 575 bp, Homo Sapiens
  misc_feature (566)..(566): n is a, c, g, or t
acagagcagtttcccgcggagcccttggagctggccaaggattacgtttgcagccagttccctactccagaagctgtgctagaaggcgcccgctacatggtagccctgcagattgcccgtgagccccttgtccggcaggtgctgaggcaaaccttccaagagagagccaagttaaatataacccccaccaagaaaggtagaaaggatgtggatgaggcccactatgcctattccttcaagtatttaaagaacaagcctgttaaggaactgagagatgaccagtttctcaagatatgcctggctgaagacgaagggctcctcaccactgacatcagcatagatttgaagggagtggaaggctatggcaacgaccagacatattttgaggagataaaacagttttactaccgagatgagttcagccaccaggtgcaggagtggaaccggcagcgcaccatggccatcgaacgggctttacagcagttcctctatgtgcagatggccaaagaactcaagaacaagctgctggctgaagccaaggaatatgtcataaaggcctgtagtcnaaagctcta

SEQ ID NO: 219122 - DNA, 854 bp, Homo Sapiens
  misc_feature (816)..(816): n is a, c, g, or t
  misc_feature (818)..(818): n is a, c, g, or t
  misc_feature (821)..(821): n is a, c, g, or t
  misc_feature (844)..(844): n is a, c, g, or t
  misc_feature (853)..(853): n is a, c, g, or t
tctgttacaaagataacttttgaggggcgccagcctcccacagttacaaagataactggtggcagttctgtgcctaagctgacatcaccagttacaagcatatctcccattcaggcctctgagaagacagcagtgtctgacattttgaaaatgtctttgatggaagctcagattgatacaaatgtagaacatatgatagtggatcccccaaagaaggctcttgccactagcatgctcactggtgaagcaggatcattaccctccacccacatggtggtggcagggatggcgaattccactccccagcaacagaaatgtagagagtcctgttcgagtccatccaccgttggctcttccctaacgacaaggaaaattgatccaccagcagtgcctgcgacaggccagttcatgcgtattcagaatgtaggccaaaagaaagctgaagagagtccagcagaaattatcatccaggctattcctcagtatgctattccttgtcactccagctccaatgtggtggtggagcccagtgggcttcttgagctaaacaacttcactagtcaacagctggatgatgaggagacagcaatggagcaggacatagacagtagcacggaggatggaactgaacccagcccttctcagagctctgctgaacggtcctagtgtttggacacaatagtgcactttaaaacctgcttggttaccaagtgtccagggaaacccttgtattttgatgactaaaaagagcactttgcccgtacttaggctgtggaccctaaaacagcagtgttttcaacaagatgttgctgcagnancanctttttaaaacaagataaactcncaggggaant

SEQ ID NO: 219123 - DNA, 941 bp, Homo Sapiens
  misc_feature (873)..(873): n is a, c, g, or t
  misc_feature (875)..(875): n is a, c, g, or t
caaggaaatgccagccctcctgcaggacccagcaatgtacctaagtttgggtccccaaagccacctgtggcagtcaaaccttcttctgaggaaaagcctgacaaggaacccaagcccccgtttctaaagcccactggagcaggccaaagattcggaacaccagccagcttgaccaccagagaccccgaggcgaaagtgggatttctgaaacctgtaggccccaagcccatcaacttgcccaaagaagattccaaacctacatttccctggcctcctggaaacaagccatctcttcacagtgtaaaccaagaccatgacttaaagccactaggcccgaaatctgggcctactcctccaacctcagaaaatgaacagaagcaagcgtttcccaaattgactggggttaaagggaaatttatgtcagcatcacaagatcttgaacccaagcccctcttccccaaacccgcctttggccagaagccgcccctaagtaccgagaactcccatgaagacgaaagccccatgaagaatgtgtcttcatcaaaagggtccccagctcccctgggagtcaggtccaaaagcggccctttaaaaccagcaagggaagactcagaaaataaagaccatgcaggggagatttcaagtttgccctttcctggagtggttttgaaacctgctgcgagcaggggaggcccaggtctctccaaaaatggtgaagaaaaaaaggaagataggaagatagatgctgctaagaacaccttccagagcaaaataaatcaggaagagttggcctcagggactcctcctgccaggttccctaaggccccttctaagctgacagtgggggggccatgggggccaaagtcaggaaangnaaaggggagacaagaattcagccaccccgaaacagaagccattgcctcccttgtttaccttgggtc

SEQ ID NO: 219124 - DNA, 824 bp, Homo Sapiens
  misc_feature (824)..(824): n is a, c, g, or t
ggacccctggttctccacatacgattctacttgtcaaattgcccaagaaattgctgagaaaattcaacaacgaaatcaatatgaacgaaaaggtgaaaaggcaccaaagcttaccgtgacaatcagagctttgttgcagaacctgaaggaaaagatcgcccttttgaaggacttattgctaagagctgtgtcaacacatcagataacacagcttgaaggggaccgaagacagaacctcttggatgatcttgtaactcgagagagactacttctggcatcctttaagaatgagggtgccgaaccagatctaatcaggtccagcctgatgagtgaagaggctaagcgaggagcacccaacccttggctctttgaggagccagaggagaccagaggcttgggttttgatgaaatccggcaacagcagcagaaaattatccaagaacaggatgcaggccttgatgccctttcctctatcataagtcgccaaaaacaaatggggcaggaaattgggaatgaattggatgaacaaaatgagataattgacgaccttgccaacctagtggagaacacagatgaaaaacttcgcaatgaaaccaggcgggtaaacatggtggacagaaagtcagcctcttgtgggatgatcatggtgattttactgctgcttgtggctatcgtggttgttgcagtctggccgaccaactgatggcagtaaagagaccaccagcagtgacacctggcaatgacagatgcaagcccaacaccccttttggtacgcaaaaacctgctctcaataaattcccccccaaagctctgaaaaaaaaaan

SEQ ID NO: 219125 - DNA, 781 bp, Homo Sapiens
gacatctctacaaattactatgcgagtcagaagaaaacatttgaaattaatcccagacacccgctgatcagaatcatgaaagcacaagcgtaccaaacgggcaaggacatctctacaaattactatgcgagtcagaagaaaacatttgaaattaatcccagacacccgctgatcagagacatgcttcgacgaattaaggaagatgaagatgataaaacagttttggatcttgctgtggttttgtttgaaacagcaacgcttcggtcagggtatcttttaccagacactaaagcatatggagatagaatagaaagaatgcttcgcctcagtttgaacattgaccctgatgcaaaggtggaagaagagcccgaagaagaacctgaagagacagcagaagacacaacagaagacacagagcaagacgaagatgaagaaatggatgtgggaacagatgaagaagaagaaacagcaaaggaatctacagctgaaaaagatgaattgtaaattatactctcaccatttggatcctgtgtggagagggaatgtgaaatttacatcatttctttttgggagagacttgttttggatgccccctaatccccttctcccctgcactgtaaaatgtgggattatgggtcacaggaaaaagtgggttttttagttgaattttttttaacattcctcatgaatgtaaatttgtactatttaactgactattcttgatgtaaaatcttgtcatgtgtataaaaataaaaaagatcccaataaaaaaaaaaaaaaa

SEQ ID NO: 219126 - DNA, 822 bp, Homo Sapiens
  misc_feature (743)..(743): n is a, c, g, or t
  misc_feature (820)..(820): n is a, c, g, or t
ggtcactgtaaactggcagacttcggaatgtgcaaggaggggatttgcaatggtgtcaccacggccacattctgtggcacgccagactatatcgctccagagatcctccaggaaatgctgtacgggcctgcagtagactggtgggcaatgggcgtgttgctctatgagatgctctgtggtcacgcgccttttgaggcagagaatgaagatgacctctttgaggccatactgaatgatgaggtggtctaccctacctggctccatgaagatgccacagggatcctaaaatctttcatgaccaagaaccccaccatgcgcttgggcagcctgactcagggaggcgagcacgccatcttgagacatcctttttttaaggaaatcgactgggcccagctgaaccatcgccaaatagaaccgcctttcagacccagaatcaaatcccgagaagatgtcagtaattttgaccctgacttcataaaggaagagccagttttaactccaattgatgagggacatcttccaatgattaaccaggatgagtttagaaacttttcctatgtgtctccagaattgcaaccatagccttatggggagtgagagagagggcacgagaacccaaagggaatagagattctccaggaatttcctctatgggaccttcccagcatcagccttagaacaagaaccttaccttcaaggagcaagtgaagaactctgtgaaggatggaactttcagatatcanctatttagagtccagagggagccatggcactagaaatagttgataatgaaatgagattttatgaagtataccgctcncc

SEQ ID NO: 219127 - DNA, 788 bp, Homo Sapiens
  misc_feature (585)..(585): n is a, c, g, or t
  misc_feature (683)..(683): n is a, c, g, or t
  misc_feature (709)..(709): n is a, c, g, or t
  misc_feature (724)..(724): n is a, c, g, or t
  misc_feature (730)..(730): n is a, c, g, or t
  misc_feature (733)..(733): n is a, c, g, or t
  misc_feature (737)..(738): n is a, c, g, or t
  misc_feature (750)..(751): n is a, c, g, or t
  misc_feature (764)..(764): n is a, c, g, or t
  misc_feature (770)..(771): n is a, c, g, or t
  misc_feature (775)..(775): n is a, c, g, or t
  misc_feature (780)..(780): n is a, c, g, or t
  misc_feature (786)..(786): n is a, c, g, or t
caatgtggtaaagccttcatttccgcaggttaccttcggacacatgaaatcagatctcacgcgctggagaaatcccaccaatgtcaggaatgtggaaaaaaactcagttgttccagttcccttcacagacatgaaagaactcatagtggaggaaaactctacgaatgtcaaaaatgtgccaaagtctttagatgtcccacgtcccttcaagcacatgaaagagctcacactggagaaagaccttatgaatgtaataaatgtggtaaaaccttcaattatcccagttgttttcgaagacataaaaaaactcatagtggagaaaagccatatgaatgtacaaggtgtggtaaagcctttgggtggtgcagttccctccgaagacatgaaatgactcacactggagaaaaaccctttgattgtaaacagtgtggtaaagtctttactttttcaaattaccttagacttcatgaaagaactcatttggccgggcgtagccagtgctttggcaggaggcagggggatcacctgagcccaggagtttgagaccagcctgggcaacataagaaggccccatatcggtggggntacggtggctcacgcttgtaatcccagcacttttggggaggctgaggcgcctggatcacctgaggtcgggagtccaagactagcctggccaccatggngaaaccccgtctctactaaaaatgcnagggaattgactggncatggnggngggnnccgcccatctcnnctactcgggaggncgaggnngganaaccncttgancc

SEQ ID NO: 219128 - DNA, 462 bp, Homo Sapiens
gccgtccaagggcccgctgcagtctgtgcaggtcttcggacgcaagaagacagcgacagctgtggcgcactgcaaacgcggcaatggtctcatcaagctgctggagccagttctgcttctcggcaaggagcgatttgctggtgtagacatccgtgtccgtgtaaagggtggtggtcacgtggcccagatttatgctatccgtcagtccatctccaaagccctggtggcctattaccagaaatatgtggatgaggcttccaagaaggagatcaaagacatcctcatccagtatgaccggaccctgctggtagctgaccctcgtcgctgcgagtccaaaaagtttggaggccctggtgcccgcgctcgctaccagaaatcctaccgataagcccatcgtgactcaaaactcacttgtataataaacagtttttgagggattttaaagttaaaaaaaaaaaaaaa

SEQ ID NO: 219129 - DNA, 884 bp, Homo Sapiens
  misc_feature (750)..(750): n is a, c, g, or t
  misc_feature (796)..(796): n is a, c, g, or t
  misc_feature (828)..(828): n is a, c, g, or t
  misc_feature (836)..(836): n is a, c, g, or t
  misc_feature (854)..(854): n is a, c, g, or t
  misc_feature (856)..(856): n is a, c, g, or t
  misc_feature (859)..(859): n is a, c, g, or t
  misc_feature (879)..(879): n is a, c, g, or t
ggagaagggatcagaagcgggagctgaggggagagagaggccggtcctggtctggccgctgcggctgctagcccgaggtctccaagccgggctgcggctccatcctcggctcctgggcaccgtctgcgaggctccgccgaccagagtgagaaagccgcgggcggcgaccgccgcatcatgtcagccaaggacgagcgggccagggagatcctgaggggcttcaaactaaattggatgaaccttcgggatgctgagacagggaagatactctggcaaggaacagaagacctgtctgtccctggtgtggagcatgaagcccgtgttcccaagaaaatcctcaagtgcaaggcagtgtctcgagaacttaatttttcttcgacagaacaaatggaaaaattccgcctggaacaaaaagtttacttcaaagggcaatgcctagaagaatggttcttcgagtttggctttgtgatccctaactccacaaatacctggcagtccttgatagaggcagcacccgagtcccagatgatgccagcaagcgtcttaactgggaacgttatcatagaaacaaagttttttgacgacgatcttcttgtaagcacatccagagtgagacttttctatgtttgaaagaagaatgtgtgtacatttcaagaatttgggttttttggagggaggaggaaactgtttacttttttcctccacacgtttgatttttgacacatacacccctaattccctcaacagcanaacctacctgcagccaccaggggaccagctctgtgtaggtaaccanatggctctttttcccaagccgccatcttccanctgaccanactaaactcccaacccanancanggcaggggacaggtctcaantcctt

SEQ ID NO: 219130 - DNA, 823 bp, Homo Sapiens
  misc_feature (790)..(790): n is a, c, g, or t
  misc_feature (792)..(792): n is a, c, g, or t
  misc_feature (796)..(796): n is a, c, g, or t
  misc_feature (804)..(804): n is a, c, g, or t
  misc_feature (808)..(808): n is a, c, g, or t
  misc_feature (818)..(818): n is a, c, g, or t
  misc_feature (820)..(820): n is a, c, g, or t
  misc_feature (823)..(823): n is a, c, g, or t
gcagagagtgttggccagagcgctgagccccccaagccctcagttgagccggccctgcagcagcaccgtgatttcatcgccctgagagaggagttggggcgcatcagtgacttccacgaaacttatactttcaaacagccagtcttcaccgtaagcaaggacagtgttctggcaggtaccaacaaagagaacctagggttgccagtctcgactccattcctggagccacctctggggagcgatggccctgctgtaacttttggtaaaacccaagaggatcccaaaccattttgtgtgggcagtgccccaccaagtgtggatgtgacccccacctataccaaagatggagctgatgaggctgaatcaaatgatggcaaagttctgaaaccgaagccatctaagctggcaaagagaatcgccaactcagcgggttacgtgggtgaccgattcaaatgtgtcactaccgaactgtatgcagattccagtcagctcagccgggagcaacgggcattgcagcgtgcaatgatgcgcttctcagagttggagatgaaagaaagagaaggtggccacccagcaaccaaagactccgagatgtgcaaattcagcccagccgactgggaaaggttgaaaggaaatcaggacaaaaagccaaagtcggtcaccctggaggaggccattgcagaacagaacgaaagtgagagatgcgagtatagtgttggaaacaagcaccgtgatccctttgaagccccagaggacaaagatcttcctggtggagaagtactttgtgganangcancctgtgancgancctcccgcanancan

SEQ ID NO: 219131 - DNA, 878 bp, Homo Sapiens
  misc_feature (23)..(23): n is a, c, g, or t
  misc_feature (759)..(759): n is a, c, g, or t
  misc_feature (771)..(771): n is a, c, g, or t
  misc_feature (789)..(789): n is a, c, g, or t
  misc_feature (800)..(800): n is a, c, g, or t
  misc_feature (822)..(822): n is a, c, g, or t
  misc_feature (829)..(829): n is a, c, g, or t
  misc_feature (851)..(851): n is a, c, g, or t
  misc_feature (855)..(855): n is a, c, g, or t
  misc_feature (857)..(857): n is a, c, g, or t
  misc_feature (862)..(863): n is a, c, g, or t
gcagcgtttccccccatccctgnttgcctgtgtgttgtgtggatctgttcctagtataggcaacataatgagatactgtgcttcccacctccccttcagttcagagccaaaatgggtctagaatctggcactttactcatttcctttgataaattgtactatgcagagctgtcaggaaccttcagatagcagtagaggactgcagctgtctaggtctgcggccacatcttggggacacactggactgttcccatgtgcagggttcagcagttatgtgggagtgctaggggttaggcttttgagcttgaacgcctgcgtgtgaacagatgaaaaatccttcagtacccaagtcccagtctgtcctatggggagcagtttgggggcggccggcagcaggagcctgggaaagaggccctcgccaggtgatggcagggccagggtggcctggggcacccagcggaatgtgcttagtatttggtcaccagccgtcatcctgggcttttcctactgtgtcttgttacaaggcctcagcaatccacagaactctctctccttccttccacctgtcagcttctctgcttctgagataagaaccatttgtgtaacaccaacacttaacttcagaaagacatgcattatgtggtgtaatcaaacccgatgctttcagatgacctacttacatcttcaatgtggataagataaagaacaaaacacatgcatctaaactgctgggcaatccagttgacttttaaatgtaanaatggaattccnaacacttaacacattcanctatatgacanaaagtaaatctatggatatggnattttgngaatgatcttttaaataaaaanaaancnttacnnaaaaaaaaaaaaaaa

SEQ ID NO: 219132 - DNA, 746 bp, Homo Sapiens
  misc_feature (634)..(634): n is a, c, g, or t
  misc_feature (645)..(645): n is a, c, g, or t
  misc_feature (648)..(648): n is a, c, g, or t
  misc_feature (668)..(668): n is a, c, g, or t
  misc_feature (680)..(680): n is a, c, g, or t
  misc_feature (684)..(684): n is a, c, g, or t
  misc_feature (687)..(687): n is a, c, g, or t
  misc_feature (701)..(701): n is a, c, g, or t
  misc_feature (704)..(704): n is a, c, g, or t
  misc_feature (713)..(713): n is a, c, g, or t
  misc_feature (721)..(722): n is a, c, g, or t
  misc_feature (732)..(733): n is a, c, g, or t
  misc_feature (735)..(737): n is a, c, g, or t
  misc_feature (741)..(741): n is a, c, g, or t
  misc_feature (744)..(744): n is a, c, g, or t
ggccgcgggcggctcgacgcagcagaggcgacgcgagatggcggcagcttcagcggcggcgatctcaggagctggtcgctgtcggctaagcaagattggagctactcgtcgtccacctccagctcgcgtaagggtggctgtgcgactgcggccatttgtggatggaacagcgggagcaagtgatcccccctgtgtgcggggcatggacagctgctctctagagattgctaactggaggaaccaccaggagactctcaaataccagtttgatgccttctatggggagaggagtactcagcaggacatctatgcaggttcagtgcagcccatcctaaggcacttgctggaagggcagaatgccagtgtgcttgcctatggacccacaggagctgggaagacgcacacaatgctgggcagcccagagcaacctggggtgatcccgcgggctctcatggacctcctgcagctcacaagggaggagggtgccgagggccggccatgggccctttctgtcaccatgtcttacctagagatctaccaggagaaggtattagacctcctggaccctgcttcgggagacctggtaatccgagaagactgccgggggaatatcctgattccgggtctctcccanaagcccatcantanctttgctgattttgagcggnacttcctgccanccantcnaaatcggactgtanganccacccggntcaaccanngctcctcccnnannnatgntgngc

SEQ ID NO: 219133 - DNA, 815 bp, Homo Sapiens
  misc_feature (738)..(738): n is a, c, g, or t
gtgaaatccagcctacctggagccaagcctggccctagcatgacagatggagttagttccggtttccttaacaggtctttgaaacccctttacaagacacctgtgagttatcccttggagctttcagacctgcaggagctgtgggatgatctctgtgaagattatttgccgctccgggtccagcccatgactgaagagttgctgaaacaacaaaagctgaattcacatgagaccactataactcagcagtctgtatctgattcccacttggcagaactccaggaaaaaatccagcaaacagaggccaccaacaagattcttcaagagaaacttaatgaaatgagctatgaactaaagtgtgctcaggagtcgtctcaaaagcaagatggtacaattcagaacctcaaggaaactctgaaaagcagggaacgtgagactgaggagttgtaccaggtaattgaaggtcaaaatgacacaatggcaaagcttcgagaaatgctgcaccaaagccagcttggacaacttcacagctcagagggtacttctccagctcagcaacaggtagctctgcttgatcttcagagtgctttattctgcagccaacttgaaatacagaagctccagagggtggtacgacagaaagagcgccaactggctgatgccaaacaatgtgtgcaatttgtagaggctgcagcacacgagagtgaacagcagaaagaggcttcttggaaacataanccaggaattgcgaaaagccttgcagcagctacaagaaagaattgcagaataagagccaacagcttcgtgcctgggag

SEQ ID NO: 219134 - DNA, 833 bp, Homo Sapiens
ggcaaggccttcatcagggactaccatctgagccgccacattctgactcacacaggagaaaagccgtttgtttgtgcagccaatggctgtgatcaaaaattcaacacaaaatcaaacttgaagaaacattttgaacgcaaacatgaaaatcaacaaaaacaatatatatgcagttttgaagactgtaagaagacctttaagaaacatcagcagctgaaaatccatcagtgccagcataccaatgaacctctattcaagctatgtatgtcaaaaaggatgttcctttgtggcaaaaacatggacggaacttctgaaacatgtgagagaaacccataaagaggaaatactatgtgaagtatgccggaaaacatttaaacgcaaagattaccttaagcaacacatgaaaactcatgccccagaaagggatgtatgtcgctgtccaagagaaggctgtggaagaacctatacaactgtgtttaatctccaaagccatatcctctccttccatgaggaaagccgcccttttgtgtgtgaacatgctggctgtggcaaaacatttgcaatgaaacaaagtctcactaggcatgctgttgtacatgatcctgacaagaagaaaatgaagctcaaagtcaaaaaatctcgtgaaaaacggagtttggcctctcatctcagtggatatatccctcccaaaaggaaacaagggcaaggcttatctttgtgtcaaaacggagagtcacccaactgtgtggaagacaagatgctctcgacagttgcagtacttacccttggctaagaactgcactgctttgtttaaggactgcagaccaaggagc

SEQ ID NO: 219135 - DNA, 744 bp, Homo Sapiens
  misc_feature (744)..(744): n is a, c, g, or t
gcagccttatcccaggcctctgggtgtcccgacacaggtgttcacatctgtgctgtcaggtcagatgcctcagttcttggaaagctaggttcctgcgactgttaccaaggtgattgtaaagagctggcggtcacagaggaacaagcccccccgctgagggggtgtgtgaatcggacagcctcccagcagaggtgtgggagctgcagctgagggaagaagagacaatcggcctggacactcaggagggtcaaaaggagacttggtcgcaccactcatcctgccacccccagaatgcatcctgcctcatcaggtccagatttctttccaaggcggacgttttctgttggaattcttagtccttggcctcggacaccttcattcgttagctggggagtggtggtgaggcagtgaggaagaggcggatggtcacactcagatccacagagcccaggatcaagggacccactgcagtggcagcaggactgttgggcccccaccccaaccctgcgcagccctcatcccctcttggcttgagccgtcagaggccctgtgctgagtgtctgaccgagacactcacagctttgtcatcagggcacaggcttcctcggagccaggatgatctgtgccacgcttgcacctcgggcccatctgggctcatgctctctctcctgctattgaattagtacctagctgcacgcagtatgtagttaccaaaagaataaacggcaataattgagtcctccn

SEQ ID NO: 219136 - DNA, 841 bp, Homo Sapiens
  misc_feature (736)..(736): n is a, c, g, or t
  misc_feature (771)..(771): n is a, c, g, or t
  misc_feature (774)..(774): n is a, c, g, or t
  misc_feature (791)..(791): n is a, c, g, or t
  misc_feature (821)..(821): n is a, c, g, or t
  misc_feature (823)..(823): n is a, c, g, or t
  misc_feature (828)..(828): n is a, c, g, or t
  misc_feature (835)..(837): n is a, c, g, or t
tcgccctccgacaaaggtggagagacaggggagtcggatgagacggccgctgtgcccggggacccgggggctaccgacaccgatggaatcccagaggaaactgacggagacgcagatgtggacttgaaagaagctgcagcggaggaaggcgagctcgagagtcaggatgtctcagatttaacaacagttgaaagggaagactcatcattacttaatcctgcagccaaaaaactgaaaatagataccaaagaaaagaaagagaaaaagcagaaagtagatgaagatgagattcagaagatgcaaatcctggtttcttctttttctgaggagcagctgaaccgttatgaaatgtatcgccgctcagctttccctaaggcagccatcaaaaggcactggatgtgtgtgagaagtggggagaaatgccaccactacaacccaaacatatgagggaagccgttagaaggttaaagtcaaaaggacagatccctaactcgaagcacaaaaaaatcatcttcttctagaccaaagtctagaaaggcctatgttactgacggaagaagtattggttccagacttcctataagactgtctgcattggtgctttagtatctcaggcctccaaggattccatgatgattttaatgtctttctcaaaactctgatatttgtcacacctagaaagtatgtagcctgattgatacttgccttgactaaattttgggacctcttggggcantttgaagtatttaactgtccttgaccagttggaanaanatacgtgggccatagcntcttctggacaggggaactgcttttccaananaaaanctttccnnnaaaa

SEQ ID NO: 219137 - DNA, 785 bp, Homo Sapiens
  misc_feature (746)..(746): n is a, c, g, or t
  misc_feature (783)..(783): n is a, c, g, or t
gaactaaaggccgacaaagattatcactttaaggtggataatgatgaaaatgagcaccagttatctttaagaacggtcagtttaggggctggtgcaaaggatgagttgcacattgttgaagcagaggcaatgaattacgaaggcagtccaattaaagtaacactggcaactttgaaaatgtctgtacagccaacggtttcccttgggggctttgaaataacaccaccagtggtcttaaggttgaagtgtggttcagggccagtgcatattagtggacagcacttagtagctgtggaggaagatgcagagtcagaagatgaagaggaggaggatgtgaaactcttaagtatatctggaaagcggtctgcccctggaggtggtagcaaggttccacagaaaaaagtaaaacttgctgctgatgaagatgatgacgatgatgatgaagaggatgatgatgaagatgatgatgatgatgattttgatgatgaggaagctgaagaaaaagcgccagtgaagaaatctatacgagatactccagccaaaaatgcacaaaagtcaaatcagaatggaaaagactcaaaaccatcatcaacaccaagatcaaaaggacaagaatccttcaagaaacaggaaaaaactcctaaaacaccaaaaggacctagttctgtagaagacattaaagcaaaaatgcaagcaagtatagaaaaaggtggttctcttcccaaagtggaagccaaattcatcanttatgtgaagaattgcttccggatgactgaccaagangc

SEQ ID NO: 219138 - DNA, 867 bp, Homo Sapiens
  misc_feature (854)..(854): n is a, c, g, or t
ccagaagaagaacatgagctgcctgtggacatggaaaccatcaacctggacagagatgcagaggatgttgatttgaatcactatcgcatagggaagattgaaggatttgaggtactgaagaaagtgaagactctctgcctccgccaaaatttaattaaatgcattgagaatctggaggagctacagagtcttcgagagctggatctttacgacaaccagatcaagaagattgagaatctggaggcgctaacagagctggagattctagatatttcttttaatctgctgagaaacatcgaaggggttgacaagttgacacgactgaaaaaactcttcttggtcaacaataaaatcagtaaaattgagaacttaagcaacttacatcaactacagatgctagagctgggatctaaccgcatccgggcaatcgaaaatatcgacaccttaaccaacctggagagtttgtttttggggaaaaacaaaattactaaacttcagaacctggatgcgctcaccaacctgacagtcctcagtatgcagagcaaccggctgaccaagatcgagggtctgcagaacctggtgaacctgcgggagctgtaccttagccacaatggcatcgaggtcatcgagggcctggagaacaataacaaactcacgatgttggacattgcatcaaatagaatcaaaaagattgaaaatatcagccatctaacagagctgcaagagttctggatgaacgacaatctccttgagagctggagcgacctcgacgagctgaagggagccaggagcctggagacagtgtacctggagcggaaccccttgcagaaggacccccagtaccggcggaaggncatgctcgccctc

SEQ ID NO: 219139 - DNA, 872 bp, Homo Sapiens
tccgaacataaaaaaaaagaagctgcattgaaagcctcacaaaataccagcagcagcaacagttctactcgtgggactcaaaatcagctacgttgtgagctctgcgatgtgtcttgtacaggagcagatgcgtatgctgcccacattcgtggtgctaagcatcagaaagtggttaagttacacacaaaacttggtaaacccattccatcaacagaaccaaatgttgttagccaagctacttcttcaacagctgtatctgcttcaaagccgactgcctctccttcaagcattgcagcaaacaattgtactgtgaatacgtcatcaattgcaacgtcttcaatgaagggtcttacgactacaggaaactcgtctcttaatagcacatctaacactaaagtatcagcagtgcctacaaatatggctgccaagaaaacatctacccccaaaataaattttgttggtggtaataagctgcagtcaacaggaaataaagcagaagacataaaaggaaccgaatgtgttaaaagtactcctgtcacttctgctgtgcagattcctgaagtaaagcaagacacagtgtcagaaccagtcacacctgcatctcttgctgctttacagagtgatgtgcagccagtgggccatgattatgtggaagaggtacgaaatgatgaaggaaaagtaattcggttccattgtaaattatgcgagtgcagctttaatgatcccaatgctaaggagatgcacttaaaagggcgaagacacagacttcaatataaaaaaaaagtaaatccagatttgcaagtagaagtaaagcctagtattcgagcaagaaagattcaagaagagaaaatgaggaagcaatgcagaaggag

SEQ ID NO: 219140 - DNA, 809 bp, Homo Sapiens
  misc_feature (703)..(703): n is a, c, g, or t
  misc_feature (798)..(798): n is a, c, g, or t
  misc_feature (809)..(809): n is a, c, g, or t
tccggcattaccaaggacagcagccacctatgggaatgatgggtcaagttaaccaaggcaatcatatgatgggtcagagacagattcctccctatagacctcctcaacagggcccaccacagcagtactcaggccaggaagactattacggggaccaatacagtcatggtggacaaggtcctccagaaggcatgaaccagcaatattaccctgatggaaattcacagtatggccaacagcaagatgcataccagggaccacctccacaacagggatatccaccccagcagcagcagtacccagggcagcaaggttacccaggacagcagcagggctacggtccttcacagggtggtccaggtcctcagtatcctaactacccacagggacaaggtcagcagtatggaggatatagaccaacacagcctggaccaccacagccaccccagcagaggccttatggatatgaccagggacagtatggaaattaccagcagtgaaaaagtacttacattccagtagccagtatctattagcagccatattgtcacctcagcactgtggacacctccctgtgaagagatccttccattccatctagtttttggaaaaaccttgtggataagtggctgtttcatcagtaagcagcctttgtggattagttataaaaggctttagtagctcaaaaatactcttgatttcncatttctactctagatggcaacattggacagaaaatgcaatgacataaccaatttgtaattgattttggaactgggtttccaatggactgttacngactgaaaggn

SEQ ID NO: 219141 - DNA, 672 bp, Homo Sapiens
  misc_feature (663)..(663): n is a, c, g, or t
  misc_feature (671)..(672): n is a, c, g, or t
ctattagcagaagtgcagagtagggaaccagagctggttaagggcctagtgaagggtttgtgtgcccagtgtctgctcgtcatctgtggctgcaggggtcagacagacaaggatggggactgccagggcaccacttcatcatgaatgctggttttcacaccttttccttattttattgccaatcaggacaaggccttgaaggaacgcagccttagacatcaggtgaggatgatggaggtagacagtcgactgaatgtcagctggaaaatccagtcactagttggggtttggtggccatgttttctacccagacaggccctgcttttctaggatgtggccttagagcaagaacagacccaacagccagcccttcatcctccagcgtctgccataggaatgtgagaggggtgtttgctgagcgctccgggcacggccagagggcaagtgagcatgcacggacctcttccccctgtcctgtttctcacccagcacctggggagatcggtgctaccaaggaagagagcacacagataagacagaggggaggaggtgggcatttcctacattcctccttgtttgccgctgctgagattgcagtatttattgcaatgtaaatgtatcctgaaggtggggaggaatgtttaatctaccatgtccgtgtgncatcttgnn

SEQ ID NO: 219142 - DNA, 652 bp, Homo Sapiens
aagaaaaggccagtgattgttcatcgagccatcttgggatcagtggaaagaatgattgctatcctcacagaaaactatgggggcaaatggcccttttggctgtcccctcgccaggtaatggtagttccagtgggaccaacctgtgatgaatatgcccaaaaggtacgacaacaattccacgatgccaaattcatggcagacattgatctggatccaggctgtacattgaataaaaagattcgaaatgcacagttagcacagtataacttcattttagttgttggtgaaaaagagaaaatcagtggcactgttaatatccgcacaagagacaataaggtccacggggaacgcaccatttctgaaactatcgagcggctacagcagctcaaagagttccgcagcaaacaggcagaagaagaattttaatgaaaaaattacccagattggctccatggaaaaggaggaacagcgtttccgtaaaattgactttgtactctgaaaacgtcaatttatattgaacttggaggagtttggcaaagtctgaataggtcaacctgcaggcgtaactatttttgacctagtcagtttttaaacaatgtgcatttgaaggagttaattaaaagagagccaataaaatgattttactcattca

SEQ ID NO: 219143 - DNA, 709 bp, Homo Sapiens
agcaaatcaaaagcggagagccccaaaacacctagcagccccttgacccccacgtttgcctcttccatgtgtctcctggccccctgctatctcacaggggactctgtccgggacaagtgtgtggagatgctgtcagcagccctgaaggcggacgatgattacaaggactatggagtcaactgtgacaagatggcatcagaaatcgaagatcatatctaccaagagctcaagagcacggacatgaagtaccggaaccgcgtgcgcagccgcataagcaacctcaaggaccccaggaaccccggcctgcggcggaacgtgctcagtggggccatctccgcagggcttatagccaagatgacggcagaggaaatggccagtgatgaactgagggagttgaggaatgccatgacccaggaggccatccgtgagcaccagatggccaagactggcggcaccaccactgacctcttccagtgcagcaaatgcaagaagaagaactgcacctataaccaggtgcagacacgcagtgctgatgagcccatgactacctttgtcttatgcaatgaatgtggcaatcgctggaagttctgctgatggaacagccagccatgaacaaggtgaggaagaagaaagaggaagcgctgaattatctgaactggagaagcaataaaaattaaagtgaaggaaaatactgaaaaaaaaaaaaaaa

SEQ ID NO: 219144 - DNA, 709 bp, Homo Sapiens
  misc_feature (695)..(695): n is a, c, g, or t
  misc_feature (702)..(702): n is a, c, g, or t
  misc_feature (709)..(709): n is a, c, g, or t
cacagaccctagcactttatcctttaatatgtcagacaaatatcccattcaagatacggaactccctaaagctgaagaatgtgatacaattactttgaactgcccacgaaattcagatatgaaaaatcagggagaagaaaatggctttccagatagcactggagatcctcttccagagatcagcaaggacaactcctgcaaagaaaactgtacttgttcctcctgcttgctccgggcccccaccataagtgacttgctcaatgatcaggacttactagacgtgatcaggataaagctggatccgtgtcacccaacggtgaaaaactggaggaattttgcaagcaaatgggggatgtcctatgacgaattgtgcttcctggagcagaggccacagagccccaccttggagttcttgctccggaacagtcagaggacggtgggccagctgatggagctctgcaggctctaccacagggccgacgtggagaaggttctgcgcaggtgggtggacgaggagtggcccaagcgggagcgtggagacccctccaggcacttctagagctcttcttcttccttcattggcctctccggatgttgaaacaaccacaggtcaagaaggaatgtgaatctgttgttttataagagtttaggacaaggacgtggaacagtggacactggttttccccaaagctggnagtttgnggagggn

SEQ ID NO: 219145 - DNA, 614 bp, Homo Sapiens
tccccacaaggctgggctggggagccctggaaccgggcccagcatagcctgccccgggcggcagccctggagcggacagaaccctcgccacccccttcagctccccgggagcccgatgaggggctgccctgtcctggctgctgcctcggccccttcagctttggcttcctgtccatgtgcccccgccccacaccagctgttgcccgctaccgcaacctgaactgtgaggcgggcagtctcctctgccaccgagggcaccacgccaagccacccacacccagcctgcagctgcctggggcacgctcttagcagtggagcccgtggtctcaggcctccaactttggccttcaggacaccctgtaagaacagagcacacttgctggacagtgccagttccagatgggctgaccggctcttctccccgtgtaggggagccccagcatggactcaagggacagagcacttccagtcgaccccccggctcgcgttcccgtggggatcactgaaccagacacagcattgctgacacatgagactaacacgtgcaattatttaaaaagatttcaataaaactgcctggctggctccgggccgcccctaaaaaaaaaaaaaaa

SEQ ID NO: 219146 - DNA, 893 bp, Homo Sapiens
  misc_feature (7)..(7): n is a, c, g, or t
  misc_feature (20)..(20): n is a, c, g, or t
  misc_feature (818)..(818): n is a, c, g, or t
  misc_feature (839)..(839): n is a, c, g, or t
  misc_feature (841)..(841): n is a, c, g, or t
  misc_feature (888)..(888): n is a, c, g, or t
tccgcgntaagtccaccggntgggaaagccccccgcaaacagctggccacgaaagccgccaggaaaagcgctccctctaccggcggggtgaagaagcctcatcgctacaggcccgggaccgtggcgcttcgagagattcgtcgttatcagaagtcgaccgagctgctcatccggaagctgcccttccagaggttggtgagggagatcgcgcaggatttcaaaaccgacctgaggtttcagagcgcagccatcggtgcgctgcaggaggctagcgaagcgtacctggtgggtctgttcgaagataccaacctgtgtgccatccacgctaagagagtcaccatcatgcccaaagacatccagttggctcgccggatacggggagagagagcttaagtgaaggcagtttttatggcgttttgtagtaaattctgtaaaatactttggtttaatttgtgactttttttgtaagaaattgtttataatatgttgcatttgtacttaagtcattccatctttcactcaggatgaatgcgaaaagtgactgttcacagacctcagtgatgtgagcactgttgctcaggagtgacaagttgctaatatgcagaagggatgggtgatacttcttgcttctcatgatgcatgtttctgtatgttaatgacttgttgggtagctattaaggtactagagttgataaatgtgtacagggtccttttgcaataaaactggttatgacttgatccaagtgtttaacaattggggctgttaagtctgaccatacatcactgtgatagaatgtgggcttttttcaagggtgaanatacaagtctttaaccacagngntaactttaccagtttcccttttaaaaaaaaaaaaaagtaaaccctgncagct

SEQ ID NO: 219147 - DNA, 785 bp, Homo Sapiens
  misc_feature (704)..(704): n is a, c, g, or t
  misc_feature (736)..(736): n is a, c, g, or t
  misc_feature (748)..(748): n is a, c, g, or t
  misc_feature (761)..(761): n is a, c, g, or t
  misc_feature (764)..(764): n is a, c, g, or t
gcagaaagcatagatgctttaagtaataagcatagcaaggaagaatgttctagtctcccaagcaagtcttttaatattgaacactgtcatcagaattcttcttctactgtttcattggaaaacgaagatgttggatcatttagacaagaataccgccagccttacttatgtgaagtgaaaacaggccaagctctagtttgtcctgtttgtaacgtagaacaaaagacttcagatctaaccctgttcaatgtgcatgtggatgtttgcttaaataaaagttttatccaagaattaagaaaggataaatttaacccagttaatcaacccaaagaaagctccagaagtactggtagctcaagtggagtacagaaggctgtaacaagaacaaaaaggccaggattgatgacaaagtactcaacatcaaagaaaataaaaccaaacaatcccaaacatacccttgatatattttttaagtaaacattgaacattttatcattaatttttaattgaaactagttattttataatcaatgaatttgttctttctgattttaagtttgcagatttatttagtgaaggcaagtgcaataatccttcctcagatgatgtttgcttttctaagatacatatactgattctgtgtatcttttttataaccatgagaattttacttccattatacatcaattggaaatcaatcctgntaagagataattcttaaaagggaaattaggantgggataagaanggggatttttttnatnattttatactgaatataaaac

SEQ ID NO: 219148 - DNA, 422 bp, Homo Sapiens
  misc_feature (43)..(43): n is a, c, g, or t
gttcgccctgcccgggctgggctcccaggcagcctggcaccgntgccaggctcgccgccgagctcgggcagcagggtggggcaaacgcggagcacggaggacggggccgggcgacctgggcaccagcaggacccgaggccaggagccaggggcccagaagattgagcttctagagcctcagagatggaattcgccgttttgccgcgatttggcgttaacttattgacccatggggaggagggtcacttcccgtgaaaagaaggcagagatgttttgctgtgcccagtgtgaggaagcgaaggaaaagaaagatcttttgaaaatgtgtacatctacttgcagcttgaaaattccaagtgccagacatttttcttggaggaaataaatgtcttcaatttattcatcttaaaaaaaaaaaaaaa

SEQ ID NO: 219149 - DNA, 783 bp, Homo Sapiens
  misc_feature (675)..(675): n is a, c, g, or t
  misc_feature (686)..(686): n is a, c, g, or t
  misc_feature (694)..(694): n is a, c, g, or t
  misc_feature (722)..(722): n is a, c, g, or t
  misc_feature (727)..(727): n is a, c, g, or t
  misc_feature (773)..(773): n is a, c, g, or t
  misc_feature (775)..(775): n is a, c, g, or t
  misc_feature (781)..(781): n is a, c, g, or t
gtggagaaagacattacaccatctgaattgcctgcaaacccagcaataagagctaactgccatcaagagccatcagtatgtcttcaagctgcatgcccagaaagctggattggttttcaaagaaagtgtttctatttttctgatgacaccaagaactggacatcaagtcagaggttttgtgactcacaagatgctgatcttgctcaggttgaaagcttccaggaactgaatttcctgttgagatataaaggcccatctgatcactggattgggctgagcagagaacaaggccaaccatggaaatggataaatggtactgaatggacaagacagttagtcatgaaagaagatggtgccaacttgtatgttgcaaaggtttcacaagttcctcgaatgaatccaagacctgtcatggtgaggtagactgactgtgaacttggctccaggcttatctatgtcattttcaaacactttcattttaagcaaaccatacaatatctttaagtctgttccttacctccacaacaaaattaaattgcacttgtcctcctgatttcacagggttgatgtgaggaacagaggttttgatgtatcagggaaagattatgagtgacagcaattatacctattatttaaaataagacaatagttttaaaattttaaaatgggtaaagntttggcactanaaaatttnaatctcaattgtatattttataggatcnttccnattactaaaaagattttgagataatgctggaaaaattggattcccncnatttcnct

SEQ ID NO: 219150 - DNA, 632 bp, Homo Sapiens
  misc_feature (13)..(13): n is a, c, g, or t
  misc_feature (29)..(29): n is a, c, g, or t
  misc_feature (36)..(36): n is a, c, g, or t
  misc_feature (590)..(590): n is a, c, g, or t
  misc_feature (621)..(621): n is a, c, g, or t
  misc_feature (632)..(632): n is a, c, g, or t
tccggtcagccgntctgcagcctacctgntccatgntcccagggggccgttgccaacgccaacagcaccccgccgccctatgagcgtacccgcctctccccaccccgggccagctacgacgatccctacaaaaaggctgtcgccatgtcgaaaaggtatggttccgaccggcgtttagccgagctctctgattaccgccgtttatcagagtcgcagctttcgttccgccgctcgccgacaaagtcctcgctggattaccgtcgcctgcccgatgcccattccgattacgcacgctattcgggctcctataatgattacctgcgggcggctcagatgcactctggctaccagcgccgcatgtagggccatcctgggatggggcaccacagggagggagggagaaaagaggtgggtagggttacagatccaggttataactactctggcccatacctttcctggttgtggtttttcatgccctctaccatgtgggccttccccaggagatgatcctgttaagtgttcggcagtaacctactttgttccttcgcctcagcagcaaatcttgctactggctctagatctgcggnttcccctctaccctgcctcccgtctccccanaatgggaattn

SEQ ID NO: 219151 - DNA, 751 bp, Homo Sapiens
cagcctctccgcgcagaagtctcccggagccgacttctgagagtcgagtactcctatgtgaagactaccaagctcgtgttcaagggaaccaaggcgaagagtaagaagaaaaagaacaaagataagaaaagaaaaagagaagaagatgaagaaacccagcttgatatgttggaatctggtggacagtaacaaactttggtgaaatttcaggaaccatagccattgaaatggatgagggaacctatatacatgcactcgataatggtctttttaccctgggagctccacacaaagaagttgatgagggccctagtcctccagagcagttttcggctgtcaaattatctgattccagaatcaccctgaaatctggctatggaaaatatcttggtataaattcagatgaacttgttgttgggcgttcagatgcaattggaccaagagaacaatgggaaccagtctttaaaattgggaaaatggctttgtcgacctcaaatagctgctttattagatacagtgaagcagaggacatagaagcaaaaagtaaaacagcaggagaagaagaaatgatcaaggctctcctaatctctgtcagaccttcacctttatgaccttgccttatctaccagaacacagatccctcttactaaagattagatcctgtgctgaaagagaaaccaagaaaaaagatgacattccagaagaagacaaaggaaatataaaacaatgtgaaatcaaaaaaaaaaaaaaa

SEQ ID NO: 219152 - DNA, 932 bp, Homo Sapiens
  misc_feature (863)..(863): n is a, c, g, or t
  misc_feature (875)..(875): n is a, c, g, or t
  misc_feature (900)..(900): n is a, c, g, or t
  misc_feature (927)..(927): n is a, c, g, or t
gcaaccctaacagtaagaaatcttgttggcaaatcagatgcagctgttttaactatccctgcctgtgactttcaagctactcaccctgtaatggatcttaaagcattccccaaagataacatgctttgggtggaatggactactccaagggaatctgtaaagaaatatatacttgagtggtgtgtgttatcagataaagcaccctgtatcacagactggcaacaagaagatggtaccgtgcatcgcacctatttaagagggaacttagcagagagcaaatgctatttgataacagttactccagtatatgctgatggaccaggaagccctgaatccataaaggcataccttaaacaagctccaccttccaaaggacctactgttcggacaaaaaaagtagggaaaaacgaagctgtcttagagtgggaccaacttcctgttgatgttcagaatggatttatcagaaattatactatattttatagaaccatcattggaaatgaaactgctgtgaatgtggattcttcccacacagaatatacattgtcctctttgactagtgacacattgtacatggtacgaatggcagcatacacagatgaaggtgggaaggatggtccagaattcacttttactaccccaaagtttgctcaaggagaaattgaagccatagtcgtgcctgtttgcttagcattcctattgacaactcttctgggagtgctgttctgctttaataagcgagacctaattaaaaaacacatctggcctaatgttccagatccttcaaagagtcatattggcccagtggtcacctcacactcctccaaggcacaattttaattcaaaagatcaaatgtattcanatggcaatttcnctggatgtaagtgttggggaaatanaagcaaatgacaaaaagccttttccanaagat

SEQ ID NO: 219153 - DNA, 934 bp, Homo Sapiens
  misc_feature (859)..(859): n is a, c, g, or t
  misc_feature (888)..(888): n is a, c, g, or t
  misc_feature (900)..(900): n is a, c, g, or t
  misc_feature (913)..(913): n is a, c, g, or t
  misc_feature (931)..(931): n is a, c, g, or t
tccgcaaatcaacaacaacctatttagctgttccccaaccttttcctccgaccccctaacaacccccctcctaatactaactacctgactcctacccctcacaatcatggcaagccaacgccacttatccagtgaaccactatcacgaaaaaactctacctctctatactaatctccctacaaatctccttaattataacattcacagccacagaactaatcatattttatatcttcttcgaaaccacacttatccccaccttggctatcatcacccgatgaggcaaccagccagaacgcctgaacgcaggcacatacttcctattctacaccctagtaggctcccttcccctactcatcgcactaatttacactcacaacaccctaggctcactaaacattctactactcactctcactgcccaagaactatcaaactcctgagctaacaacttaatatgactagcttacacaatagcttttatagtaaagatacctctttacggactccacttatgactccctaaagcccatgtcgaagcccccatcgctgggtcaatagtacttgccgcagtactcttgaaactaggcggctatggtataatacgcctcacactcattctcaaccccctgacaaaacacatagcctaccccttccttgtactatccctatgaggcataattataacaagctccatctgcctacgacaaacagacctaaaatcgctcattgcatactcttcaatcagccacatagccctcgtagtaacagccattctcatccaaaccccctgaagcttcaccggcgcagtcattctcataatcgcccacgggacttacatcctcattactattctgnctagcaaactcaaactacgaacgcactcncagtcgcatcanaatcctctctcanggacttcaaactctactnccc

SEQ ID NO: 219154 - DNA, 820 bp, Homo Sapiens
  misc_feature (654)..(654): n is a, c, g, or t
  misc_feature (756)..(756): n is a, c, g, or t
  misc_feature (758)..(758): n is a, c, g, or t
  misc_feature (765)..(765): n is a, c, g, or t
  misc_feature (775)..(775): n is a, c, g, or t
  misc_feature (781)..(781): n is a, c, g, or t
  misc_feature (785)..(785): n is a, c, g, or t
  misc_feature (790)..(792): n is a, c, g, or t
  misc_feature (799)..(799): n is a, c, g, or t
  misc_feature (808)..(808): n is a, c, g, or t
  misc_feature (810)..(810): n is a, c, g, or t
  misc_feature (814)..(814): n is a, c, g, or t
ggaaggggaagagaagtccagccgccaagcccagccttccccggcgcgcagccccgacggggccgcggcaggcgcggcgagagcgctgacggagccatgagagagtacaaagtggtggtgctgggctcgggcggcgtgggcaagtccgcgctcaccgtgcagttcgtgacgggctccttcatcgagaagtacgacccgaccatcgaagacttttaccgcaaggagattgaggtggactcgtcgccgtcggtgctggagatcctggatacggcgggcaccgagcagttcgcgtccatgcgggacctgtacatcaagaacggccagggcttcatcctggtctacagcctcgtcaaccagcagagcttccaggacatcaagcccatgcgggaccagatcatccgcgtgaagcggtacgagcgcgtgcccatgatcctggtgggcaacaaggtggacctggagggtgagcgcgaggtctcgtacggggagggcaaggccctggctgaggagtggagctgccccttcatggagacgtcggccaaaaacaaagcctcggtagacgagctatttgccgagatcgtgcggcagatgaactacgcggcgcagcccaacggcgatgagggctgctgctcggcctgcgtgatcctctgaggcggncaccgcgcgccggccgcgctctgcgcacaaaagccaaacgcatccgactctctaaatgtgatttatttcttgctttgagattggagaccactttgcattggncnagggtgntcttgggaancccggntggnctccnnnggccggngtcccctgncntccnaccctg

SEQ ID NO: 219155 - DNA, 608 bp, Homo Sapiens
gagggaggaagtcaactgctgttcagcctcagaataaaggtgccgttcactggctcagttacctcctgtgtaccggcatcttgtgttgggaatgttcccccctccctagggaccaaggaccacccctacaaaaagagtaatggttgggtgatactccctcaagccaaagaggagctccccaacctgttctagggacccaggtaacctagaagggtgggagagaatacaatgggccagatgtggtggaagcccagctctggggctcaggttcctggaagacttctactaccctccctcctcaaggcctggatacagactaaatttgtataagtcaggcaggggacctagtcagggtcttgggagctaccttgtcgttgggaccagagcaaaatagtggagggcaggctagggaaatgtgggcacatcccccctcccaggaggggccggggagagtggcagtttgcatggcgaaccccccacttcctctttgctgccccttcactttcttgctgcccctttcccagtctctcttcacacccactcctggtctgtcctgatcccctcttctgtatcaggtttattggttgtacatataaattatactttcc

SEQ ID NO: 219156 - DNA, 857 bp, Homo Sapiens
  misc_feature (780)..(780): n is a, c, g, or t
  misc_feature (849)..(849): n is a, c, g, or t
ggcggccggggaggcggcggcggcggcaggattcccaggagccatgttgtcagaagtcctactggtgtctgctccggggaaagtcatccttcatggagaacatgccgtggtacatggcaaggtagcactggctgtatccttgaacttgagaacattcctccggcttcaaccccacagcaatgggaaagtggacctcagcttacccaacattggtatcaagcgggcctgggatgtggccaggcttcagtcactggacacaagctttctggagcaaggtgatgtcacaacacccacctcagagcaagtggagaagctaaaggaggttgcaggcttgcctgacgactgtgctgtcaccgagcgcctggctgtgctggcctttctttacttatacctgtccatctgccggaagcagagggccctgccgagcctggatatcgtagtgtggtcggagctgccccccggggcgggcttgggctccagcgccgcctactcggtgtgtctggcagcagccctcctgactgtgtgcgaggagatcccaaacccgctgaaggacggggattgcgtcaacaggtggaccaaggaggatttggagctaattaacaagtgggccttccaaggggagagaatgattcacgggaacccctccggagtggacaatgctgtcagcacctggggaggagccctccgataccatcaagggaagatttcatccttaaagaggtcgccagctctccagatcctgctgaccaacaccaaagtccctcgcaataccagggcccnttgtggctggcgtcagaaacaggctgctcaagttcccaaagatcgtggcccccctcctgacctcaatanatgccatc

SEQ ID NO: 219157 - DNA, 850 bp, Homo Sapiens
  misc_feature (798)..(798): n is a, c, g, or t
  misc_feature (811)..(811): n is a, c, g, or t
  misc_feature (815)..(815): n is a, c, g, or t
  misc_feature (828)..(828): n is a, c, g, or t
  misc_feature (837)..(838): n is a, c, g, or t
  misc_feature (840)..(840): n is a, c, g, or t
  misc_feature (843)..(843): n is a, c, g, or t
  misc_feature (847)..(848): n is a, c, g, or t
gtgaagaatgaacggtacacgttcagccctgactggtgggcgctcggctgcctcctgtacgagatgatcgcaggccagtcgcccttccagcagaggaagaagaagatcaagcgggaggaggtggagcggctggtgaaggaggtccccgaggagtattccgagcgcttttccccgcaggcccgctcactttgctcacagctcctctgcaaggaccctgccgaacgcctggggtgtcgtgggggcagtgcccgcgaggtgaaggagcaccccctctttaagaagctgaacttcaagcggctgggagctggcatgctggagccgccgttcaagcctgacccccaggccatttactgcaaggatgttctggacattgaacagttctctacggtcaagggcgtggagctggagcctaccgaccaggacttctaccagaagtttgccacaggcagtgtgcccatcccctggcagaacgagatggtggagaccgagtgcttccaagagctgaatgtctttgggctggatggctcagttcccccagacctggactggaagggccagccacctgcacctcctaaaaagggactgctgcagagactcttcagtcgccaaaggattgctgtggaaactgcagcgacagcgaggaagagctccccacccgcctctagcccccagcccgaggcccccaccagcagttggcggtagcagctactccgagcgccgtttacagttttgcacagtgatcttccccattgtccactcaagtcgtggcctggggaacacagacggagctgtccccantgtcctccgtccntcancccctggcctggntgaatttgnnanggnctgnncc

SEQ ID NO: 219158 - DNA, 784 bp, Homo Sapiens
  misc_feature (709)..(709): n is a, c, g, or t
  misc_feature (713)..(713): n is a, c, g, or t
  misc_feature (725)..(725): n is a, c, g, or t
  misc_feature (739)..(739): n is a, c, g, or t
  misc_feature (745)..(745): n is a, c, g, or t
  misc_feature (750)..(750): n is a, c, g, or t
  misc_feature (755)..(755): n is a, c, g, or t
  misc_feature (764)..(764): n is a, c, g, or t
  misc_feature (770)..(771): n is a, c, g, or t
  misc_feature (776)..(777): n is a, c, g, or t
  misc_feature (780)..(780): n is a, c, g, or t
gtgccaacgctgcacctgaccgagcgagacatcatcctgagcagtacatcagcacctccggcctcagcccagccgcccctgcagctgtcagaggtgaacataccgctgtcgctgggtgtctgtccactgggccctgtgcccctcaccaaggagcagctctatcagcaggccatggaagaggccgcctggcaccacatgcctcacccctctgactctgagcgtattcggcagtacctcccccggaacccctgtccgacgcccccctaccaccaccagatgccacccccacactcggacactgtggaattctaccagcgcctgtcgaccgagacactcttcttcatcttctactatctggagggcactaaggcacagtatctggcagccaaggccctaaagaagcagtcatggcgattccacaccaagtacatgatgtggttccagaggcacgaggagcccaagaccatcactgacgagtttgagcagggcacctacatctactttgactacgagaagtggggccagcggaagaaggaaggcttcacctttgagtaccgctacctggaggaccgggacctccagtgacaccggccccctccctctacccacccccttcccccgcatgctgatccccctgcccaggtgagggccctgccctggaagactgggagggaggccccaagccacggggcatccccctctcccagancaanggaagggggccngggaaggtttttcntctcanccccnccctngggggcccngggggnnaaggnntgncccc

SEQ ID NO: 219159 - DNA, 758 bp, Homo Sapiens
agcgtttcagatcacatgtaccggatggcagttatggctatggtgatcaaagatgaccgtcttaacaaagaccgatgtgtacgcctagccctggttcatgatatggcagaatgcatcgttggggacatagcaccagcagataacatccccaaagaagaaaaacataggcgagaagaggaagctatgaagcagataacccagctcctaccagaggacctcagaaaggagctctatgaactttgggaagagtacgagacccaatctagtgcagaagccaaatttgtgaagcagctagaccaatgtgaaatgattcttcaagcatctgaatatgaagaccttgaacacaaacctgggagactgcaagacttctatgattccacagcaggaaaattcaatcaccctgagatagtccagcttgtttctgaacttgaggcagaaagaagcactaacatagctgcagctgccagtgagccacactcctgagacactctctaaattgctgcactcctgtaacaaacattatttttccatttcattgtattgtgttttgccattgttggtctgttgatttccctagatgtgagtctgtttgttttcaattgtctgaacttcagcaagaaatgtgatacaacttgggcactaaaagaagccacagaacaggaagcggtcatgaaagtgccatggatgaacactggaggtggcagtgcctgtttatgaactaaataaataaatattaaacacctaaaaaaaaaaaaaaa

SEQ ID NO: 219160 - DNA, 780 bp, Homo Sapiens
  misc_feature (648)..(648): n is a, c, g, or t
  misc_feature (710)..(710): n is a, c, g, or t
  misc_feature (718)..(718): n is a, c, g, or t
  misc_feature (724)..(724): n is a, c, g, or t
  misc_feature (754)..(754): n is a, c, g, or t
  misc_feature (761)..(762): n is a, c, g, or t
  misc_feature (765)..(765): n is a, c, g, or t
  misc_feature (767)..(767): n is a, c, g, or t
  misc_feature (769)..(769): n is a, c, g, or t
  misc_feature (771)..(771): n is a, c, g, or t
  misc_feature (775)..(775): n is a, c, g, or t
  misc_feature (778)..(778): n is a, c, g, or t
  misc_feature (780)..(780): n is a, c, g, or t
gggctcatctgcagagggcactgcaggcctcagtgtctccaccatcccccagccctaaccagagttaccagggcagcagcggctacaacttccggcccacagatgcccgctgcctgcccagcagccccatccggatgtttgcttccttccacccttctgccagcaccgcagggacctctggggacagtggacccccagacaggtcacccctggaacttcacattggtttccccacagacatccctaaaagtgccccccactcgatgactgcctcatcttcctcagtttcatccccatccccaggtcttcctagacgctcagcacccccttctcccctgtgccgtagtttgtctcctgggactgggggaggagtccgaggtggggttggttacctgtcccgaggggaccctgtccgggtccttgctcggagagtacggcctgatggctctgtgcagtacctggttgagtggggaggagggggcatcttctgaacagcctgcctctgcccagctccccattcacacacaccggcactttcataccctgacctctgacctcacctacagctgggatgtacctggagagatagggggtagttctccctactgcccaggctggaatccaagagtggggagttggggaagaggncctcttctctaccctccttcatgattcctgacccctcccatccttcccatttcctttgatgntattttgntacagntttttaaaatattttttaaaattatttaancccctgnnggnananantgangangn

SEQ ID NO: 219161 - DNA, 495 bp, Homo Sapiens
gcaaaatcttataaaaacgaaccaggtagcccaaaaatgcccacctgtctctctatgtacagtaatacaatatttgtcagtcactatatacaatattataaaaaatgccgcagacagtacaaattaaggcccttatttctcacaaggcatcacaagcctcgatcctctagtgtagacccggtgggagagaagatgccacttaaattattgcaccattttgaaaaacaaaactcgtcaaggaggatcgtggtcttttcccaccgggccttcagtcacagacgggggctggggtggtggcgtcgtcgtcgtcgtcatcgagggagaccctctgtagccacgctgtgcccggcccggttctctgggtccaataaataccagtcacagtttgggagggggccgcgcccggcgcgtgggacccgccacggccgcgcgcaggtgggcgggggcgtcccggctacatgtgccgtttcatgtgcagcgccaggtgatcggagc

SEQ ID NO: 219162 - DNA, 563 bp, Homo Sapiens
gccagggcgaggggccggaggctggggatgccgaggtctgtcccacgcccgcccgcctggccaccacagagaagaagacggagcagcagcggcggcgggagaaggctgtgcacaggctgcgggtacagcaggccgcgttgcgggccgcccggctccggcaccaggagctgttccggctgcgcgggatcaaggcccaggtggccctgaggctggcggagctggcgcggcggcggaggcggcggcaggcgcggcgggaggctgaggctgacaagccccgaaggctgggacggctcaagtaccaggcacctgacatcgacgtgcagctgagctcggagctgacagactcgctcaggaccctgaagcccgagggcaacatccttcgagaccggttcaagagcttccagaggaggaatatgatcgagcctcgagagagagccaagttcaaacgcaagtacaaggtgaagctggtggagaagcgggcgttccgtgagatccagttgtagctgccatcagatgccggagactcgcccttcaataaaaaatctcttctagctgaaaaaaaa

SEQ ID NO: 219163 - DNA, 767 bp, Homo Sapiens
  misc_feature (745)..(745): n is a, c, g, or t
  misc_feature (762)..(762): n is a, c, g, or t
gccgctgccggagcagcccgaagggagctgcggatcgcgaggccagtaccgaccccgcccgcccgcgcgcaccgcccccgcccgccatggcccgggactacgaccacctcttcaagctgctcatcatcggcgacagcggtgtgggcaagagcagtttactgttgcgttttgcagacaacactttctcaggcagctacatcaccacgatcggagtggatttcaagatccggaccgtggagatcaacggggagaaggtgaagctgcagatctgggacacagcggggcaggagcgcttccgcaccatcacctccacgtattatcgggggacccacggggtcattgtggtttacgacgtcaccagtgccgagtcctttgtcaacgtcaagcggtggcttcacgaaatcaaccagaactgtgatgatgtgtgccgaatattagtgggtaataagaatgacgaccctgagcggaaggtggtggagacggaagatgcctacaaattcgccgggcagatgggcatccagttgttcgagaccagcgccaaggagaatgtcaacgtggaagagatgttcaactgcatcacggagctggtcctccgagcaaagaaagacaacctggcaaaacagcagcagcaacaacagaacgatgtggtgaagctcacgaagaacagtaaacgaaagaaacgctgctgctaatggcacccagtccactgcagagatggcactgcggtccctcccccagcccgagncccacggaggttcctcngggga

SEQ ID NO: 219164 - DNA, 893 bp, Homo Sapiens
  misc_feature (531)..(531): n is a, c, g, or t
  misc_feature (884)..(884): n is a, c, g, or t
gctgattatgtgacttgtgagagcacaaaaactaccttgcctttaggtaccgaagaagatgtccgggtcaaagtagaaagattaagtgatgaggaggtccatgaggaagtgtcccagcctgtcagtgcatctcagagttcgctgagtgatcagcagacagttccaggaagtgaacaagtccaagaggaccttctgattagtccacagtcttcctctataggctcagtagatgaaggcgtttctgagggcttgcctacacttcaaagcacgtctagcactaatgctcctccggatgatgatgatcgattggaaaatgttcagtatccctaccaactctacattgctccttccaccagcagtacagagcgaccaagtccaaatggtcccgacagaccttttcagtgtccaacctgcggggtgcgattcacccgtattcagaacctaaagcagcacatgctcatccactcaggaattaaaccatttcagtgtgaccgctgtgggaaaaagttcaccagggcttactcgcctaangatgcatcgcctaaagcatgaaggtaaacgctgtttccggtgccagatatgtagtgccactttcacttccttcggggaatataaacaccacatgagggtctcccggcacattatccgcaagcctcggatttacgagtgcaaaacatgtggcgccatgttcaccaactctggaaatttaatcgtgcacctgaggagtctgaaccatgaagcatcagagctagcaaactacttccagagcagtgatttcctagtaccggactacttaaaccaggaacaagaagagacccttgttcaatatgatcttggagaacacggttttgaaagcaactcctctgttcaaatgcctgtcattncacaggtct

SEQ ID NO: 219165 - DNA, 821 bp, Homo Sapiens
  misc_feature (801)..(801): n is a, c, g, or t
gaaccaccaaaaaaagaattccaaatacaaaagattttgactcttctgaagatgagaaacacagcaaaaaaggaatggataatcaagggcacaaaaatttgaagacctcacaagaaggatcatctgatgatgctgaaagaaaacaagagagagagactttctcttcagcagaaggcacagttgataaagacacgaccatcatggaattaagagatcgacttcctaagaagcagcaagcaagtgcttccactgatggtgtcgataagctttctgggaaagagcagagttttacttctttggaagttagaaaagttgctgaaactaaagaaaagagcaagcatctcaaaaccaaaacatgtaaaaaagtacaggatggcttatctgatattgcagagaaattcctaaagaaagaccagagcgatgaaacttctgaagatgataaaaagcagagcaaaaagggaactgaagaaaaaaagaaaccttcagactttaagaaaaaagtaattaaaatggaacaacagtatgaatcttcatctgatggcactgaaaagttacctgagcgagaagaaatttgtcattttcctaagggcataaaacaaattaagaatggaacaactgatggagaaaagaaaagtaaaaaaataagagataaaacttctaaaaagaaggatgaattatctgattatgctgagaagtcaacagggaaaggagatagttgtgactcttcagaggataaaaagagtaagaatggagcatatggtagagagaagaaaaggtgcaagttgcttggaaagagttcanggaagagacaagattggtca

SEQ ID NO: 219166 - DNA, 812 bp, Homo Sapiens
  misc_feature (757)..(757): n is a, c, g, or t
  misc_feature (768)..(768): n is a, c, g, or t
  misc_feature (775)..(775): n is a, c, g, or t
  misc_feature (795)..(795): n is a, c, g, or t
  misc_feature (805)..(806): n is a, c, g, or t
  misc_feature (808)..(808): n is a, c, g, or t
  misc_feature (810)..(812): n is a, c, g, or t
cccggccttcgcgcttttcttgatcactgtggctggggacccgcttcgcgttatcatcctggtcgcaggggcatttttctggctggtctccctgctcctggcctctgtggtctggttcatcttggtccatgtgaccgaccggtcagatgcccggctccagtacggcctcctgatttttggtgctgctgtctctgtccttctacaggaggtgttccgctttgcctactacaagctgcttaagaaggcagatgaggggttagcatcgctgagtgaggacggaagatcacccatctccatccgccagatggcctatgtttctggtctctccttcggtatcatcagtggtgtcttctctgttatcaatattttggctgatgcacttgggccaggtgtggttgggatccatggagactcaccctattacttcctgacttcagcctttctgacagcagccattatcctgctccataccttttggggagttgtgttctttgatgcctgtgagaggagacggtactgggctttgggcctggtggttgggagtcacctactgacatcgggactgacattcctgaacccctggtatgaggccagcctgctgcccatctatgcagtcactgtttccatggggctctgggccttcatcacagctggagggtccctccgaagtattcagcgcagcctcttgtgtaaggactgactacctggactgatcgcctgacagatcccacctgcctgtccactgcccatgactgancccagccccancccgggnccattgcccacattctctgnctccttctcnncngnnn

SEQ ID NO: 219167 - DNA, 766 bp, Homo Sapiens
gctgagggtggactcgatttcccagggtcccgccgcgggagtctccggcgggcgggcgcgcgcgagccaccgagcgaggtgatagaggcggcggcccaggcgtctgggtcctgctggtcttcgcctttcttctccgcttctaccccgtcggccgctgccactggggtccctggccccaccgacatggcggcggtgttgcagcaagtcctggagcgcacggagctgaacaagctgcccaagtctgtccagaacaaacttgaaaagttccttgctgatcagcaatccgagatcgatggcctgaaggggcggcatgagaaatttaaggtggagagcgaacaacagtattttgaaatagaaaagaggttgtcccacagtcaggagagacttgtgaatgaaacccgagagtgtcaaagcttgcggcttgagctagagaaactcaacaatcaactgaaggcactaactgagaaaaacaaagaacttgaaattgctcaggatcgcaatattgccattcagagccaatttacaagaacaaaggaagaattagaagctgagaaaagagacttaattagaaccaatgagagactatctcaagaacttgaatacttaacagaggatgttaaacgtctgaatgaaaaacttaaagaaagcaatacaacaaagggtgaacttcagttaaaattggatgaacttcaagcttctgatgtttctgttaagtatcgagaaaaacgcttgggagcaagaaaaggaattgctacatagtcagaat

SEQ ID NO: 219168 - DNA, 821 bp, Homo Sapiens
  misc_feature (753)..(753): n is a, c, g, or t
  misc_feature (781)..(781): n is a, c, g, or t
  misc_feature (815)..(815): n is a, c, g, or t
ctttggcggaagttggttgacaaggctccactcagacagaagcacctcatctgtggccctgtgaaagtagctggtgcacctggcactctgatgactgcccctgagtactacgaacccagcctggacagagatctttggtgttctctctgtggccaccatcaagtttgagatgctgagcacagccccacagagtcagctcttcctggctctggctgacagcagtatctccacgaagggcacaaagagtggcacctttgtcatgtataattgtgcccgtcttgccacactctttgagagttacaagtgtagtatggaacaaggtctgtaccccacttttcctcctgtgagcagtctggacttctcactgctacatgatgagggtgagtggttgttgctcttcaacagtatcctcccctttccggatctgctgagccggacagcagtgctggactgcacagccccggggctccacattgctgtacgcacagagatgatatgcaagttcctggtacagctcagcatggatttcagctcctactacaaccgggtacacatcctgggggagcctcgaccacacctctttggtcagatgttcgtccgcctgcagcttctgagagctgtgcgtgaggtgctccatactggcctggctatgctgggtctccctccactgagccacatttaaggccacagaggctccaatacctgggaatgttcacaaagtcatcaactggaaaaaaagcaaaaacccacggnccaaaataaattggtactgtttgttacnaaaaaaaaaaaaaaaaaaaaaaagggcggccgcnatccgc

SEQ ID NO: 219169 - DNA, 764 bp, Homo Sapiens
tccgggagatgggcaacctcaggaagttactagagtctaccccatcgccagtcgtcttctgccacaatgacatccaggaagggaacatcttgctgctctcagagccagaaaatgctgacagcctcatgctggtggacttcgagtacagcagttataactataggggctttgacattgggaaccatttttgtgagtgggtttatgattatactcacgaggaatggcctttctacaaagcaaggcccacagactaccccactcaagaacagcagttgcattttattcgtcattacctggcagaggcaaagaaaggtgagaccctctcccaagaggagcagagaaaactggaagaagatttgctggtagaagtcagtcggtatgctctggcatcccatttcttctggggtctgtggtccatcctccaggcatccatgtccaccatagaatttggttacttggactatgcccagtctcggttccagttctacttccagcagaaggggcagctgaccagtgtccactcctcatcctgactccaccctcccactccttggatttctcctggagcctccagggcaggaccttggagggaggaacaacgagcagaaggccctggcgactgggctgagcccccaagtgaaactgaggttcaggagaccggcctgttcctgagtttgagtaggtccccatggctggcaggccagagccccgtgctgtgtatgtaacacaataaacaagcttcttcttccaaaaaaaaaaaaaaa

SEQ ID NO: 219170 - DNA, 835 bp, Homo Sapiens
gccgactggactcctctgatgatggcctgcacaaggaagaacctgggggtgatccaggagctggtggaacatggcgccaatccactcctgaagaacaaagatggctggaacagtttccacattgccagtcgagaaggcgaccctctgatcctccagtacctgctcactgtttgcccaggtgcctggaagacagagagcaaaattagaaggactcctctgcatactgcagcaatgcatggccatttggaggcagtcaaggtgcttcttaagaggtgccaatatgaaccagactacagagacaactgtggcgtcaccgccttgatggacgcaatccagtgtggtcacatcgacgtcgctaggctgctcctcgatgaacatggggcttgcctttcagcagaagacagcctgggtgcccaggctctgcacagggcagctgtcacagggcaggacgaagccatccgattcttggtctctgaacttggcgtcgatgtagatgtgagagccacatcaacccacctcacagcacttcattatgcagctaaggaaggacatacaagtacaattcagactctcttatccttgggagctgacatcaattctaaagatgaaaaaaatcgatcagccctgcatctggcctgtgcaggtcagcacttggcctgtgccaagtttctcctgcagtcgggactgaaggattctgaagacatcacgggcaccctggctcagcagctcccaaggagagcagatgtccttcggggctctggccatagcgcaatgacataaggatgtttccaagaggaggcaataaagtgcatggtaattcaaaaaaaaaaaaaaa

SEQ ID NO: 219171 - DNA, 833 bp, Homo Sapiens
  misc_feature (787)..(787): n is a, c, g, or t
  misc_feature (803)..(803): n is a, c, g, or t
  misc_feature (805)..(805): n is a, c, g, or t
  misc_feature (808)..(808): n is a, c, g, or t
  misc_feature (813)..(813): n is a, c, g, or t
  misc_feature (819)..(819): n is a, c, g, or t
  misc_feature (825)..(825): n is a, c, g, or t
gcgccagagagaagcagcctccggccccggcggcccctgtctcccgaccccggaaggcgaagcaggctgcccggggaccccgcgcgtgggcgcttgaagccgagaccagcctgcccgggcctgggcaggcggagcagggccttggaccccgcggcgcccctcggcctcggagcaacgagcgcagcgccgcctctgaagagccaatccattcaggatgggaaaccacgcaggcaaacgagaattaaatgccgagaaggccagtacgaatagtgaaactaacagaggagaatctgaaaaaaagagaaacctgggtgaactttcacggacaacctcagaggacaacgaagtgttcggagaggcagatgcgaaccagaacaatgggacctcctctcaggacacagcggtgactgactccaagcgcacagcggacccgaagaatgcctggcaggatgcccacccagctgacccagggagccgcccccacttgatccgcctcttttcccgagatgccccggggagggaggacaacaccttcaaagacaggccctctgagtccgacgagctccagaccatccaagaagacagtgcagccacctccgagagcctggatgtgatggcgtcacagaagagaccctcccagaggcacggatccaagtacctggccacagcaagtaccatggaccatgccaggcatggcttcctcccaaggcacagagacacgggcatccttgactccatcgggcgcttctttggcggtgacaggggtgcgcccaagcggggctctggnaaggtgagctctgagnantanagganttttantttaantggaaaaa

SEQ ID NO: 219172 - DNA, 477 bp, Homo Sapiens
  misc_feature (445)..(445): n is a, c, g, or t
  misc_feature (454)..(455): n is a, c, g, or t
  misc_feature (460)..(460): n is a, c, g, or t
  misc_feature (462)..(462): n is a, c, g, or t
  misc_feature (465)..(466): n is a, c, g, or t
  misc_feature (474)..(474): n is a, c, g, or t
  misc_feature (477)..(477): n is a, c, g, or t
gtgctaccactggctgggccgcagggtgggcgtcctgcagggccagtgctgggaggattttgtgggccaggagctgtaccggttcctggtgatggacttcgtcctcatgttgctggacacgctttttggggaactggtgtggaggattatctccgagaagaagctgaagaggaggcggaagccggagtttgacattgcccggaatgtcctggagctgatttatgggcagactctgacctggtgagggtcctctgcttgcctcctactgtctggcccctcggtcagtgcccctttccccccgggggtcctgtacctgcctccccctggggccacagccaggcccggccatggaccctggagtgatgcagaccctaaccccggggactcagttttggccactgtcacatgccctgcccgtggtctggaaccagcctgatctcggggnaggggaggnnactgnancannccctgaantgn

SEQ ID NO: 219173 - DNA, 538 bp, Homo Sapiens
ccagcaggggcgtcgttttgttgccattttgttgaacgttatgggtttatgggtgttcctggaacttgtctttgtgcattcgttgctgtttgtgttaccctcactgtccccatgtcccacccacgtcctacggcactcaggaagcacttggtgaggacgagccctcacccttcttgtcttccttcccagcagcgcccgcagcgggccatttacacgtcgaggctggcacctggcgcgctcgggggccactgtagcgtctgcctgctccctggactcgcaggcctcgcctgtggcgccttcccagggccagcctgggtcacgagatgctgtcactcagccagatcagtattgacccaccaggggaggtggggtttggtgagagacgccagcctcagactttttcccactgagggtccagagagcggggccacgtgtcacccacgtctgcgcttggtcacccgtcctccccaccctgtgtgtgtttatgtcatagttacattaaattccattcattgaatactccaaaaaaaaaaaaaaa

SEQ ID NO: 219174 - DNA, 690 bp, Homo Sapiens
cagatggcacgacactgccatgacgcagataattgggaactgtgtctgtctcctggtcctaagctcagcacttcctgtcttctctcgaaccctggggctggacagactgccgctgcccgtctccggtttcccccaggcatctaggaagacccagcaccagtgacctccagctgggggtgggaaggaaaaaactggacactgccatctgctgcctaggcctggagggaagcccaaggctacttggacctcaggacctggaatctgagagggtgggtggcagaggggagcagagccatctgcactattgcataatctgagccagagtttgggaccaggacctcctgcttttccatacttaactgtggcctcagcatggggtagggctgggtgactgggtctagcccctgatcccaaatctgtttacacatcaatctgcctcactgctgttctgggccatccccatagccatgtttacatgatttgatgtgcaatagggtggggtaggggcagggaaaggactgggccagggcaggctcgggagatagattgtctcccttgcctctggcccagcagagcctaagcactgtgctatcctggaggggctttggaccacctgaaagaccaaggggatagggaggaggaggcttcagccatcagcaataaagttgatcccagggtttgctttgtttt

SEQ ID NO: 219175 - DNA, 680 bp, Homo Sapiens
ggcctctgggacacagccggcaatgacgccttcagaagcatccggcccctgtcctaccagcaggcagacgtggtgctgatgtgctactctgtggccaaccataactcattcctgaacttgaagaacaagtggattggtgaaattaggagcaacttgccctgtacccctgtgctggtggtggccacccagactgaccagcgggagatggggccccacagggcctcctgcgtcaatgccatggaagggaagaaactggcccaggatgtcagagccaagggctacctggagtgctcagcccttagcaatcggggagtacagcaggtgtttgagtgcgccgtccgaactgccgtcaaccaggccaggagacgaaacagaaggaggctcttctccatcaatgagtgcaagatcttctaaaccccaagagacttcacacaacacttatgtatgcaccccaaagactaatggggagagggagggccgggaagccaggaaagcttggtgttttctctgggtacaccccaagcagcgtctccttttggatacagttattgatgaggcttggccactggatgttttcactaactacactctacaagtgaactccttgcccaggccagttagaaaatcccttggggaactgtgatgaatattccatctttgattaaaaaagtgaaatagtc

SEQ ID NO: 219176 - DNA, 660 bp, Homo Sapiens
tttgctgagtgaaaaagccaaagaattcctcatggagaacagagtgcagagcttttaccagcaggagctggaaatggtggagtctttgctgtcccttgccaatcagcctgtgattcacagtgcctgctccgaccaagtgaattttaagaaggacaccacttccaaggcaattcatagtatatttaagaatgctatacaactgctgcaggaaaaaggacttgttttccagaaagatgatggttttgataacctatactatgtaaccagagaagacaaagacctgcacagaaagatccaccggatcattcagcaggactgccagaaaccaaatcacatggagaagggctgtcacttcctgcacatcttggcctgtgctcgcctgagcatccgcccgggcctgagcgaggctgtgctgcagcaagttctggagctcctggaggaccagagtgacattgtcagcacaatggagcactactacacagcgttctgagcagagacacgcagaccagctgaggaggacaaagataaggtggcattcacccccaggctctgactttcagcatcatgcaggggcttatctgtctggaggcagttacctcataataaactataaaatatagtcatcttgggaatgggatttggcataaaaaaaaaaaaaaa

SEQ ID NO: 219177 - DNA, 739 bp, Homo Sapiens
  misc_feature (692)..(692): n is a, c, g, or t
  misc_feature (695)..(695): n is a, c, g, or t
  misc_feature (697)..(698): n is a, c, g, or t
  misc_feature (703)..(703): n is a, c, g, or t
  misc_feature (716)..(717): n is a, c, g, or t
  misc_feature (720)..(720): n is a, c, g, or t
  misc_feature (722)..(722): n is a, c, g, or t
  misc_feature (725)..(725): n is a, c, g, or t
  misc_feature (728)..(728): n is a, c, g, or t
  misc_feature (735)..(735): n is a, c, g, or t
  misc_feature (739)..(739): n is a, c, g, or t
cggcagaaggccggccgggcgggtcactgggcgtccacccggaaggacagcagcttctcggaatgcatgttgttcagggtccgcaggtccggcagcttgagcagcagcttggtgaagcgggaagtctccaagggccggttcttcagcaccagagcccgaagagcccgcagcagcgtctcctggagctgctccaccgaagcggaattctccatgcccgagcggtctgtggggaagacgacagcagtgaggcggactccccgagctcctctgaggaggaaccggaggtctgcgaggacctggcaggcaatgcagcctctccctgaagccccccagaaggccgatggggaaggagaaggagtgccataccttctcccaggcctctgccccaagagcaggaggtgcctgaaagctgggagcgtgggctcagcagggctggtcacctcccatcccgtaagaccaccttcccttcctcagcaggccaaacatggccagactcccttgctttttgctgtgtagttccctctgcctgggatgcccttccccctttctctgcctggcaacatcttacttgtcctttgaggccccaactcaagtgtcacctccttccccagctcccccaggcagaaatagttgtctgtgcttccttggttcatgcttctactgtgacacttatctcactgttttataattantcngnnatgantctgtttcccaanntanantgngtntgaatcntgtn

SEQ ID NO: 219178 - DNA, 802 bp, Homo Sapiens
ctggtccacaagtcccatgatcttctgcaggaggagattggcatcgccatctacaacatggcctcagtcgactttgatggcttctttgccgccttcctcccagagttcctgaccagctgtgatggtgtggatgccaaccagaaaagtgtgctggggcggaatttcaagatggatcgggacctgccctcattcacccagaatgtgcacaggctggtcaacgacctgcgctactacagactctgcaacgacagcctgccccctggcactgtgaagctctaggcctgctactgcctggggacacggacttctgctgctgccacctgcgccagccctaccttccaccacagatgtctcccagatgggccttggtcacactccttggcttctcccaccgcaagcaacgctgcctgcctctgccgctcctccacatcttgccgctgcccagcagagctggcttctgggtccacctgagcactggacggtgctcccagggcgttggagcaggcggaggggtgtgtggccaggtactaggaggcaccaggaaatcccgcggggtggcccatgcagaccaggcgcacgtggctcatggggcagaattgccaaggacagctcacgacagtgccaccttctcaccattccagccaaggagagatgtgacgttggaactgctctggcacttctgtcaagcctcccccgccccaattgccttgagatctctgctctttgtcagagatttgcaaagactcacgtttttgttgttttctcatcattccattgtgatactaagaaactaagaagctta

SEQ ID NO: 219179 - DNA, 926 bp, Homo Sapiens
  misc_feature (11)..(11): n is a, c, g, or t
  misc_feature (14)..(14): n is a, c, g, or t
  misc_feature (54)..(54): n is a, c, g, or t
  misc_feature (849)..(849): n is a, c, g, or t
  misc_feature (867)..(867): n is a, c, g, or t
ggcggctgcanttnggaggagctggggtcgctgtgggtcgcgaagcagagcccnggacgtgcgcgcttggtgcacgatcctgaaggggagctccgaggggcccgggtctccagggctgctgcggccattcccggagcccggcgcggggcccgcgagatactggtttaggccgtcccagggctccgggcgcacccggtggccgctgctgcagcggagggagcgcggcggcgcgggggctcggagacagcgtttctcccggaagtcttcctcgggcagcaggtgggaagtgggagccggagcggcagctggcagcgttctctccgcaggtcggcaccatgcgccctgcagccctgcgcggggccctgctgggctgcctctgcctggcgttgctttgcctgggcggtgcggacaagcgcctgcgtgacaaccatgagtggaaaaaactaattatggttcagcactggcctgagacagtatgcgagaaaattcaaaacgactgtagagaccctccggattactggacaatacatggactatggcccgataaaagtgaaggatgtaatagatcgtggcccttcaatttagaagagattaaggatcttttgccagaaatgagggcatactggcctgacgtaattcactcgtttcccaatcgcagccgcttctggaagcatgagtgggaaaagcatgggacctgcgccgcccaggtggatgcgctcaactcccagaagaagtactttggcagaagcctggaactctacagggagctggacctcaacagtgtgcttctaaaattggggataaaaccatccatcaattactaccaagttgcagattttaaagatgccnttgccagagtatatggantgatacccaaaatccagtgccttccaccaagccaggatgaggaagtacagacaattggt

SEQ ID NO: 219180 - DNA, 910 bp, Homo Sapiens
  misc_feature (841)..(841): n is a, c, g, or t
  misc_feature (868)..(868): n is a, c, g, or t
  misc_feature (874)..(874): n is a, c, g, or t
  misc_feature (890)..(890): n is a, c, g, or t
  misc_feature (903)..(903): n is a, c, g, or t
cttccgcagcggcttcagcagatcggcggcatcagcggtagcaccagcactagcagcatgttgagccgggcagtgtgcggcaccagcaggcagctggctccggctttggggtatctgggctccaggcagaagcacagcctccccgacctgccctacgactacggcgccctggaacctcacatcaacgcgcagatcatgcagctgcaccacagcaagcaccacgcggcctacgtgaacaacctgaacgtcaccgaggagaagtaccaggaggcgttggccaagggagatgttacagcccagatagctcttcagcctgcactgaagttcaatggtggtggtcatatcaatcatagcattttctggacaaacctcagccctaacggtggtggagaacccaaaggggagttgctggaagccatcaaacgtgactttggttcctttgacaagtttaaggagaagctgacggctgcatctgttggtgtccaaggctcaggttggggttggcttggtttcaataaggaacggggacacttacaaattgctgcttgtccaaatcaggatccactgcaaggaacaacaggccttattccactgctggggattgatgtgtgggagcacgcttactaccttcagtataaaaatgtcaggcctgattatctaaaagctatttggaatgtaatcaactgggagaatgtaactgaaagatacatggcttgcaaaaagtaaaccacgatcgttatgctgagtatgttaagctctttatgactgtttttgtatgggtatagagtactgcagaatacagtaagctgctctattgtagcattttcttgatgttgcttantcacttatttcataaccaacttaatgntctgantaatttcttactaaanattttgtattggncaagtga

SEQ ID NO: 219181 - DNA, 936 bp, Homo Sapiens
  misc_feature (49)..(49): n is a, c, g, or t
  misc_feature (812)..(812): n is a, c, g, or t
  misc_feature (833)..(833): n is a, c, g, or t
  misc_feature (855)..(855): n is a, c, g, or t
  misc_feature (907)..(907): n is a, c, g, or t
  misc_feature (927)..(927): n is a, c, g, or t
tccggagaacaccaagctctgggtatgctccaaatcgcaccatcaccgnttgatgacaagatgtccctccggctccactaccggatgaggttctatttcaccaattggcatggaaccaacgacaatgagcagtcagtgtggcgtcattctccaaagaagcagaaaaatggctacgagaaaaaaaagattccagatgcaacccctctccttgatgccagctcactggagtatctgtttgctcagggacagtatgatttggtgaaatgcctggctcctattcgagaccccaagaccgagcaggatggacatgatattgagaacgagtgtctagggatggctgtcctggccatctcacactatgccatgatgaagaagatgcagttgccagaactgcccaaggacatcagctacaagcgatatattccagaaacattgaataagtccatcagacagaggaaccttctcaccaggatgcggataaataatgttttcaaggatttcctaaaggaatttaacaacaagaccatttgtgacagcagcgtgtccacgcatgacctgaaggtgaaatacttggctaccttggaaactttgacaaaacattacggtgctgaaatatttgagacttccatgttactgatttcatcagaaaatgagatgaattggtttcattcgaatgacggtggaaacgttctctactacgaagtgatggtgactgggaatcttggaatccagtggaggcataaaccaaatgttgtttctgttgaaaaggaaaaaaataaactgaagcggaaaaaaactggaaaataaacacnagaaggatgaggagaaaaacnagatccgggaagagtggaacantttttcttacttccctgaaatcactcacattgtaataaaggaagtctggggncagcattaacaagcaggacnacaagaaaa

SEQ ID NO: 219182 - DNA, 630 bp, Homo Sapiens
gaagtatgcagcaattttcattcagaaatatgggagaaagagaccaaaggatcacgtggaacagatcaaaaaaagaatactcaaattgagttgcaatcgtctcctgatgtgcaaaacagtttattagaagataagacttaccttgattctgaagagagaacttctattgatatagtatgctctgaaggagagaacagcaattcaacagaacaagattcatatagtaactttcaggtttatcatagtcaattaaatatgtcccatcagtttagtcattttaatgttctcactcatcagacatttttggggacaccatatgccctttcatcaagtcagtctcaagaaaatgagaattacttcttatctgcttatactgaaagcttggatagagataaatctccacctcccttaagttgggggaaaagtgattcttccaggccatattcacaagagaaataactgtagtaactttttttttaagagattgttgtggactttgtttattaacaatttatatttcattctctaaacaaaaggttcttgttctttctcaaatgttttttcttttatttaaatcatgatggcctgtaacagttgaagcatctaaaaattgaaataaatatatatttt

SEQ ID NO: 219183 - DNA, 878 bp, Homo Sapiens
  misc_feature (18)..(18): n is a, c, g, or t
tccgcgcgccatcaccgntcttctcgcccgacggccacctcttccaagtggagtacgcgcaggaggccgtcaagaagggctcgaccgcggttggtgttcgaggaagagacattgttgttcttggtgtggagaagaagtcagtggccaaactgcaggatgaaagaacagtgcggaagatctgtgctttggatgacaacgtctgcatggcctttgcaggcctcaccgccgatgcaaggatagtcatcaacagggcccgggtggagtgccagagccaccggctgactgtggaggacccggtcactgtggagtacatcacccgctacatcgccagtctgaagcagcgttatacgcagagcaatgggcgcaggccgtttggcatctctgccctcatcgtgggtttcgactttgatggcactcctaggctctatcagactgacccctcgggcacataccatgcctggaaggccaatgccataggccggggtgccaagtcagtgcgtgagttcctggagaagaactatactgacgaagccattgaaacagatgatctgaccattaagctggtgatcaaggcactcctggaagtggttcagtcaggtggcaaaaacattgaacttgctgtcatgaggcgagatcaatccctcaagattttaaatcctgaagaaattgagaagtatgttgctgaaattgaaaaagaaaaagaagaaaacgaaaagaagaaacaaaagaaagcatcatgatgaataaaatgtctttgcttgtaatttttaaattcatatcaatcatggatgagtctcgatgtgtaggcctttccattccatttattcacactgagtgtcctacaataaacttccgtattttttaaaaaaaaaaaaaaa

SEQ ID NO: 219184 - DNA, 769 bp, Homo Sapiens
  misc_feature (712)..(712): n is a, c, g, or t
  misc_feature (714)..(714): n is a, c, g, or t
  misc_feature (728)..(728): n is a, c, g, or t
  misc_feature (762)..(762): n is a, c, g, or t
  misc_feature (765)..(765): n is a, c, g, or t
  misc_feature (769)..(769): n is a, c, g, or t
tccggcaccccttaggaatgcacacgtggggtcctcaagaggttacatgcaaactaaccccagcagcacacagagaaggcgcataagccgcgaccaggaggggttgctcccgagtccgtggcaggaaccagaggccacatgtggctgctcgtatttaagttaattaaaatggaacgatggccgggtgtggtggctcacacctgtaatcccagcactttgggaggcggaggcgggcagatcacttgaggtcaggagttccaagaccagcctggccaacacagtgaaaccccgtctctactaaaaatacaaaaaattagctgggcatcgtggcaggcacctgtaatcccagctactaaagaggctgagccaggacggacaatcgcctgaacgcgggaggtggaggttgcagtgagctgagattgcgccagtgcactccagcctgggtgacagagcgagactccatctaaaaaaaaaaaaaaatgaaatttaaaactctgttccttagctgcaccagtctgctgtcaagtgttcagtggcacatgtcgcgaggggctgccatcacggacggtgcagatgtcccatatatctagcattctaggacattctgtcagatggcaccgggctctgtcctgtctgctgaggaggtggcttctcatccctgtcctgagcaggtctgagctgccgcccgctgaccactgcccttgtcctgcangngggctgggagcccnagccccacacctgccgggcagcaggtgctggacntcnacan

SEQ ID NO: 219185 - DNA, 675 bp, Homo Sapiens
  misc_feature (640)..(640): n is a, c, g, or t
  misc_feature (663)..(663): n is a, c, g, or t
  misc_feature (671)..(671): n is a, c, g, or t
ggaaaatactcatttggaactgcagcccatcctatggagcaggtcgaagatagaattggaagcagcctcagttacgtgaatactacagaagagaaattttcagacaacatttctactgcatctgaagcctcagaaactgctggcagcggctttctgtattctgccacaccaggggcagatgtttgctttgctcgacaacataacacttctgacaataacaaccagtgtttgctgggagccaatgggaatattttgttgcaccttaaccctcagaaaccaggggctattgataatcagccattagtaactcaagaaccagtaaaggctacatcattaacactagaaggaggacgattaaaacgaactccacagctgattcatggaagagactatgaaatggtcccagaacctgtgtggagagcactttatcactggtatggagcaaacctggccttacctagaccagttatcaagaacagcaagacagacatcccagagctggaattatttccccgctatcttctcttcctgagacagcagcctgccactcggacacagcagtctaacatctgggtgaatatgggaaatgtaccttctccgaatgcacctttaaaagcgggtattagcctatacaggctgntttagtcgaatgcagaccatcanggaattcncgaa

SEQ ID NO: 219186 - DNA, 877 bp, Homo Sapiens
tccgattgcatcgggcccctattcggacttggtctccccatgtggtccaagccagcactcctgccatcacagggcccctcaaccatcctgccaatgcccaggaacatcctgcccagctgcaaaggggcatcagcccaccccaccggatacgaggggctgtgcgatcccgcagccgctccctccggggctcctcccatttatcccagtggctcaacaacttttttgccctccccttctcctccatggcttcccagcttgacatgtcttccgtggtgggggcaggggaaggcagagcccagactcttggagcaggtgttccccctggggactctgtcagaggctccatggaggcctctcaagtccaagtgcctctggaaccctctccaattacattcccaccaccctgtgccccagaaaggccccccatcagcccagtcccaggcgcccgtcaagcaggcctctgagagtgctacccttctcttgtaaccttgcagccaacacccctgcccggcccctgagctgcctcctccagcccatgctcttacaggccctgcacagagtagcactcattaattcttggttaaggaatgaatcaacgaatgaatggctatgcatggacctctgggcagggagacctgggtcttctctggctgagaggggaaggctaaggcatggctgagattcaagccaccattccaggcctctttgcccaagaaagaaacttctgtcacccttgcactctcctgtgttctgagtccctggccaatagcacagccttccatgccccgacccccaccccaagcctctccactaggcctctgccaggatctaagcccatgagcacagggactggctatcccagacctggcagatgtgg

SEQ ID NO: 219187 - DNA, 556 bp, Homo Sapiens
ggacatgttcctgcagtaaaattgctgctcgatatgggttcagacattaatgcccaaatagagaccaatcggaacacggctctcaccctggcctgtttccagggccgagcagaagtagtgagtttgcttctggaccgaaaagccaatgttgaacatagggcaaagacgggtcttacccccttgatggaagcagcttctggagggtatgcagaggttggaagagttcttcttgataaaggagcagatgttaatgctccccctgtgccttcctcaagagatactgctttaacaatagcagcagacaaaggtcactacaaattttgtgaactcctgattcataggggagcccacattgatgttcgtaacaaaaagggaaatacgccactttggctggcatccaatggaggtcattttgatgttgtgcagttgctagtgcaagcaggtgctgatgtggatgcagcagataaccggaaaatcacacctcttatgtcagcatttcgcaagggtcatgtaaaagttgttcaatatttggtaaaggaagtaaatcagttccctt

SEQ ID NO: 219188 - DNA, 871 bp, Homo Sapiens
  misc_feature (835)..(835): n is a, c, g, or t
  misc_feature (838)..(838): n is a, c, g, or t
  misc_feature (843)..(843): n is a, c, g, or t
  misc_feature (858)..(858): n is a, c, g, or t
  misc_feature (862)..(862): n is a, c, g, or t
  misc_feature (864)..(864): n is a, c, g, or t
  misc_feature (870)..(870): n is a, c, g, or t
tccgtgcagaagcaagaagaaactggtcttctcctctcaagcacttgtaaggaaacacaaggggtggggtgacttgcattcatttcttcccattgcaaaggtggcacccagcactgaggaaagcaagccaggatacccaggctatggaagtattcatatagagaggatgaaagggtagggctcctaaggaatgactcagctggcatgtgagagccaggccaggaaaaggtcatagtcagtcacacctgctgcaaggaaggggctgcctcaggtgggatgtacatattctctagagcagatgggtgtctgcttgagggttttagacttgggtgcatgaaaactctctgctatggggagtttgtgtgggctaggccagaaggtggctagcagaccctctacatttatgtccctgagccaatcatgttttcactctccatattgccagttatgttaactgcttaatttatttagtctgatcaatggcccagttcaggcccaccactcctacacttgctggggacagccaggaaacaaccagccacacaatgctgaactgtgctgctgctgggagtccagggctcagccctaaagcaagcttgcaaacttcacacataagtacagtctatatagcaagtaaactctgaccagagatgacatctggtcccacaactcatcaggtctatgtacaatatttcacataccacccaatagataagataatattaacagcaaccactctcctttatcaattccccctgctccaatacaaccaccacacattgcattaataccccaaacccattcccaatttattaaatatggtgcaagctcatanacncttanaagaggcaaatctanttgngnatgaana

SEQ ID NO: 219189 - DNA, 720 bp, Homo Sapiens
gtggacagctttactcccaggcccaaaaaaattatccgtacagccccagatgggatggaaatgaaatggccaaaagagcaaagggatgccaagggagcagagatgcctgcagcccgtgggagcaagtcctggcctttgcagttgcaaaaactggctgcaagctgctccagccccagaggaactggccaagctccagagggcctccttggagggcctcagagggagagagaactgctcagtaattttgatcactttgggcttatttcaaaacctttgtccctcagttccaggaggcagcatttgccaatggaaagctctaggaaacaccagtcttgagaggtggccagccagactgcctgtccacatgcgtgtcagcacatacagccgcttcctggaagccgcctggaatgtcttcacggcagcgttttgctcacacagcagcttttgcacgccccaggcagccccgactgctgaaatccaacttgagctggctggtggtccctggatcctagagcccttcacttcgggttactccctctttcttgcctctatttcttagttggaagaaataaactcacaaattatggtgcagtaattttccggggaaagtaaagcctcaggaatgcccacgcctttcttccaaagcctttgtctctgagacctcttaagttctaagattaaatgcccctcgctgttcttcctctgaaaaaaaaaaaaaaa

SEQ ID NO: 219190 - DNA, 657 bp, Homo Sapiens
  misc_feature (603)..(603): n is a, c, g, or t
  misc_feature (605)..(605): n is a, c, g, or t
  misc_feature (619)..(619): n is a, c, g, or t
  misc_feature (623)..(623): n is a, c, g, or t
  misc_feature (636)..(636): n is a, c, g, or t
  misc_feature (646)..(646): n is a, c, g, or t
  misc_feature (653)..(653): n is a, c, g, or t
gccttcttcattcgctgcggaatcttcctcatcctggagaagctgaagatcatcacctacaggaacctctttaagaaagtgtatttgttactgaaaacacaccagctgtctctggatgcttttctggttgccttgaagttcatgcaggtggaggacgtggacattgacgaagttcagtgtattctggctaacttgatatacatgggacacgtcaaaggctacatatcgcatcagcatcagaagctggtggtcagcaagcagaacccatttcctcccctgtccacggtgtgttgaaagtacacggagccccgaggacgggtgagcagttgtttctttccactttggttgtgctgatgagaccggtccggtactgcaacaaggctccctgaagccggaactcttggaggcgcttttcccagggatgctgaggctgagattttcagcacacccgagttaatctccttcatttgtaactaatttcagcctgatgaaaacctggaattcctttttcacagactcggctggttctggagtctttgtgagactttctttgaaggaggctttgcgtgaaggctgctcggctcactttttcctaagtggggntncctgaaggctgtcnttgnaactttttggaanttccttgggnaaaaaancgta

SEQ ID NO: 219191 - DNA, 622 bp, Homo Sapiens
  misc_feature (607)..(607): n is a, c, g, or t
ccgagccccgtgcactgtgtcgctgccgcggcccccaccgccaccgtctcggagaaagaaccgtttggcaagctgcaactctcctcccgggaccctccgggttctctgtccgccaagaaggtccggactgaggagaagaaggcaccgcggagagtgaacggagaagggggcagcggcgggaacagcaggcagctgcagccgccggcagcaccttcgcctcagagctatggcagccccgcgtcttggagctttgcccctctgtctgctgctccctccccgtcctcttctcggagcagtttctctttctccgctggcacggccgttccctcctcagcctccgcttccttgtctcagccggtgccgcgcaaactgctggtccctcctacgctgctgcacgctcagcctcaccatctcctcctgcccgccgccgccgccgctgcctcggctaacgccaagtcgcgcagacctaaggagaagcgggagaaggagaggaggaggcacggtctcggtggggcccgagaggccggcggggcctcccgggaggagaacggggaggtgaagccgctgccccgagataaaatcaaagacaaaattaaagagagagacnaaaaaaaaaaaaaaa

SEQ ID NO: 219192 - DNA, 792 bp, Homo Sapiens
  misc_feature (765)..(765): n is a, c, g, or t
atccctgtacgctgcttcacttgtggcaagatcgtcggcaacaagtgggaggcttacctggggctgctgcaggccgagtacaccgagggggacgcgctggatgccctgggcctgaagcgctactgctgccgccggatgctgctggcccacgtggacctgatcgagaagctgctcaattatgcacccctggagaagtgaccacgctgaaacccacccacccgctgtgctgaccatgggccctgagcgtcctaccccgaattcacgaggctgaggcatccgggagctggcgtaatgcctggccgcagtgtgtgtgtatcccataccccactctggaaggaaccatccagtaaaggtctttcagaaccactaaggtcccagccctcactaggatgtcaggagccaggtctaggcccagctttcacactgtggcagcccagtgaagcagactgggccatgaactctcctagccctggggccagcctgttccacaggcacccctgcaggaggcgctgccaggagagccttccatctcggggctctttgaggttccctccttctgggtgttcttcaggctgagcagagaggctcctgtaccctctctctcggaatctgaagagccagatttaggccgggcaaaggggctcacccctataatcccaggactttgggaggccaaggcaggaggatcacttgagtccagaaattcaagacccgcctgggcatcataatgagaccccatctctacaacaaaatttaataaattanctgggcacagtgaaaaaaaaaaaaaaa

SEQ ID NO: 219193 - DNA, 649 bp, Homo Sapiens
  misc_feature (598)..(598): n is a, c, g, or t
  misc_feature (630)..(630): n is a, c, g, or t
  misc_feature (641)..(641): n is a, c, g, or t
  misc_feature (646)..(646): n is a, c, g, or t
gcggcggagcctacggtccctgcagtgcctgctgctgaggaggccaccgaagctcggggacgcgaggagccggcgtggccctggaaagacgccccgatccggacgctggtgcagcgcatccaccagctgcaggctgagcgcgcgcagggcttccgccgactggaggagtggttggcgccggtgcagggcctgagagcctgggggcgcggcctcagggtccccacatgccgcagaggccaccgccagtacctgcgcagcggccctgactacgacttcgcgcgctaccggagcacagtgcacggggtgacccaggccttcgccgccgcctcgcgggaggtgctggcggtggaagcagagctgggcgggcctcgcaggcagccgctgctcgccggccacgtgcgcagcctgcaggagctggagcagacgcggctgggcacggtggccctgctgcagttgatggagacgccagagctggcggggcaggaggacgctgtacggatgcagcagctgaaaatgaaggtaattaaaaccatggaggcgatcagcgaggttctccaggaccttaggtttgatgcggaatctgccgagtgatggcggntccccagggatgcgccgagggagatgggaaanggggcggatgncgccnaac

SEQ ID NO: 219194 - DNA, 587 bp, Homo Sapiens
  misc_feature (581)..(581): n is a, c, g, or t
gctggagcggagccggccgtacgcggtgctgcgagggcagaacctggatcaaactcttcattgaagtactcatcaggcgtgatggctgtggggttgtttgcagtagcacattccgtggtgaggtcctgctgagccagaactcaggagagtcagaaatgccaaatgatgttcacaagtgaaggcctgtggcactcagtgtctgaggtggacgtgttaaccagctaaagaccgggaagttctattcactaacttttttgcatggaacaagaaaatctatgaggatatcaccaaactacacaggaagtgtaatggatttcttcattttaaaatatttctctactctcctttacatttttatctcctgattataacaaagaaaaaaagaaagaaatatctgaaagtgcatgagacttggaagacttggagttgaagttctagctgtttccctgtctagctttgatagtggaaaggtaatttcatttttctgacccgcagggacatccactgtaccaagttcatatagttactgtgagcatcaagtaagaaaatatttgttaaggtgctctgttgcaatataaagncctgaa

SEQ ID NO: 219195 - DNA, 766 bp, Homo Sapiens
gagagatctgaagcagacaaagaaaaaagtcacaaagatgacagtgaattagacttttcagctctttgtcctaagattagcctcacggttgctgccaaagagttatctgtgtctgacacagacgtctcagaggtatcctggactgataatgggaccttcaacctttcagaaggatacactccacagacagacacttctgatgatcttgaccgacccagtgaggaagttttctctagagatctttcagattttccatctctagaaaatggcatgggaacaaatgatgaagatgaattaagccttggtttgcccactgagctcaagagaaagaaggaacagttggacagtggtcacagaccaagcaaagagacgcaatcagcagctggtctcacccttcctctgaacagtgaccaaacctttcacctgatgagcaacctggctggggatgttatcacagctgcagtgactgcagctatcaaagaccagttagagggtgtgcagcaagcactttctcaggctgcccccatcccagaagaggacacagacactgaagaaggtgatgactttgaactacttgaccagtcagagctggatcaaattgagagtgaattgggacttacacaagaccaggaagcagaagcacagcaaaataagaagtcttcaggtttcctttcaaatctgctgggaggccattaatctaggaatcagcttgcaacagagcacaaaaaacaccaaaaaaatttcaaacaagaaaaaaaaaaaaaaa

SEQ ID NO: 219196 - DNA, 732 bp, Homo Sapiens
  misc_feature (663)..(663): n is a, c, g, or t
  misc_feature (686)..(686): n is a, c, g, or t
  misc_feature (700)..(700): n is a, c, g, or t
gaccatgctgctgttctgccccggctgcgggaacgggctgatcgtggaggagggacaacgctgccaccgcttcgcctgcaacacgtgcccctacgtgcacaacatcacccgcaaggtaacaaatcggaagtacccaaaactgaaagaagtggatgatgtgcttggtggagcagctgcctgggagaatgttgactctactgcagagtcgtgtcccaaatgcgaacatcctcgtgcttacttcatgcagcttcagacccgctctgcagatgagccgatgaccaccttctacaagtgctgcaatgctcagtgtggacaccgctggagggattagggccaggatggcccagctgccctagacagagtcttgttctgtcgcccaggctggagtgcagtggtacgaattcagctcactgcaacctctgccttccgggttcaagggattctcctgtctcagcctcccaagcagctgggactacaggcatgcaccaccacacctggggccaagggctggaacctccacctgcctcaccaacaacattctcagggatcgattgccactggtctgccccagagctgggacagggctccagccccgggctcctcttcaccagcaaccaggctcctggtggcacacgtaagtgcacctggcgaggcagtgagtgncaccgtcgtgctgccgccccgangcagtgctcctgcngtccgacagttgcatcatcactttccaaaggc

SEQ ID NO: 219197 - DNA, 598 bp, Homo Sapiens
gccgacgcctcatcgtggtgctttcggacgccttcctgagccgggcctggtgcagccacagcttccgactccttcctccgatttttggaaagaagtgcagctggcgctgccgcggaaggtgcggtacaggccggtggaaggagacccccagacgcagctgcaggacgacaaggaccccatgctgattcttcgaggccgagtccctgagggccgggccctggactcagaggtggacccggaccctgagggcgacctgggtgtccgggggcctgtttttggagagccatcagctccaccgcacaccagtggggtctcgctgggagagagccggagcagcgaagtggacgtctcggatctcggctcgcgaaactacagtgcccgcacagacttctactgcctggtgtccaaggatgatatgtagctcccaccccagagtgcaggatcatagggacagcgggggccagggcagcggcgtcgctcctctgctcaacaggaccacaacccctgccagcagccctgggaccctgccagcagccctgggaaaaggctgtggcctcagggcgcctcccagtgccagaaaataaagtccttttggatt

SEQ ID NO: 219198 - DNA, 535 bp, Homo Sapiens
gaggaacatgaggtggctgtgctgggggcaccccccagcaccatccttccaaggtccaccgtgatcaacatccacagcgagacctccgtgcccgaccatgtcgtctggtccctgttcaacaccctcttcttgaactggtgctgtctgggcttcatagcattcgcctactccgtgaagtctagggacaggaagatggttggcgacgtgaccggggcccaggcctatgcctccaccgccaagtgcctgaacatctgggccctgattctgggcatcctcatgaccattggattcatcctgttactggtattcggctctgtgacagtctaccatattatgttacagataatacaggaaaaacggggttactagtagccgcccatagcctgcaacctttgcactccactgtgcaatgctggccctgcacgcctggggctgttgcccctgcccccttggtcctgcccctagatacagcagtttatacccacacacctgtctacagtgtcattcaataaagtgcacgtgcttgtgaaaaaaa

SEQ ID NO: 219199 - DNA, 698 bp, Homo Sapiens
tccgagcaagctgaacattttgaagcttgctcctggtgggcatgtgggacgtttctgcatttggactgaaagtgctttccggaagttagatgaattgtacggcacttggcgtaaagccgcttccctcaagagtaactacaatcttcccatgcacaagatgattaatacagatcttagcagaatcttgaaaagcccagagatccaaagagcccttcgagcaccacgcaagaagatccatcgcagagtcctaaagaagaacccactgaaaaacttgagaatcatgttgaagctaaacccatatgcaaagaccatgcgccggaacaccattcttcgccaggccaggaatcacaagctccgggtggataaggcagctgctgcagcagcggcactacaagccaaatcagatgagaaggcggcggttgcaggcaagaagcctgtggtaggtaagaaaggaaagaaggctgctgttggtgttaagaagcagaagaagcctctggtgggaaaaaaggcagcagctaccaagaaaccagcccctgaaaagaagcctgcagagaagaaacctactacagaggagaagaagcctgctgcataaactcttaaatttgattattccataaaggtcaaatcattttggacagcttcttttgaataaagacctgattatacaggcagtgagaaacatgaaaaaaaaaaaaaaa

SEQ ID NO: 219200 - DNA, 685 bp, Homo Sapiens
ccacatcttgctcgtccacggcatccacttccttctccgaaccagcagaacccaggttgggttcaaccaaagggaaggagccaagagcctcaaaggaccaggtgctttcagaacctgagaccaagaccatgggaaaggtttctcgattcagaatacgcagaacaccagcccgtcctcagctaaaccttacaccaatgggactgcctcgaccaatcaggttgaacaagaaggagttcagcttggaagaaatttacaccaacaagaattaccaatcacccacaaccaggaggacctttgagaccatctttgaggaaccccgggagcgcaatgggactctgattttcaccagctcaaggaagctccggcgggctgtggaatttcgggacagcagccttcctcgatcacgaagaccgtcccgtggggtccgggctgcagggggcaggactgttcctcccaatgtggcccccagccctgatgtgggccccctgctccagcagcggctggaggagctagatgccttgctcctggaggaagaaacagtagatcgggagcagccccactggacctaggtgccccatctgttggtcatccatcctgaagggacaggaaacctcccaggcagttatttttttttctctatatttctagtaaagttttcgatatgtttctgaaaaaaaaaaaaaaa

SEQ ID NO: 219201 - DNA, 907 bp, Homo Sapiens
  misc_feature (845)..(845): n is a, c, g, or t
  misc_feature (848)..(848): n is a, c, g, or t
  misc_feature (901)..(901): n is a, c, g, or t
aatgaatggaagaagaaatacgaagagacccggcaagaagttttggagatgaggaaaattgtagctgaatatgaaaagactattgctcaaatgattgaagatgaacaaaggacaagtatgacctctcagaagagcttccagcaactgaccatggagaaggaacaggccctggctgaccttaactctgtggaaaggtccctttctgatctcttcaggagatatgagaacctgaaaggtgttctggaagggttcaagaagaatgaagaagccttgaagaaatgtgctcaggattacttagccagagttaaacaagaggagcagcgataccaggccctgaaaatccacgcagaagagaaactggacaaagccaatgaagagattgctcaggttcgaacaaaagcaaaggctgagagtgcagctctccatgctggactccgcaaagagcagatgaaggtggagtccctggaaagggccctgcagcagaagaaccaagaaattgaagaactgacaaaaatctgtgatgagctgattgcaaagctgggaaagactgactgagacactccccctgttagctcaacagatctgcatttggctgcttctcttgtgaccacaattatcttgccttatccaggaataattgcccctttgcagagaaaaaaaaaaacttaaaaaaagcacatgcctactgctgcctgtcccgctttgctgccaatgcaacagccctggaagaaaccctagagggttgcatagtctagaaaggagtgtgacctgacagtgctggagcctcctagtttccccctatgaaggttcccttaggctgctgagtttgggtttgtgatttatcnttnagttggttttaaagtcatctttactttcccaatgtgttaaatttgtactcccnctttgg

SEQ ID NO: 219202 - DNA, 573 bp, Homo Sapiens
  misc_feature (545)..(545): n is a, c, g, or t
  misc_feature (570)..(570): n is a, c, g, or t
ggcacagatgaccaaagtcccttcctgcttcctgttacctgtcttgctcctggggagaaagaggggcctgatgagactccactcaggtgcacacatcaccaggtgcatctgcaggcaccgggctggctgcttgcagccaggagaaggtcagcgagaaggagtgtatgagtgtgagtgtgtgtgcatggaagttggggcactgggcgtctgactccctccccacccaagagaggaaggacccctcaccacccccactggcgagacagtttactttgccgacttgccatgtttttgccaaaaccaagattttgaaggaaatgagtggccagcgccagggcccaggccatgtggcctgcccagcctcaatgtcacttggcggcggggtggggtgggggtgggcagcagcatcccagccttgagatgcttcactttccttctctgtaaccagactttgaaaaattgttcgtttcatcaggctctgttcctcaatggccttttgctacgtgcctcccgagaaatttgtctttttgtataaatgacaaagngttgaaaatgtatttcctgaaatanatg

SEQ ID NO: 219203 - DNA, 756 bp, Homo Sapiens
gacttactgaagaatggagagagaattgaaaaagtggagcattcagacttgtctttcagcaaggactggtctttctatctcttgtactacactgaattcacccccactgaaaaagatgagtatgcctgccgtgtgaaccatgtgactttgtcacagcccaagatagttaagtgggatcgagacatgtaagcagcatcatggaggtttgaagatgccgcatttggattggatgaattccaaattctgcttgcttgctttttaatattgatatgcttatacacttacactttatgcacaaaatgtagggttataataatgttaacatggacatgatcttctttataattctactttgagtgctgtctccatgtttgatgtatctgagcaggttgctccacaggtagctctaggagggctggcaacttagaggtggggagcagagaattctcttatccaacatcaacatcttggtcagatttgaactcttcaatctcttgcactcaaagcttgttaagatagttaagcgtgcataagttaacttccaatttacatactctgcttagaatttgggggaaaatttagaaatataattgacaggattattggaaatttgttataatgaatgaaacattttgtcatataagattcatatttacttcttatacatttgataaagtaaggcatggttgtggttaatctggtttatttttgttccacaagttaaataaatcataaaacttgaaaaaaaaaaaaaaa

SEQ ID NO: 219204 - DNA, 470 bp, Homo Sapiens
cgcagtcagcagcagcagcagcagcagggcctggcgccccccgcgcagccgccggcgccgcccagcgcgaccctccccgccggggccgccgcacctccctcgccgcccttcagcttccagctgccgcgccgcctgtccgactcgcccgtgttcgacgcgccccccagccccccggactcgctgtcggaccgcgacagctacctaagcggctccctgagctccggcagcctcagcggctctgagtctcccagcctcgaccctggccgccgcctgccaatcttcagccgcctctccatctccgacgactgaggcaagagggcgccagtgaggaggaagggaaggcggttcagagatgttggaggacacccctcgccatctcgcccttgctgggggcacgggagtggggggggtgacatgggccctaggcagactgcaagcccgaccgagcacttggactcgaactctgtgcc

SEQ ID NO: 219205 - DNA, 797 bp, Homo Sapiens
  misc_feature (628)..(628): n is a, c, g, or t
  misc_feature (697)..(697): n is a, c, g, or t
  misc_feature (783)..(783): n is a, c, g, or t
gcaatggcgcgatcttggctcacggcaacctctgcctcccaggttcaagggattctcctgcctcggcctcccgaatagctgggattacaggcatgcgccaccacgcccggctaattttgtatttttaaaagagacggggtttctccatgttggtcaggctgctctcgaactcctgacctcaggtgatccgcccgcctaggcctcccaaagtgctgggattacaggcgtgagccactgcgcccagccactaaatttcataaatggtaagatatccaaccttaccaaatgtatctatagtttatatttttgacaggctgcataataaatccatagggctctatctgaatttcaacaaggattattcagtaagaagaaaatgagtgttgtatctcagctgcgcccatcagctctattccccgaatgaccgtgagcttgaaggaaagccatttaacgcacacggtgccgatgggtgtcttctgcttggcgacatcgtgggctttatcctacttcctcaaggaggcataaaagatgattttttccccacaacaatgagctttcttacagacatattaaacggaaatgaaatgtgctactcattcccagcgctgcagaaccagagactcagagncttggggcactgagggatgccagttctgcctgttcatctggaacctggatctaaggagggaagaggcgntgcccctgctggcatagtcaggtaccagcccagccaggtattgaacgggctgagcttttcatgatggttcctgctgacctggaaanatcttaaaatggaa

SEQ ID NO: 219206 - DNA, 726 bp, Homo Sapiens
  misc_feature (632)..(632): n is a, c, g, or t
  misc_feature (658)..(658): n is a, c, g, or t
  misc_feature (673)..(673): n is a, c, g, or t
  misc_feature (711)..(711): n is a, c, g, or t
  misc_feature (713)..(713): n is a, c, g, or t
  misc_feature (719)..(719): n is a, c, g, or t
cacagtctgaccgggctgcattgtgtatggtgccacctagagatccacgatgactgcctgcaagcggtgggccatgagtgtgactgtgggctgctccgggatcacatcctgcctccatcttccatctatcccagtgtcctggcctctggaccggatcgtaaaaatagcaaaacaagccagaagaccatggatgatttaaatttgagcacctctgaggctctgcggattgaccctgttcctaacacccacccacttctcgtctttgtcaatcctaagagtggcgggaagcaggggcaaagggtgctctggaagttccagtatatattaaaccctcgacaggtgttcaacctcctaaaggatggtcctgagatagggctccgattattcaaggatgttcctgatagccggattttggtgtgtggtggagacggcacagtaggctggattctagagaccattgacaaagctaacttgccagttttgcctcctgttgctgtgttgcccctgggtactggaaatgatctggctcgatgcctaagatgggggaggagggttatgaaggacagaatctggcaaagatcctcaaggatttagagatgagtaaagtggtacatatgggatcgatggtctgnggaggtgatacctcaacaaactgaanaaaaaagtgacccantcccctttcaaatcatcaataactacttctctattggngnggatgnctctatt

SEQ ID NO: 219207 - DNA, 522 bp, Homo Sapiens
  misc_feature (486)..(486): n is a, c, g, or t
cgcaccggtaccacatccaccggcgaaagagctttgacgcctctgacacactggccctgccccggcactgcctgctgggctgggacatttttcctccgaagtctgagaaaagctcagcccccaggaacctggacctctggtcctctgtctccgctgaggcccagcaccagaagctgtccggcaccagcagcccttttcacccggcctcaccaatgcagatgctgcccccgaccccgacctggtcagtgccccaggtccctcggccccacgtcccacggcagaagccctgaggactgactcctgggggagaacagcattcccgccgcctccagcctctcccctctggcaggcgcacccaggagatggaatcccctgcccgcccagctcaggcccagctgtcctaggttgggcaggtgggtggacccaagcttgtctgctgcctgagttccagagagggaggaccctggggtggagggtgagggatcntgtggaagtttgtaaataaagctcagtgctctgcaa

SEQ ID NO: 219208 - DNA, 941 bp, Homo Sapiens
  misc_feature (827)..(827): n is a, c, g, or t
  misc_feature (871)..(871): n is a, c, g, or t
  misc_feature (929)..(929): n is a, c, g, or t
  misc_feature (938)..(938): n is a, c, g, or t
  misc_feature (940)..(940): n is a, c, g, or t
tccgcctacaccacctattccagaggctggcggcgctcaagctggaagcagaggacatcgccctgacagccacaagccagaagcacaagctcacagtggtgctggaggccgtgaaccggagtctgcagctggaggagtggcaggccaagtggagcgtggagagcatcttcaacaaggacctgttgtctaccctgcacctccttgtggccctggccaagcgcttccagcccgacctctccctcccaaccaacgttcaggtggaggtcatcactatcgagagcaccaaaagtggtctgaagtcagagaagttggtggaacagctcactgaatacagcacagacaaggacgagcctccaaaggacgtctttgatgaattatttaagctggctccggagaaagtgaacgcagtgaaagaggccatcgtgaactttgtcaaccagaagctggaccgcctgggcctgtctgtgcagaatctggacacccagtttgcagatggggtcatcttactcttgctgattggacaacttgaaggcttcttcctgcacttaaaggaattctacctcactccgaactctcctgcagaaatgctgcacaacgtcaccctggcgctggagctgctgaaggacgagggcctgctcagctgccctgtcagccctgaagatatcgtgaacaaggatgccaagagcacactgcgggtgctctatggtctgttctgcaagcacacgcagaaggcacacagggacaggacgccccatggagccccgaattgaccctcactgcctccaaagcccagagcctgcctgtcagcccagctggagggccccgangctgcagggtgtcctcccacagtcccgctgtttcctgtgcattncgtgacccgcttccctcccaccctgtctcctgtctccatcgttggattatcttttgancccccttgngng

SEQ ID NO: 219209 - DNA, 856 bp, Homo Sapiens
  misc_feature (15)..(15): n is a, c, g, or t
  misc_feature (36)..(36): n is a, c, g, or t
  misc_feature (819)..(819): n is a, c, g, or t
  misc_feature (830)..(830): n is a, c, g, or t
  misc_feature (842)..(842): n is a, c, g, or t
  misc_feature (847)..(847): n is a, c, g, or t
  misc_feature (852)..(852): n is a, c, g, or t
cacaaacccatcagntttaggttgttcacacactgntttgcaagacctgcttgaataaacttcatcgaaaagcttgtccttttgaccagactgccatcaacacagatattgatgtacttcctgtcaacttcgcacttctccagttagttggagcccaggtaccagatcatcagtcaattaagttaagtaatctaggtgagaataaacactatgaggttgcaaagaaatgcgttgaggatttggcactctacttaaaaccactaagtggaggtaaaggtgtagctagcttgaaccagagtgcactgagccgtccaatgcaaaggaaactggtgacacttgtaaactgtcaactggtggaggaagaaggtcgtgtaagagccatgcgagcagctcgttcccttggagaaagaactgtaacagaactgatattacagcaccagaaccctcagcagttgtctgccaatctatgggccgctgtcagggctcgaggatgccagtttttagggccagctatgcaagaagaggccttgaagctggtgttactggcattagaagatggttctgccctctcaaggaaagttctggtactttttgttgtgcagagactagaaccaagatttcctcaggcatcaaaaacaagtattggtcatgttgtgcaactactgtatcgagcttcttgttttaaggttaccaaaagagatgaagactcttccctaatgcagctgaaggaggaatttcggagttatgaagcattacgcagagaacatgatgcccaaattgttcatattgcccatggaagcaggactccgtatttcaccntgaacagtggncctctcttttgnatggngattnggct

SEQ ID NO: 219210 - DNA, 867 bp, Homo Sapiens
  misc_feature (796)..(796): n is a, c, g, or t
  misc_feature (837)..(837): n is a, c, g, or t
  misc_feature (855)..(855): n is a, c, g, or t
  misc_feature (863)..(863): n is a, c, g, or t
aaggatgccaaatctgtcaagatcaagaaaaataaggacaacgtgaagtttaaagttcgatgcagcagatacctttacaccctggtcatcactgacaaagagaaggcagagaaactgaagcagtccctgccccccggtttggcagtgaaggaactgaaatgaaccagacacactgattggaactgtattatattaaaatactaaaaatcctaagtgtctttcgtctttgcggatgggaaagggaaaaatgctacctcgtagtggcttctgatgggaacaggacgcgggttctgttgctgccttcctgtgtctttttttttttttttttctttctttgagacggagtcttgctctgtggctcatcctggagcacagtggtgcgatatcagctcactaccacctccgcctcctgggttcaagcgactgtcctgcctcagcctcccgagtggctgggattacaggcacacatcaccacgcctggccaatttttgtatttgtagtagagacagggtttcactgcctgcctcagcctcccatagtgctgggattacaggcatgagcctccgtgcccggtgcatccctaatcttgagcatgatctcagtcggcaaatgaggccatctgttttcagcctgtttgaaaataagatgtggggaggccatgatggaaatagcacgtggggttaaacataactggcagatgtgggagcgatggtggggcatgccattcaaacaggtcccaaaatgggtgcaacaaggtatagcacatctaccactcgctaacttgactgacttgganaaatgactacacttttgcctgtttcctcagttggaaaatanccatattaacacctcttncttggctngctg

SEQ ID NO: 219211 - DNA, 620 bp, Homo Sapiens
cactccttcccctgctctgcccagcctttccctcccacccactcctccttctgcaaatgccctgaaggccagcccttaccccaacacccacttccccacctccttaggccccagatacatacatgcccacatgcacgcttacatgtttagagccatccttgtttccaaatatgacccttcgcttgagggcaactgcataggtacatctaactctggactggcatgcacattgtcatgtgcagctttgcatatacacacatgcatacatgagcctccacacaagcacttgcacacatgtggactcctaaccatgctaacctcactggctgggaaggtggggaccccatgggccagcccttgcaggaggcccttttgcaaggcttagggtgtggccagccctgaaagctacttggacacaggtttcagctggccccagcccagaagtgacccccagaaagggagggccaccgctttgccccctgcttttacccttccttctgggtgctctacacctcaggttaccaggcctgaggcatctcagccaagcttgtttcctgctctgaggcttgtggggtgggagccagagtggaggtcggtgaaataaagtgatgcaattagaa

SEQ ID NO: 219212 - DNA, 819 bp, Homo Sapiens
  misc_feature (729)..(729): n is a, c, g, or t
tccgcctcggcgtccaacctggacctgggcgagcagcgggagcgctgggagacgttccagaagcggcagaagcttacctccgagggtgccgccaagctcctgctagacacctttgaataccagggcctggtgaagcacacaggaggctgccactgtggagcagttcgttttgaagtttgggcctcagcagacttgcatatatttgactgcaattgcagcatttgcaagaagaagcagaatagacacttcattgttccagcttctcgcttcaagctcctgaagggagctgagcacataacgacttacacgttcaatactcacaaagcccagcataccttctgtaagagatgtggcgttcagagcttctatactccacgatcaaaccccggaggcttcggaattgccccccactgcctggatgagggcactgtgcggagtatggtcactgaggaattcaatggcagcgattgggagaaggccatgaaagagcacaagaccatcaagaacatgtctaaagagtgagcttctgcctctcctgccctgaaaaggaggaatgattggggccagcaactttgctctccctgccgtgcctcggtggtgctcctgaatgtggctgacctgggctgctggttccgttgactagggtcatcttgatctctgcagtttgctccagctaccagtttctttaggcagctctttgtcctccctctgcccagaattttgatgtantctaattgacatccttctcttcccaacttttgtgtgatcttttaggaaaaaaaataaatatttttacattaaagcaaaaaaaaaaaaaaa

SEQ ID NO: 219213 - DNA, 759 bp, Homo Sapiens
  misc_feature (660)..(660): n is a, c, g, or t
  misc_feature (738)..(738): n is a, c, g, or t
  misc_feature (757)..(757): n is a, c, g, or t
tctttacccagttctccagcctgggcgacagagcaagactcttgtctcaaaaaaaaaaaaaaaaaaaaaaaaaaggaaacaaaaagttttgatatgtgacattttacaaatcagtattttttgtcgttgcagtggatgaggatcgcagtacggaacctgaccgattgcaggtgtttcacaagagagccatcatgccttacggtgtttataagaaacagcagaaagacccaagtgaggaggctgctgttctgcagtacgccagcctggtggggcagaagtgctccgagcggatgctgctgttcagaaactgacctgttcacctctgccgggaagttcctgtgttgtgctgatgatttgtgccaggatacatattcagtacctgtggggaaataactgtcaccacccacaaattagacattttttattttgactatctatggcttttaaaaaatattttgtggcaatgtatctgtgagaatctcatagttaatataaagattttaaaactgcattatgacctagcccccataattgggatttatcattttggaggattctttctagagcaagatatgctcaaattctcctgtttgtattttgtaaaatgaagaagtgaatctaagtaacttaatcacagttgtgcattttttttggttctgntaaagaaattaaaacagactgtttcctcaggcccattttaaactgaacttatgctaggaaaccttaagtatggggaanggaaaaaagttcatttccntc

SEQ ID NO: 219214 - DNA, 860 bp, Homo Sapiens
  misc_feature (856)..(856): n is a, c, g, or t
cctggcgcggggggcgggcaccggggcccggtcggacatgggcaagaagcacaagaagcacaagtcggacaaacacctctacgaggagtatgtagagaagcccttgaagctggtcctcaaagtaggagggaacgaagtcaccgaactctccacgggcagctcggggcacgactccagcctcttcgaagacaaaaacgatcatgacaaacacaaggacagaaagcggaaaaagagaaagaaaggagagaagcagattccaggggaagaaaaggggagaaaacggagaagagttaaggaggataaaaagaagcgagatcgagaccgggtggagaatgaggcagaaaaagatctccagtgtcacgcccctgtgagattagacttgcctcctgagaagcctctcacaagctctttagccaaacaagaagaagtagaacagacaccccttcaagaagctttgaatcaactgatgagacaattgcagagaaaagatccaagtgctttcttttcatttcctgtgactgattttattgctcctggctactccatgatcattaaacacccaatggattttagtaccatgaaagaaaagatcaagaacaatgactatcagtccatagaagaactaaaggataacttcaaactaatgtgtactaatgccatgatttacaataaaccagagaccatttattataaagctgcaaagaagctgttgcactcaggaatgaaaattcttagccaggaaagaattcagagcctgaagcagagcatagacttcatggctgacttgcagaaaactcgaaagcagaaagatggaacagacacctcacagagtggggaggacggaggctgctggcanaaaa

SEQ ID NO: 219215 - DNA, 640 bp, Homo Sapiens
  misc_feature (576)..(576): n is a, c, g, or t
  misc_feature (595)..(595): n is a, c, g, or t
  misc_feature (604)..(604): n is a, c, g, or t
  misc_feature (608)..(608): n is a, c, g, or t
  misc_feature (614)..(614): n is a, c, g, or t
  misc_feature (617)..(617): n is a, c, g, or t
  misc_feature (620)..(620): n is a, c, g, or t
  misc_feature (627)..(627): n is a, c, g, or t
  misc_feature (635)..(636): n is a, c, g, or t
caggaagcaaaagcagagatttcaggagtggttcaccctggtcaacaagaagaacgctctcatccggaggcaggaccagctgcagctgctgtgagtgctggccccgggccaggagagcagagggactcttagctactttggttagagttcttcactactttcttattcctacagagatctttttgacaaacgattcctcttccatcttactgtttttgtcctaaacaaattgctgtttaaagtgtaaaactggccaggcacggtgtctcatgcctgtaatcccagcacctggggaggccgaggcaggcggatcatctgaggtcaggagttcaagaccagccaacatggtgaaaccccatctctactaaaaatacaaaaattagccaagtatggtggcacgcgcctgtaatcccagcaacttggaaggctgaggcaggagaatcgcttgaacctgggaggcagaggttgcagtgagccaagatcagaccattacactctagtctgggcaaaagagtgagactctgtctcaaaaaataaaaattaaaacaaaaattaagggtaaaactcttaaattanaactatttttactaataanaaaaccggncggncgcggnggntcncgcctgnaatcccannactt

SEQ ID NO: 219216 - DNA, 629 bp, Homo Sapiens
tcagctccagctgcactgctcagacgagatctccagtctatgtgctgaagaagcagcagcccaagagcagacaggtcaggtggaggagtgcctcaaggtcaacctgctcaagatcaaaacagaattgtgtaaaaaggaagtgctaaacatgctgaaggaaagcaaagcagacatctttgttgacccggtacttcatactgcttgtgccctggacattaaacaccactgcgcagccatcacccctggccgcgggcgtcaaatgtcctgtctcatggaagcactggaggataagcgggtgaggttacagcccgagtgcaaaaagcgcctcaatgaccggattgagatgtggagttacgcagcaaaggtggccccagcagatggcttctctgatcttgccatgcaagtaatgacgtctccatctaagaactacattctctctgtgatcagtgggagcatctgtatattgttcctgattggcctgatgtgtggacggatcaccaagcgagtgacacgagagctcaaggacaggtagagccaccttgaccaccaaaggaactacctatccagtgcccagtttgtacagccctcttgtatagcatccccactcacctcgctcttctcagaagtga

SEQ ID NO: 219217 - DNA, 382 bp, Homo Sapiens
agagaacggagcggacgccatggcgaccaacatcgagcagatttttaggtctttcgtggtcagtaaattccgggaaattcaacaggagctttccagtggaaggaatgaaggccagctgaatggtgaaacaaatacacccattgaaggaaaccaggcgggtgatgcagctgcctctgccaggagtctaccaaatgaagaaatagtgcagaagatagaggaagtactttctggggtcttagatacagaactacgatataagccagacttgaaagagggctccagaaaaagtagatgcgtatctgtacaaacagatcctactgatgaaattcccactaaaaagtcaaagaagcataaaaagcacaaaaacaaaaaaaaaaaaaaa

SEQ ID NO: 219218 - DNA, 894 bp, Homo Sapiens
  misc_feature (886)..(886): n is a, c, g, or t
catgaccaaaggaacccctccctggtgtctgatcagggctgtggcatcacgaaacattggatcatgacatgtcgggcgatgcttggaagagcccagcatgtatgtatgcacacattgtgtgtgtgggaaggacaaagccactctcacaagaaagggcaccaggactgctctccaaggaactggacctgtccagacagttacactccaaggtcattggagagaacttctgtatgggcaagcctgagagggagaggaaacaaaagctgtgtcctggcagaaggtctgggtttgcagatgggtgccctgaatggaactactttaactaatccatagggacttctggtatgctttcctctctttttaaaggaacttcgtgacactaaacattagcccaaaggacttcttagccttcaattgggagatacctttggtctgctcctgcaccaaagccatatgggtggaagtcagttggcctccctggttctgcagagggccagaagaatgagagagaggaagactgctggcagggaaatcgaggaggcgagactagaactgcaccagcttccctgatgtctgcagccatggctttgcagcgcagacagagcttctctgggatgctgggattcttgcctgtatgaatgcatcaagtattcatttattgcccgaataggcattgcattaagtcctctgtaaggtgtcaggcaagccaaaaaaaaaaaaaaagatgcgtaagtcctaacccccaacagaggtgttcacagtgtagacagggaaaaaatgtataaacaaatgtgtaaaaagaaatcagctcatggcttaggatggaattagagacaggtgagggacactcaggagctcattttccagctgctcttcaaagtggaanggctggct

SEQ ID NO: 219219 - DNA, 682 bp, Homo Sapiens
  misc_feature (88)..(88): n is a, c, g, or t
tccgatgagaactgtcaggagggaaggtcagaagtcccaggatgcacttgaaaagcctctagctccaccagtgaccagctcctggctnggactcctggtctggactcagcatcagggaggctctggcctctcgccctcagggctgggggcttcttcacatggtcatcaaagacttggccagttccgcctctcccacggccgtccttgtctcacccagcatcacgacgcatcagttcaccaacaaacacgattcagtgctgctagtgctgggtcctgttctgggggctggtgatgaggccaagagggaaagagggagctctgtgttccatcgagggggcgacaagcctggaccagatgaaagtgactcatgttgttaattagcggcttagggccaaaggtggcccctggaccagtggcctcagcatcacctgggaaaaggttagaaatgaacattcccaggccccacctcagcctcctgaatcagagcatccctttggcaaaccatactgagaaacaaccacgtgcatcaccaagcgctgtgaagaaggcaagctttgagaccttgaaggaatcatcaaactctgggcctcggtgtgctcacccagggcgagacaaagacgccatgctcctccaagtggcctccaagattaaatgagcaatgacttttaaaaaaaaaaaaaaa

SEQ ID NO: 219220 - DNA, 865 bp, Homo Sapiens
  misc_feature (847)..(847): n is a, c, g, or t
ggccgagggcccaaaggggacaaggcctctgatccggaagcaggtgtggcccggggcatagacttccaccatgtgtctgctgtgctcaactttgatcttcccccaacccctgaggcctacatccatcgagctggcaggacagcacgcgctaacaacccaggcatagtcttaacctttgtgcttcccacggagcagttccacttaggcaagattgaggagcttctcagtggagagaacaggggccccattctgctcccctaccagttccggatggaggagatcgagggcttccgctatcgctgcagggatgccatgcgctcagtgactaagcaggccattcgggaggcaagattgaaggagatcaaggaagagcttctgcattctgagaagcttaagacatactttgaagacaaccctagggacctccagctgctgcggcatgacctacctttgcaccccgcagtggtgaagccccacctgggccatgttcctgactacctggttcctcctgctctccgtggcctggtacgccctcacaagaagcggaagaagctgtcttcctcttgtaggaaggccaagagagcaaagtcccagaacccactgcgcagcttcaagcacaaaggaaagaaattcagacccacagccaagccctcctgaggttgttgggcctctctggagctgagcacattgtggagcacaggcttacacccttcgtggacaggcgaggctctggtgcttactgcacagcctgaacagacagttctggggccggcagtgctgggccctttagctccttggcacttccaagctggcatcttgccccttgacaacagaataaaaattttanctgccccaaaaaaaaaaa

SEQ ID NO: 219221 - DNA, 748 bp, Homo Sapiens
  misc_feature (706)..(706): n is a, c, g, or t
  misc_feature (708)..(708): n is a, c, g, or t
  misc_feature (715)..(715): n is a, c, g, or t
  misc_feature (719)..(719): n is a, c, g, or t
  misc_feature (737)..(737): n is a, c, g, or t
  misc_feature (739)..(739): n is a, c, g, or t
  misc_feature (744)..(744): n is a, c, g, or t
  misc_feature (746)..(746): n is a, c, g, or t
cttctccacatggaaagctaccactctggatgggctccccaaccagctgacaccctcggagccccacctgtgcctgctggatgttggctacctcatcaataccagctgcctgcccctcctgcagcccactcgggacgtggacctcatcctgtcattggactacaacctccacggagccttccagcagttgcagctcctgggccggttctgccaggagcaggggatcccgttcccacccatctcgcccagccccgaagagcagctccagcctcgggagtgccacaccttctccgaccccacctgccccggagcccctgcggtgctgcactttcctctggtcagcgactccttccgggagtactcggcccctggggtccggcggacacccgaggaggcggcagctggggaggtgaacctgtcttcatcggactctccctaccactacacgaaggtgacctacagccaggaggacgtggacaagctgctgcacctgacacattacaatgtctgcaacaaccaggagcagctgctggaggctctgcgccaggcagtgcagcggaggcggcagcgcaggccccactgatggccggggcccctgccacccctaactctcattcattccctggctgctgagttgcaggtgggaactgtcatcacgcagtgcttcagagcctcgggctcaggtggcactggtctcagggtccangntgagggntggnagctcccttgcgcctcanantttgnantg

SEQ ID NO: 219222 - DNA, 723 bp, Homo Sapiens
ggaggaagccgcctacatccaagagatcaccacggcagatggccagaccgtacagcacctggtgacctccgacaaccaggtgcagtatatcatctcccaggatggtgtccagcacctgctcccccaggaatatgttgtggtccctgaaggccatcacatccaggtacaggagggccagatcacacacatccagtatgaacaaggagccccgttccttcaggagtcccagatccagtatgtgcctgtgtccccaggccagcagcttgtcacacaggctcaacttgaggctgcagcacactcagctgtcacagcagtggctgatgctgccatggcccaagcccagggcctgtttggtacagacgagacagtgcccgaacacattcaacagctgcagcaccagggcatcgagtacgacgtcatcaccctggccgatgactgagccccgagggcccaacacagatcatggatttgcggccagctctcctgggggtagggggccaccaggactcacctccctcttcatttaggatctccagatactggatagccagcatcctctcattcccagggagccagacctgtgctgttggggttaggggcagccatgggccccagccaggacatgctgggtgccccagcctgcaggcaggctttgggagagaaatttatttttgtttgggtggacccactggcctgtcagtctcaataaagggaccgggagtc

SEQ ID NO: 219223 - DNA, 765 bp, Homo Sapiens
  misc_feature (739)..(739): n is a, c, g, or t
  misc_feature (742)..(742): n is a, c, g, or t
  misc_feature (745)..(745): n is a, c, g, or t
  misc_feature (753)..(753): n is a, c, g, or t
  misc_feature (757)..(757): n is a, c, g, or t
gcaaggccactcagaggcccccgtactgcgatggcacccacaggagtgagcgcgtgcagaaggcagaagtgggctccccactctgagggggctgctgctgtccagccacaggtggccttggctccaggcctctgacaggcacccccttctgtgggaaaggaaacaggtgctgagcccaagagactctggtacccactgctggctcatgaaggaagaattattccttataacctaaaagtctccagtctggggcaggcgggagtgggccctggttcaatgtttgctgatggggaagatggcaaaaacaagcctgcccaaccagactggtagtcctgcagtcactgctatgaggcccacgtgctgcctcctgctccagattttaacctctctgtgggctgggggcacctgaccagccacaggagagggcagttcagattcattctgtatggggtccccaagccaggctaaacccagagatgagaggcacccttcccttcttccctccaccccaaagaactacaggctccagaaagtatgcagcatttattacaaagccaagagatacagatgtcccagggcaaaggagggtacagtcacaggacctcagacacaggacaaggtgcaaacacagacaagcccatcagggggctcccaaccccacacacctacgctatgatggaatctcgagtctcgactcccgactcctctcagatctatgcacacttgaggaaatctcggnggncancgacctgnccanggtctgtc

SEQ ID NO: 219224 - DNA, 704 bp, Homo Sapiens
gcaaccgccacctgttcacagccaacaatgggcaaacggtaaccattcctgtgcaaggtattgccaatgaaaatggagggataacattcttccctgtccaagtcaatgttggggggcaggcacaagctgtgacaggctccatccagcccctcagtgctcaggccctggctggaagtctgagctctcaacaggtgacaggaacaactttgcaagtccctggtcaagtggccattcaacagatttccccaggtggccaacagcagaagcaaggccagtctgtaaccagcagtagtaatagacccaggaagaccagctctttatcgcttttctttagaaaggtataccatttagcagctgtccgccttcgggatctctgtgccaaactagatatttcagatgaactgaggaaaaaaatctggacctgctttgaattctccataattcagtgtcctgaacttatgatggacagacatctggaccagttattaatgtgtgccatttatgtgatggcaaaggtcacaaaagaagataagtccttccagaacattatgcgttgttataggactcagccgcaggcccggagccaggtgtatagaagtgttttgataaaagggaaaagaaaaagaagaaattctggcagcagtgatagcagaagccatcagaattctcccacagaactaaaccaagatagaaccagtagagac

SEQ ID NO: 219225 - DNA, 893 bp, Homo Sapiens
cttgaggatcagtgcattactgcctcagacactccagttgtcctcgtcagcgttggagctgacctgcccgtctctgccttagacccaagtcagcttctttgggctgaagagccgacgaacagaaccactctctactcaggcactggcttaagtgttaacagagaaaatgcaaaatgtttcacaaccaaagaggagctggggaagacagtgcctcagctactgactcctgggctgatgggcgaatcttcagaatcctttagtgcctcagaagatgaaggccacagggaataccaagccaatgactctgactcggacgggcctatcttgtacaccgatgatgaggacgaagacgaagatgaggatggcagtggagaaagtgctttggcaagtaaaatacgccggagggatactcttgctatcaaacttggcaacagaccatctaagaaagaactagaggacaaaaacatcttgcagcgtacatctgaagaagagaggcaggaaatccgacaacaaattggaaccaagttagtcaggaggctgagccagaggcccacaactgaagaattagagcaaagaaacatcctaaaacaaaagaatgaagaagaggaacaagaagcaaaaatggaacttaaacgcagactcagcagaaagctcagcctgagacccacagtggcagagctacaagctcgaaggatcctgcgatttaacgagtatgtagaagtcacggattctcctgactatgaccgccgagcagacaagccctgggccaggttaacacctgcagacaaggcagcaataaggaaagaactaaatgaatttaaaagcacagaaatggaagttcatgaagagagtcgacagtttacaaggtttcatcgtccataacgaagagtgag

SEQ ID NO: 219226 - DNA, 835 bp, Homo Sapiens
  misc_feature (762)..(762): n is a, c, g, or t
  misc_feature (793)..(793): n is a, c, g, or t
  misc_feature (800)..(802): n is a, c, g, or t
  misc_feature (806)..(806): n is a, c, g, or t
  misc_feature (810)..(810): n is a, c, g, or t
  misc_feature (817)..(817): n is a, c, g, or t
  misc_feature (833)..(834): n is a, c, g, or t
gaaaagatggaggtgttgggttatcacaaggcatcgagtctcctgcattcagtggacatgtgggggaagggctgccgatggcgcatgacacactcgggactcacctctggggccatcagacagccgtttccgccccgatccacgtaccagctgctgaagggcaactgcaggccgatgctctcatcagccaggcagcagccaaaatctgcgatcaccagccaggggcagccgtctgggaaggagcaagcaaagtgaccatttctcctcccctccttccctctgagaggccctcctatgtccctactaaagccaccagcaagacatagctgacaggggctaatggctcagtgttggcccaggaggtcagcaaggcctgagagctgatcagaagggcctgctgtgcgaacacggaaatgcctccagtaagtacaggctgcaaaatccccaggcaaaggactgtgtggctcaatttaaatcatgttctagtaattggagctgtccccaagaccaaaggagctagagcttggttcaaatgatctccaagggcccttataccccaggagactttgatttgaatttgaaaccccaaatccaaacctaagaaccaggtgcattaagaatcagttattgccgggtgtggtggcctgtaatgccaacattttgggaggccgaggcgggtagatcacctgaggtcaggagttcaagaccagcctggccaacatggtgaaacccctgtctctactaaaaatacaaaaaaactanccaggcatggtggtgtgtgcctgtatcccanctactcnnnaggntganacagganaattacttgaacctgnna

SEQ ID NO: 219227 - DNA, 856 bp, Homo Sapiens
  misc_feature (801)..(801): n is a, c, g, or t
gaagctattcagttggatggattaaatgcatcacaaataagagaacttagagagaagtcggaaaagtttgccttccaagccgaagttaacagaatgatgaaacttatcatcaattcattgtataaaaataaagagattttcctgagagaactgatttcaaatgcttctgatgctttagataagataaggctaatatcactgactgatgaaaatgctctttctggaaatgaggaactaacagtcaaaattaagtgtgataaggagaagaacctgctgcatgtcacagacaccggtgtaggaatgaccagagaagagttggttaaaaaccttggtaccatagccaaatctgggacaagcgagtttttaaacaaaatgactgaagcacaggaagatggccagtcaacttctgaattgattggccagtttggtgtcggtttctattccgccttccttgtagcagataaggttattgtcacttcaaaacacaacaacgatacccagcacatctgggagtctgactccaatgaattttctgtaattgctgacccaagaggaaacactctaggacggggaacgacaattacccttgtcttaaaagaagaagcatctgattaccttgaattggatacaattaaaaatctcgtcaaaaaatattcacagttcataaactttcctatttatgtatggagcagcaagactgaaactgttgaggagcccatggaggaagaagaagcagcccaagaagagaaagaagaatctgatgatgaagctgcagtagaggaagaagaagaagaaaagaanccaagactaaaaagttgaaaaactgtctgggactgggaacttatgaatgatatca

SEQ ID NO: 219228 - DNA, 626 bp, Homo Sapiens
  misc_feature (576)..(576): n is a, c, g, or t
  misc_feature (582)..(582): n is a, c, g, or t
  misc_feature (605)..(605): n is a, c, g, or t
  misc_feature (622)..(622): n is a, c, g, or t
cgccgccgcccgagcgcacccttcagcccgcgcgccggccgtgagtcctcggtgctcgcccgccggccagacaaacagcccgcccgaccccgtcccgaccctggccgccccgagcggagcctggagcaaaatgatgcttcaacacccaggccaggtctctgcctcggaagtgagtgcttctgccatcgtcccctgcctgtcccctcctgggtcactggtgtttgaggattttgctaacctgacgccctttgtcaaggaagagctgaggtttgccatccagaacaagcacctctgccaccggatgtcctctgcgctggaatcagtcactgtcagcgacagacccctcggggtgtccatcacaaaagccgaggtagcccctgaagaagatgaaaggaaaaagaggcgacgagaaagaaataagattgcagctgcaaagtgccgaaacaagaagaaggagaagacggagtgcctgcagaaagagtcggagaagctggaaagtgtgaattgctgaactgaaggctcagattgaggagctcaagaacgagaagcagcatttgatatacatgctcaaccttnatcggnccacgtgtattgtccgggctcanaatgggaaggactccanaaga

SEQ ID NO: 219229 - DNA, 723 bp, Homo Sapiens
  misc_feature (638)..(638): n is a, c, g, or t
  misc_feature (651)..(652): n is a, c, g, or t
  misc_feature (663)..(664): n is a, c, g, or t
  misc_feature (671)..(671): n is a, c, g, or t
  misc_feature (676)..(676): n is a, c, g, or t
  misc_feature (684)..(684): n is a, c, g, or t
  misc_feature (686)..(686): n is a, c, g, or t
  misc_feature (695)..(695): n is a, c, g, or t
  misc_feature (697)..(697): n is a, c, g, or t
  misc_feature (702)..(702): n is a, c, g, or t
  misc_feature (705)..(705): n is a, c, g, or t
  misc_feature (709)..(710): n is a, c, g, or t
  misc_feature (712)..(712): n is a, c, g, or t
  misc_feature (719)..(719): n is a, c, g, or t
cccgggtctggcgctgtgggccgggagccgtggggcggcatggaggggctggttgtcgccgccggcggggacgtctccctgcacaacttcagcgcgaggctgtgggagcagctggtccacttccacgtcatgcggctgacggactcgctgttcctgtgggtgggggccacgccgcacctgcgcaacctcgccgtggccatgtgcagccgctacgactccatccccgtgtctacctccctccttggagacacttccgacacgacctctactggccttgcccagcgcctagccaggaagaccaacaaacaggtgtttgtcagctataaccttcagaacacagacagtaacttcgcattacttgtagaaaacaggatcaaggaagagatggaggctttccccgaaaagttctagctgagtggcagaagtgagaatttgtaaacttatgtacaatgtacgtgtaaataaatggattgaatttcagtttgtcatcaggccgcgctcccgttttgtttttaaggggttaatcttttgagcttccttctcagcagtgtgtgggccaaaaggctcatactgacccacctggtgaaggagaggcaaagtgggcagtatatacttcctcatttggctgtgagtgatanagggatgaaatgnnatttttgttgnnattgaanactgnaatctaanantttcatcananatgantgnaacnngnatcctcnatta

SEQ ID NO: 219230 - DNA, 756 bp, Homo Sapiens
  misc_feature (731)..(731): n is a, c, g, or t
aaattctacaaatgtgaagaatgtggcaaaggctttaattggtcctcgacccttactaaacataaaagaattcatactggagagaaaccctacaaatgtgaacaatgtggcaaagcttttaatgagtcctcaaaccttactgcacataagataattcatactggagagaaaccctacaaatgtgaagaatgtggcaaagcctttaaccggtccccaaaacttactgcacataaggtaattcattctggagagaaaccctacaaatgtgaagaatgtggcaaagcttttaaccaattctcaaaccttactaaacataagataactcatattggagatacatcttacaaatacctagaatgtgataaagcctttagccagtcttcaactcttactaaacataaggtaattcatactggagagaaaccctacaactgtgaagaatacggcaaagctttcaaccagtcctcaaaccttattgaacaaagtaattcatactggagagaaaccctacaaatgtgaagattgtggcaaagcctctaacccgtcctgaattcttactaaacataagaacattcatactgaagaggaaccctatgagtgtgaagaatatggcaaagccttcaacaagtcctcaattcttaccagacataagataattctggctgggtgcggtggctcacacctgtaatcccagcactttgggaggctgagacgggtgaattacatgaggntgggagttcgagaccagcctgacca

SEQ ID NO: 219231 - DNA, 823 bp, Homo Sapiens
  misc_feature (754)..(754): n is a, c, g, or t
  misc_feature (756)..(756): n is a, c, g, or t
  misc_feature (775)..(775): n is a, c, g, or t
  misc_feature (803)..(803): n is a, c, g, or t
  misc_feature (809)..(809): n is a, c, g, or t
gcagggtcccgcatggcggcgcacaggaagcacgtgtttgtggagaaggtgctgcagagactttttcctcctgttccaagtggccaaggaaagagggaaccccagacgctggccgtccaaaatccaccaaagaaagtgacctctgagaaagtgagccagaaacatgctgagcctttgacagacactggctctgagaccccgactgcccgacggctctacactgccagcgggcctcctgagggctacgtcccctgttggccggagcccagcagctgtgggagccccgagaacgcctccagcggggatgacacagaagatcaggatcctcatgaccagccaaagagaagaagaattaggaagcataaatcaaagaaaaaatttaaaaatcccaataatgttcttatagaacaagcagaattagagaaacagcagagtctgttacaggagaaatctcagcgacagcacacagatggcaccacaataagcaaaaataaaaaaaggaaactgaaaaagaaacagcaaattaaaaggaagaaagcagccggcttggcagcaaaggctgctggtgtcagtttcatgtaccagcccgaggacagcagcaatgaaggggaaggcgtgggagaggcttgtgaggaggatggtgtggacaccagcgaggaagacccgacactggccggggaggaagacgttaaagataccagggagggaagatggtgcggacgctagcgaggaagacctgacacgggccaggcangnaaaagggtgcggacgctantgaggaagatccgacaccggccgggggnaggaanacgttaaagacgcc

SEQ ID NO: 219232 - DNA, 714 bp, Homo Sapiens
  misc_feature (598)..(598): n is a, c, g, or t
  misc_feature (606)..(606): n is a, c, g, or t
  misc_feature (613)..(613): n is a, c, g, or t
  misc_feature (619)..(619): n is a, c, g, or t
  misc_feature (622)..(622): n is a, c, g, or t
  misc_feature (631)..(631): n is a, c, g, or t
  misc_feature (637)..(638): n is a, c, g, or t
  misc_feature (658)..(659): n is a, c, g, or t
  misc_feature (661)..(661): n is a, c, g, or t
  misc_feature (682)..(682): n is a, c, g, or t
  misc_feature (684)..(684): n is a, c, g, or t
  misc_feature (687)..(687): n is a, c, g, or t
  misc_feature (689)..(689): n is a, c, g, or t
  misc_feature (701)..(702): n is a, c, g, or t
  misc_feature (705)..(705): n is a, c, g, or t
  misc_feature (709)..(709): n is a, c, g, or t
gcagcctcccccttgagccccctcgcttcccgacgttccgttcccccctgcccgccttctcccgccaccgccgccgccgccttccgcaggccgtttccaccgaggaaaaggaatcgtatcgtatgtccgctatccagaacctccactctttcgacccctttgctgatgcaagtaagggtgatgacctgcttcctgctggcactgaggattatatccatataagaattcaacagagaaacggcaggaagacccttactactgtccaagggatcgctgatgattacgataaaaagaaactagtgaaggcgtttaagaaagtaggtcttcagtgagattttgggaaagtcataatggatttgtccacaagggggtgccagctgtgttgtatgtattgttagcggaaggggtgataaatgcgttcatgctcttgctaggcctaattcgttttcctttgtgcttgcagaagtttgcctgcaatggtactgtaattgagcatccggaaaatggagaagtaattcagctacagggtgaccaacgcaagaacatatgccagttcctcggtagagattggactggctaaggacgatcagctgaaggntcatgggntttaagngcttgnggntcactgaancttaanngaggatttccttgcaatgannanaatttcccttctctcccttgncncangnttaaaaacctcnnagnttgnataat

SEQ ID NO: 219233 - DNA, 619 bp, Homo Sapiens
ggcgtcgccgcagccgatcccggagtcggagccgttccaggtctcgcagccgatctcgctacagccgctcgaagtctcggtcccgcactcgttctcgatctcggtcgacctccaagtccagatccgcacgaaggtccaagtccaagtcctcgtcggtctccagatctcgttcgcggtccaggtcccggtctcggtccaggagtcctcccccagtgtccaagagggaatccaaatccaggtcgcgatcgaagagtccccccaagtctcctgaagaggaaggagcggtgtcctcttaagaaaatgatgtatcggcaagcagtgtaaacggaggacttggggaaaaaggaccacatagtccatcgaagaagagtccttggaacaagcaactggctattgaaaaggttattttgtaacatttgtctaactttttacttgtttaagctttgcctcagttggcaaacttcattttatgtgccattttgttgctgttattcaaatttcttgtaatttagtgaggtgaacgacttcagatttcattattggatttggatatttgaggtaaaatttcattttgttatatagtgctgactttttttgtttgaaattaaacagattggta

SEQ ID NO: 219234 - DNA, 925 bp, Homo Sapiens
  misc_feature (801)..(801): n is a, c, g, or t
  misc_feature (825)..(825): n is a, c, g, or t
  misc_feature (843)..(843): n is a, c, g, or t
  misc_feature (869)..(869): n is a, c, g, or t
  misc_feature (891)..(891): n is a, c, g, or t
  misc_feature (894)..(894): n is a, c, g, or t
aacgtgtgcagccattacacacagcctaacgctgtcaagacattgcttcaacattgccttcattccttaaaaacctacaaaaggtggtgtaaattaatatggataattttatttacctccaggtctaaaaggtagtgtgacccaaatttgtataaagatttttcatgtgaaaggactggggttttagcaaacacaggtctaatctcttttgtgtttttgtgcaccaggcccggctgcgtagcagttgagtgatgctggttagctattaaggtggcctgttgcagtgcagagtgctgagctgcttcctgttttcttctgattgctcctggggaaaacacgccttgtcctgaagaacaaatggctgtccagtttattaaaatgcctgtcaactgcacttccagtcacccaggccttgcagataaataatggagcatgcagtgagcacatctagctgacgataatcacaccttttcccccgtcttttctgaaaaattgtaaatctgatcatatcaacatgtatgaacttaaaatatggagaatgttatggaagaaatagtttataagtttgttaagtacttataacatggtttatctttttgattattaattttttacgctaaccattgtttctgtagttaaaattgttttcttggtgttatcttttctcagaataaaattagaaacttttgatggaaagtaggttgttttattttctgtatgacttttggatatttgtacttttgagaaaattattagcaccaagtgtttctctaaatataatttttaaaaaatccttaatangcttttagctatgtgctttattgntttatcacaatgcagttnatttgtagtttctctctttttcctcnaccctatggttttttacttccnaanttattttcaataatccattttgggcttcatc

SEQ ID NO: 219235 - DNA, 724 bp, Homo Sapiens
  misc_feature (684)..(684): n is a, c, g, or t
  misc_feature (714)..(714): n is a, c, g, or t
  misc_feature (717)..(717): n is a, c, g, or t
  misc_feature (720)..(721): n is a, c, g, or t
caaggggcgggtgtagcaggcaatcttggcgaaactgggaagggcgggcaggagggcagggaagccgctcacccaggcacaaagcgcctcccgcttgagcggactccaaagggacggtccgcggtgtgcagcgagctgcgctcaggggaccttgcgcccggcccttctgctgcacacagcccacccaggacctcccgcagcgctgacaggcggggcgggtgcaaagacggggcggggtctctgcgcccggccccctcccctgactatcaaagcagcggccggctgttggggtccaccacgccttccacctgccccactgcttcttcgcttctctcttggaaagtccagtctctcctcggcttgcaatggaccccaactgctcctgcgccgctggtgtctcctgcacctgcgctggttcctgcaagtgcaaagagtgcaaatgcacctcctgcaagaagagctgctgctcctgctgccccgtgggctgtagcaagtgtgcccagggctgtgtttgcaaaggggcgtcagagaagtgcagctgctgcgactgatgccaggacaacctttctcccagatgtaaacagagagacatgtacaaacctggattttttttttataccaccttgacccatttgctacattccttttcctgtgaaatatgtgagtgataattaaacactttanacctgaaaaaaaaaaaaaaaaaaaaagggnggncgnnatc

SEQ ID NO: 219236 - DNA, 775 bp, Homo Sapiens
  misc_feature (744)..(744): n is a, c, g, or t
  misc_feature (770)..(770): n is a, c, g, or t
  misc_feature (774)..(774): n is a, c, g, or t
attgtgggaagcagccatggtctaagccgggcgcctcacctgtcagccgcaccggctccagcgctcgcctctcgccctcgcttctccagcgctccttgctcgcaaggcgggggaggcggcggcccagccacgatgatacatttcatattgctcttcagtcgacaagggaaattacggctacagaaatggtacatcactctccctgataaagagaggaagaagatcacccgggaaattgttcagattattctctcccgtggtcacaggacaagcagttttgttgactggaaggagctaaaacttgtttataaaaggtatgctagtttatatttttgctgtgcaatagaaaatcaggacaatgagctcttgacgctagagattgtgcatcgttacgtggagctgctggacaaatattttggaaatgtctgtgagctggatattatctttaattttgaaaaggcttatttcatcctggacgagtttataataggtggggaaattcaggaaacatccaagaaaattgctgtcaaagccattgaagactctgatatgttacaggagacaatggaagaatacatgaacaagcctacattttaactggaaatctacttgaagactccagcactacatgttatgaagctgtaaataagcaacgcctcccatccggttttttgatggagcctcaggcaccatgccaaaaataatttaaagggattctttgttaactaacaaagttaaagttgnttaacatatttataattactatgtgnctgna

SEQ ID NO: 219237 - DNA, 658 bp, Homo Sapiens
cgcgccgcgccggagtccgctgtccgccagctacccgcttcctgccgcccgccgctgccatgctgcccgccgcgctgctccgccgcccgggacttggccgcctcgtccgccacgcccgtgcctatgccgaggccgccgccgccccggctgccgcctctggccccaaccagatgtccttcaccttcgcctctcccacgcaggtgttcttcaacggtgccaacgtccggcaggtggacgtgcccacgctgaccggagccttcggcatcctggcggcccacgtgcccacgctgcaggtcctgcggccggggctggtcgtggtgcatgcagaggacggcaccacctccaaatactttgtgagcagcggttccatcgcagtgaacgccgactcttcggtgcagttgttggccgaagaggccgtgacgctggacatgttggacctgggggcagccaaggcaaacttggagaaggcccaggcggagctggtggggacagctgacgaggccacgcgggcagagatccagatccgaatcgaggccaacgaggccctggtgaaggccctggagtaggcgagccagccgccaaggttgacctcagcttcggagccacctctggatgaactgcccccagcccccgccccattaaagacccggaagcctga

SEQ ID NO: 219238 - DNA, 685 bp, Homo Sapiens
gcgaacgaccaagagggtgttcgactgctagagccgagcgaagcgatgcctaaatcaaaggaacttgtttcttcaagctcttctggcagtgattctgacagtgaggttgacaaaaagttaaagaggaaaaagcaagttgctccagaaaaacctgtaaagaaacaaaagacaggtgagacttcgagagccctgtcatcttctaaacagagcagcagcagcagagatgataacatgtttcagattgggaaaatgaggtacgttagtgttcgcgattttaaaggcaaagtgctaattgatattagagaatattggatggatcctgaaggtgaaatgaaaccaggaagaaaaggtatttctttaaatccagaacaatggagccagctgaaggaacagatttctgacattgatgatgcagtaagaaaactgtaaaattcgagccatataaataaaacctgtactgttctagttgttttaatctgtctttttacattggcttttgttttctaaatgttctccaagctattgtatgtttggattgcagaagaatttgtaagatgaatacttttttttaatgtgcattattaaaaatattgagtgaagctaattgtcaactttattaaggattactttgtctgcccaccacctagtgtaaaataaaatcaagtaatacaaaaaaaaaaaaaaa

SEQ ID NO: 219239 - DNA, 910 bp, Homo Sapiens
  misc_feature (830)..(830): n is a, c, g, or t
  misc_feature (845)..(845): n is a, c, g, or t
  misc_feature (855)..(855): n is a, c, g, or t
  misc_feature (857)..(857): n is a, c, g, or t
  misc_feature (881)..(881): n is a, c, g, or t
  misc_feature (883)..(883): n is a, c, g, or t
  misc_feature (890)..(890): n is a, c, g, or t
  misc_feature (892)..(892): n is a, c, g, or t
  misc_feature (897)..(897): n is a, c, g, or t
  misc_feature (909)..(909): n is a, c, g, or t
gtaagaataggcgatgtggttctcagcattgatggaataaatgcacaaggaatgactcatcttgaagcccagaataagattaagggttgtacaggctctttgaatatgactctgcaaagagcatctgctgcacccaagcctgagccggttcctgttcaaaagggagaacctaaagaagtagttaaacctgtgcccattacatctcctgctgtgtccaaagtcacttccacaaacaacatggcctacaataaggcaccacggccttttggttctgtgttttcaccaaaagtcacatccatcccatcaccatcgtctgccttcaccccagcccatgcgaccacctcatcacatgcttccccttcacccgtggctgccgtcactcctcccctgttcgctgcatctggactgcatgctaatgccaatcttagtgctgaccagtctccatctgcactgagcgctggtaaaactgcagttaatgtcccacggcagcccacagtcaccagcgtgtgttccgagacttctcaggagctagcagagggacagagaagaggatcccagggtgacagtaaacagcaaaatggcccaccaagaaaacacattgtggagcgctatacagagttttatcatgtacccactcacagtgatgccagcaagaagagactgattgaggatactgaagactggcgtccaaggactggaacaactcagtctcgctctttccgaatccttgcccagatcactgggactgaacatttgaaagaatctgaagccgataatacaaagaaggcaaataactctcaggagccttctccgcagttggcttcctcggnagcttccacacggancatgcccganancctggacagcccaacctctggcanancaggggntnaccancctcacaactgna

SEQ ID NO: 219240 - DNA, 828 bp, Homo Sapiens
  misc_feature (750)..(750): n is a, c, g, or t
  misc_feature (780)..(780): n is a, c, g, or t
  misc_feature (789)..(790): n is a, c, g, or t
  misc_feature (793)..(793): n is a, c, g, or t
  misc_feature (795)..(795): n is a, c, g, or t
  misc_feature (799)..(799): n is a, c, g, or t
  misc_feature (802)..(803): n is a, c, g, or t
  misc_feature (820)..(820): n is a, c, g, or t
cagggctgcctgtggatttcgaccagtacaatgagctgcacctgccagcagtcatcctcaagaccttcctccgggagcttcctgagcccctgctcacctttgacctctacccccatgtggtgggcttcctcaacattgatgaaagccagagggtgccagcgacactgcaggtcctccagacgctgcccgaggagaactaccaggtgcttcgtttcctgactgctttcctggtgcagatttctgcacacagtgaccagaacaagatgaccaacactaacctggctgttgttttcggccctaacctgctgtgggccaaggatgcggccatcaccctcaaggccattaatcccatcaacaccttcaccaagttccttctggatcaccaaggggagctgttcccaagcccggaccccagcgggctctgaacctggcccctgccccaccagccccttctctggtagcccgggtttggactcttcctcctggcatcaggggccatgaagccccctggagagagatgttggagccacccatcaggcatgctctcccccacctctgtccagcccgcctcacggccctggcggcctcgctgttaccagaagacgtttttctctgccttacacttctcactgcctctctggacaccgggcttttgctgggctctccagagctgggcttggctcttccagctggagaaggactgagccccagtaacccctttcctgctttttcctgcctctgtttccctancaagtgtggatgaatcaaatgactgccggntgggctggnnaanangggncanncctcccctcttgattgntgggaatg

SEQ ID NO: 219241 - DNA, 841 bp, Homo Sapiens
  misc_feature (778)..(778): n is a, c, g, or t
ggcagaaacttccccttgccacttccaaacaaacctcggcccccatcccccgcggaggaagagaattcattaaatgaagagtggtacgtttcttatattacccgaccagaggcagaagctgctcttagaaagataaaccaggatggcacatttctggtcagagacagctctaaaaaaacaacaaccaatccatatgtcctcatggtgttgtacaaagataaagtttacaacatccagatccgttatcagaaggaaagtcaagtttacttgttgggaactggactccgagggaaagaggactttctgtctgtgtcagatattattgactacttcaggaaaatgccacttctgctcattgatgggaaaaaccgaggttccagataccagtgcacattaacgcatgctgcagggtacccatagcaagtttagccgagcaaatgaaccgtcctcctgcctctgttgccaacacgagatcaatcagccttggtcaatggacaaacacttaggactgaactgaacccctccccatgaacacaagggttttatcctttcctttaaaaacagtgtttgaaatgaagactgtcaactatcccataatttatttattcttcttcaatgtttgtaaagtgcatgagtcatgttcacacttgaagtctagtagtgcactgtaataattcattttttaaaagattatttaatgcccatttcaaaatacagtagtttacacagctacagaaacaatttggggcaagttttaaaacactgaaacagtaatagnttattggtgtcacataaaactgatttgttttttacagccaaacctctgtcagtcagaggcatt

SEQ ID NO: 219242 - DNA, 521 bp, Homo Sapiens
gtcaaaggtgaagcaggacatgcctccgccggggggctatgggcccatcgactacaaacggaacttgccgcgtcgaggactgtcgggctacagcatgctggccatagggattggaaccctgatctacgggcactggagcataatgaagtggaaccgtgagcgcaggcgcctacaaatcgaggacttcgaggctcgcatcgcgctgttgccactgttacaggcagaaaccgaccggaggaccttgcagatgcttcgggagaacctggaggaggaggccatcatcatgaaggacgtgcccgactggaaggtgggggagtctgtgttccacacaacccgctgggtgccccccttgatcggggagctgtacgggctgcgcaccacagaggaggctctccatgccagccacggcttcatgtggtacacgtaggccctgtgccctccggccacctggatccctgcccctccccactgggacggaataaatgctctgcagacctggaaaaaagaaaaaaaaaaaaaaa

SEQ ID NO: 219243 - DNA, 447 bp, Homo Sapiens
ggaacgggacttctaaaaggaactatgtctggaaggctgtggtccaaggccatttttgctggctataagcggggtctccggaaccaaagggagcacacagctcttcttaaaattgaaggtgtttacgcccgagatgaaacagaattctatttgggcaagagatgcgcttatgtatataaagcaaagaacaacacagtcactcctggcggcaaaccaaacaaaaccagagtcatctggggaaaagtaactcgggcccatggaaacagtggcatggttcgtgccaaattccgaagcaatcttcctgctaaggccattggacacagaatccgagtgatgctgtacccctcaaggatttaaactaacgaaaaatcaataaataaatgtggatttgtgctcttgtatttttaagtggattaaaaaacttactaccttaaaaaaaaaaaaaaa

SEQ ID NO: 219244 - DNA, 851 bp, Homo Sapiens
  misc_feature (843)..(843): n is a, c, g, or t
cagaagccccagcctcgacctagcccaccctctcagggccacagtgcagaagcctgcacacctgccaagtctctccgactccttgcagctgctgtcagcatggcccaggctcctgctgacccgggcagagaaggccaccttgaacaaagaatcctgcaggtgctgacagaggctggctccccggtgaaacttgcccagctggtgaaggaatgccaagcacccaagagggagctcaaccaagtcctctaccgaatgaaaaaggagttgaaagtctccctcacatcccctgccacctggtgcttgggcgggactgatcctgaaggcgagggtcctgcagagctggccttgtccagccctgccaagaggccccagcaacatgcagctacaattccagagacccctggccctcagttcagccaacaacgggaggaagacatctacaggtttctcaaagacaatggtccccagagggccctggtcatcgcccaagcactgggaatgaggacagcaaaagatgtgaaccgagacttgtacaggatgaagagcaggcaccttctggacatggatgagcagtccaaagcatggacgatttaccgcccagaagattctggaagaagagcaaagtcagcctcaattatttaccagcacaatccaatcaacatgatctgccagaatggacccaacagctggatttccattgcaaactccgaagccatccagattggacacgggaacatcattacaagacagacagtctccagggaggacggtaagtcacccaagagagcccagggaggggacctcggtggggagccaccggatcctctgggtgggggcaaaggntaggattg

SEQ ID NO: 219245 - DNA, 653 bp, Homo Sapiens
  misc_feature (624)..(624): n is a, c, g, or t
  misc_feature (626)..(626): n is a, c, g, or t
  misc_feature (631)..(632): n is a, c, g, or t
  misc_feature (639)..(642): n is a, c, g, or t
  misc_feature (647)..(647): n is a, c, g, or t
gggggcggggctgcaactcctgtgcacaaaggaagggccctgggtaggggtcaggagctgccttgcccagagatgtgtctgggtcactttggaaacaggaatcctctccccaaaatgggtagcaatgggggtacagaggccaaagacgcagctgcatgtcctgcagtgcctgggacgccccgtagtgaagagtgatgtggcccaaatgtcagcagtgccagtgtcagactcctgctaagagacagtatcaagaaagataacttcaaaatacactttctggaggcctggcgcggtggctcaggcctgtaatcccagcactctgggaggccaatgcatgtggatcacctgaggtcaggagttcgagaccagcctggccaactgcctgaaaccccatctctactaaaaatacaaaaattagccaggtgtggtggcgcaagcctgtaatcccagctatttgggaggctgaggcaggagaatcgcttgaacccgggaggcagaggttgcagtgagccgagatcgcaccactgcactccagcctggacaacagagtgggactctgtctcaaaaaaaaaaaaaaaaaaaaagtacagtttcgggatttcataaattgggttccctgagggncntttgnngaatccnnnntaaanaaaccc

SEQ ID NO: 219246 - DNA, 887 bp, Homo Sapiens
  misc_feature (875)..(875): n is a, c, g, or t
gaaaaggatgaaggtgaaatccagtacctcatcaagtggaagggttggtcttacatccacagcacatgggagagtgaagaatccttacagcaacagaaagtgaagggcctaaaaaaactagagaacttcaagaaaaaagaggacgaaatcaaacaatggttagggaaagtttctcctgaagatgtagaatatttcaattgccaacaggagctggcttcagagttgaataaacagtatcagatagtagaaagagtaatagctgtgaagacaagtaaatctacattgggtcaaacagattttccagctcatagtcggaagccggcaccctcaaatgagcccgaatatctatgtaaatggatgggactcccctattcagagtgtagctgggaagatgaagccctcattggaaagaaattccagaattgcattgacagcttccacagtaggaacaactcaaaaaccatcccaacaagagaatgcaaggccctgaagcagagaccacgatttgtagctttaaagaaacaacctgcatatttaggaggggagaatctggaacttcgagattatcagctagaaggtctaaactggctagctcattcctggtgcaaaaataatagtgtaatccttgctgatgaaatgggcctaggaaagaccatccagaccatatcattcctctcctacctgttccaccaacaccagctgtatggcccctttcttatagtcgtccctttatccaccctcacctcatggcagagagagtttgaaatctgggcaccagagattaaccgtagtggtttacataggtgacctgatgagcagaaatacgatacgggaatatgaatggattcatttcccaaccaaaagattgaagttcnacgcacttatac

SEQ ID NO: 219247 - DNA, 837 bp, Homo Sapiens
  misc_feature (23)..(23): n is a, c, g, or t
  misc_feature (811)..(811): n is a, c, g, or t
  misc_feature (829)..(829): n is a, c, g, or t
  misc_feature (832)..(832): n is a, c, g, or t
  misc_feature (834)..(834): n is a, c, g, or t
  misc_feature (836)..(836): n is a, c, g, or t
tccgccgcggagcagcaccatgntcggcgccggcggccaaagtcagtaaaaaggagctcaactccaaccacgacggggccgacgagacctcagaaaaagaacagcaagaagcgattgaacacattgatgaagtacaaaatgaaatagacagacttaatgaacaagccagtgaggagattttgaaagtagaacagaaatataacaaactccgccaaccattttttcagaagaggtcagaattgatcgccaaaatcccaaatttttgggtaacaacatttgtcaaccatccacaagtgtctgcactgcttggggaggaagatgaagaggcactgcattatttgaccagagttgaagtgacagaatttgaagatattaaatcaggttacagaatagatttttattttgatgaaaatccttactttgaaaataaagttctctccaaagaatttcatctgaatgagagtggtgatccatcttcgaagtccaccgaaatcaaatggaaatctggaaaggatttgacgaaacgttcgagtcaaacgcagaataaagccagcaggaagaggcagcatgaggaaccagagagcttctttacctggtttactgaccattctgatgcaggtgctgatgagttaggagaggtcatcaaagatgatatttggccaaacccattacagtactacttggttcccgatatggatgatgaagaaggagaaggagaagaagatgatgatgatgatgaagaggaggaaggattagaagatattgacgaagaaggggatgaggatgaaggtgaagaagatgaagttttttnatgaaggggaggaagganagnangnt

SEQ ID NO: 219248 - DNA, 521 bp, Homo Sapiens
agacgcggtcgtaagggctgaggatttttggtccgcacgctcctgctcctgactcaccgctgttcgctctcgccgaggaacaagtcggtcaggaagcccgcgcgcaacagccatggcttttaaggataccggaaaaacacccgtggagccggaggtggcaattcaccgaattcgaatcaccctaacaagccgcaacgtaaaatccttggaaaaggtgtgtgctgacttgataagaggcgcaaaagaaaagaatctcaaagtgaaaggaccagttcgaatgcctaccaagactttgagaatcactacaagaaaaactccttgtggtgaaggttctaagacgtgggatcgtttccagatgagaattcacaagcgactcattgacttgcacagtccttctgagattgttaagcagattacttccatcagtattgagccaggagttgaggtggaagtcaccattgcagatgcttaagtcaactattttaataaattgatgaccagttgttaaaaaaaaaaaaaaa

SEQ ID NO: 219249 - DNA, 824 bp, Homo Sapiens
cggcgctggagcgggaacgggagtagctgcctgggcgccaaaggccgcggcactcccacgcggaccccgaagtccgcaacccggggatgggcccgcggctgcgagtctgtggattctagccttgggggtctttcacgatccagcactgtggccagcctcgacacagattccaccaaaagctcaggacaaagcaacaataattcagatacctgtgcagaatttcgaataaaatatgttggtgccattgagaaactgaaactctccgagggaaaaggccttgaagggccattagacctgataaattatatagacgttgcccagcaagatggaaagttgccttttgttcctccggaggaagaatttattatgggagtttccaagtatggcataaaagtatcaacatcagatcaatatgatgttttgcacaggcatgctctctacttaataatccggatggtgtgttacgatgacggtctgggggcgggaaaaagcttactggctctgaagaccacagatgcaagcaatgaggaatacagcctgtgggtttatcagtgcaacagcctggaacaagcacaagccatttgcaaggttttatccaccgcttttgactctgtattaacatctgagaaaccctgaatcctgcaatcaagtagaagtcaacttcatctgaaagttcagctgttttcaaactgcaatgctgaaatgttatgcaaataatgaagttatcccttgctctagattttctgaagaaaatggattgtgtaaaatgctgatcatttgtttattaaaatgtgtcctattacacagtgaaaaaaaaaaaaaaa

SEQ ID NO: 219250 - DNA, 865 bp, Homo Sapiens
  misc_feature (835)..(835): n is a, c, g, or t
  misc_feature (861)..(861): n is a, c, g, or t
ggggttcctcagactcctgtgaacaagatcgatgaacattttgttgcagattcaagagcccagaaccagccctcgtctatctgtagcactacaacttccacaccagcagctgtccccgtgcagcagagtaagagaggcactatgggctggcagaaggctgggcacccaccctctgacggccaacagagagcaacacaacagggctctctcaggaccttgcttggagatggtgttggcagacagcagcctcgggccaaacaagtgtgcaatgtggaggtgggccttcagacccaggagaggccacctgccatggcggccaagcacagcagcagcggacactgtgttcagaactttcctccatccctagcttcaaaacccagcctggtccagcagaaaccgaccgcgtatgtgaggccaatggacggccaagatcaggcccctgatgagtctcctaagctgaagtcgtcttcggaaaccagcgtgcactgcacatcatacaggggagtccctgccagcaagccggagcctgccagagccaaggccaagctctccaagttcagcatccccaagcagggggaggagagtagatctggagaaaccaacagctgtgttgaagaaataatccgggagatgacctggcttccaccactttctgctattcaagcacctggcaaagtggaaccaaccaaatttccatttccaaataaggactctcagcttgtatcctctggacacaataatccaaagaaaggtgatgcagagccagagagtccagacaatggcacatcgaatacatcaatgctggaagatgaccttaagctaagcagtgatgaanaggagaatgaacagcaggcagctcanagaa

SEQ ID NO: 219251 - DNA, 852 bp, Homo Sapiens
  misc_feature (828)..(828): n is a, c, g, or t
gatgcagtgagccgagatggtgccacttcactccagcctggacaacagagcaagactctgtctaaaacaacaacaacaacaacaaaaaaaaaacaaacaaaagaaggaagaaagaaagaagggagggaaggagggaaagaaaaaggaaggaaagaaagagaaagagaaaacactataacagagatgatgaaggcatttgatgggaccatcagtagactggacatagatgaggaaaaaatcagcctgaaggtatgttaatagaaccttcccaaactgtaatgcaaagaaaaaaatggggaaaaaaacagattatacaagaactgtgggatattttcaaaaggtatatgcacaattgaaacaccacaaggagaagaaagggagaacagagcagaaaaatcgtgaaagttataatggctcccaattttccaaaagtaaaggcagaccccaagccacggatccagtaagcttagagaacaccaaataggatacatacttaaaaaaaaaaatcaacacctacatatatcatattcaaactgtagaaaaccaaagacaaacacaaaatcttgaaagaagccatagaaaaaaacccagcttacttatacaggaaacgaataagaattacagccttcttgtcagacaccacgcaagcaagaagagaaaagggtgaaatatgtaaagtgttgaaagagaaaactggctgggcacagtggctcatgcctgtaatcccagcactttggaaggccgaggtgggtggatcacgaggtcaggatttcaagaccatcctggctaacacggtgaaaccccgtctctactaaaaatacaaaaaanttagccaggcgtggtggcagacgc

SEQ ID NO: 219252 - DNA, 789 bp, Homo Sapiens
gaaaccgctgtcagagccaccaacgcacagtttgacagtcctgagatcctgcgaaggctggacgtgcggctgctggaggtctctccaggtgacactggatgggatgtcttcagcctcgattatcatgttgacggaccaattgcaactgtgtttactcgagaatgtatgagccactacctaagagtatttaacttcctctggagggcgaagcggatggaatacatcctcactgacatacggaagggacacatgtgcaatgcaaagctcctgagaaacatgccagagttctccggggtgctgcaccagtgtcacattttggcctctgagatggtccatttcattcatcagatgcagtattacatcacatttgaggtgcttgaatgttcttgggatgagctttggaacaaagtccagcaggcccaggatttggatcacatcattgctgcacacgaggtgttcttagacaccatcatctcccgctgcctgctggacagtgactccagggcacttttaaatcaacttagagctgtgtttgatcaaattattgaacttcagaatgctcaagatgcaatatacagagctgctctggaagaattgcagagacgattacagtttgaagagaaaaagaaacagcgtgaaattgaggttgagatgtgcctatactgcgtttgaagtcccgagaaatcactgacagttgtaaagaagggaggggccaccctcactggcatcatcatcctgtttcacaaaataaataaaaacagcagcattcatgagaaaaaaaaaaaaaaa

SEQ ID NO: 219253 - DNA, 520 bp, Homo Sapiens
  misc_feature (484)..(484): n is a, c, g, or t
ccccatccggattcccgtggctgtgtgcatctcctgcctgtgtccccatgtctgtccgcaggtgcgcttctccgagaaggtcactgtccatttcctggctgtctgggcagggccggcccaggccgcccgccagggcccctgggagcagcttgctcgggatcgcagccgcttcgcacgccgcatcacccaggcccaggaggagctgagcccctgcctcacccctgctgcccgggccagagcctgggcacgcctcaggaacccacctttagcccccatccctgccctcacccagaccttgccttcctcctctgtcccttcgtccccagtccagaccacgcccttgagccaagctgtggccacaccttcccgctcgtctgctgctgcagcggctgccctggacctcagtgggaggcgtggctgagaccaactggtttgcctataatttattaactatttattttttctaagtgtgggtttatataangaataaagccttttgatttgtaaaaaaaaaaaaaaa

SEQ ID NO: 219254 - DNA, 663 bp, Homo Sapiens
  misc_feature (445)..(445): n is a, c, g, or t
  misc_feature (595)..(595): n is a, c, g, or t
  misc_feature (603)..(604): n is a, c, g, or t
  misc_feature (633)..(633): n is a, c, g, or t
  misc_feature (646)..(646): n is a, c, g, or t
  misc_feature (651)..(651): n is a, c, g, or t
  misc_feature (655)..(656): n is a, c, g, or t
ccctgctgcaggccaccagatgaacgggacaaaccagcacttccgagattgcaaccccaagcacagcggcggcagcagcacccccggcggctcgggcggcagcagcacccccggcggctctggcagcagctcgggcggcggcgcgggcagcagcaacagcggcggcggcagcggcagcggcaacatgcccgcctccgtggcccacgtccccgctgcaatgctgccgcccaatgtcatagacactgatttcatcgacgaggaagttcttatgtccttggtgatagaaatgggtttggaccgcatcaaggagctgcccgaactctggctggggcaaaacgagtttgattttatgacggacttcgtgtgcaaacagcagcccagcagagtgagctgttgactcgatcgaaaccccggcgaaagaaatcaaacccccaacttcttcggngtgaattaaaagaaacattcccttagacacagtatctcacttttcagatcttgaaaggtttgagaacttggaaacaaagtaaactataaacttgtacaaattggttttaaaaaaaattgctgccacttttttttcctgtttttgtttcanttttgtanncttgacattcacccacctcccttatgtanttgaaatatctanctaanttgnnctttttc

SEQ ID NO: 219255 - DNA, 374 bp, Homo Sapiens
ggggaatggaggctgcaggactggctagaccaggtccctgccggtccaccaggcggaggtgggacaaaggtcctaacaggagtcactggctcaggaccccagggagaaacgctctccccacccacgccatgctgaccagagatcttgcagcccctgtggatgcccccgccgaggtcccccgatccccgcacccggactgctgctccctgcccctcccttgcgggtcccccaggaagccaggtgaccccaggtgggaggctgtgtgtggaggccatcctggaaggaagtttagacctgcccaggtgtggagcgaggggcacaggggcatcctaacctcagaaactgaaataaagcctttgaaaaaaaaaaaaaaa

SEQ ID NO: 219256 - DNA, 616 bp, Homo Sapiens
  misc_feature (596)..(596): n is a, c, g, or t
  misc_feature (600)..(601): n is a, c, g, or t
ggcgagtggaccgcgcctctaaaggcgcttgccagtgcaatctgggcgatcgcttcctggtcctcgcctcctccgctgtctccctggagttcttgcaagtcggccaggatgtctcaggctgagtttgagaaagctgcagaggaggttaggcaccttaagaccaagccatcggatgaggagatgctgttcatctatggccactacaaacaagcaactgtgggcgacataaatacagaacggcccgggatgttggacttcacgggcaaggccaagtgggatgcctggaatgagctgaaagggacttccaaggaagatgccatgaaagcttacatcaacaaagtagaagagctaaagaaaaaatacgggatatgagagactggatttggttactgtgccatgtgtttatcctaaactgagacaatgccttgtttttttctaataccgtggatggtgggaattcgggaaaataaccagttaaaccagctactcaaggctgctcaccatacggctctaacagattaggggctaaaacgattactgactttccttgagtagtttttatctgaaatcaattaaaagtgtatttgttactttanatannaaaaaaaaaaaaaaa

SEQ ID NO: 219257 - DNA, 716 bp, Homo Sapiens
  misc_feature (640)..(640): n is a, c, g, or t
  misc_feature (644)..(644): n is a, c, g, or t
  misc_feature (647)..(647): n is a, c, g, or t
  misc_feature (654)..(654): n is a, c, g, or t
  misc_feature (668)..(668): n is a, c, g, or t
  misc_feature (677)..(677): n is a, c, g, or t
  misc_feature (689)..(689): n is a, c, g, or t
  misc_feature (705)..(705): n is a, c, g, or t
  misc_feature (707)..(707): n is a, c, g, or t
  misc_feature (710)..(710): n is a, c, g, or t
  misc_feature (712)..(712): n is a, c, g, or t
  misc_feature (714)..(714): n is a, c, g, or t
gcacgcgcaggcaggggtggtgctgggagccccaggaggctgggaagctggaggaggtgatgcaggagctgcgggccctgagggcgctggtcaaggagcagggcgaccgcatctgccgcctggaggagcagctgggccgcatggagaacggggatgcgtagggccacagccacacgccaccttcatctcctccgccgcccccttcccactcagcttctgccagcgggtcgcaccgggctagctggctgcccagagcctctgaggcagcgcaggggtcagttcccacccccacccgtcccaggcccaggccgaagccagcgcccagctttcctcactgttcctgtggaggatgtctacgcccaggcgagctcctcgacctctgagggaccatctccccgaccactgcccagccctctgctccctccccagaggaggcgggagggtgggctctatattttcattccaaataaaattctctttctaaaagccaggctgacctgctgctgcaagggtggggctgagaagtctggaaacctggagacagaggatgtcacaggagtcacacatgtgcagaaggtctgggggcagtgagcagccccacaggcattgctcccctggattgtcaggcagggaaactgangcanaanacctganaacacatgcaaggntgcatccancttcaagttggngctgcttcttccttgnanganangncc

SEQ ID NO: 219258 - DNA, 509 bp, Homo Sapiens
cgctgcctacggaggtggcagccatctccttctcggcatcatggccgccctcagaccccttgtgaagcccaagatcgtcaaaaagagaaccaagaagttcatccggcaccagtcagaccgatatgtcaaaattaagcgtaactggcggaaacccagaggcattgacaacagggttcgtagaagattcaagggccagatcttgatgcccaacattggttatggaagcaacaaaaaaacaaagcacatgctgcccagtggcttccggaagttcctggtccacaacgtcaaggagctggaagtgctgctgatgtgcaacaaatcttactgtgccgagatcgctcacaatgtttcctccaagaaccgcaaagccatcgtggaaagagctgcccaactggccatcagagtcaccaaccccaatgccaggctgcgcagtgaagaaaatgagtaggcagctcatgtgcacgttttctgtttaaataaatgtaaaaactgccaaaaaaaaaaaaaaa

SEQ ID NO: 219259 - DNA, 607 bp, Homo Sapiens
gtgaaaatggttcgctattcacttgacccggagaaccccacgaaatcatgcaaatcaagaggttccaatcttcgtgttcactttaagaacactcgtgaaactgctcaggccatcaagggtatgcatatacgaaaagccacgaagtatctgaaagatgtcactttacagaaacagtgtgtaccattccgacgttacaatggtggagttggcaggtgtgcgcaggccaagcaatggggctggacacaaggtcggtggcccaaaaagagtgctgaatttttgctgcacatgcttaaaaacgcagagagtaatgctgaacttaagggtttagatgtagattctctggtcattgagcatatccaagtgaacaaagcacctaagatgcgccgccggacctacagagctcatggtcggattaacccatacatgagctctccctgccacattgagatgatccttacggaaaaggaacagattgttcctaaaccagaagaggaggttgcccagaagaaaaagatatcccagaagaaactgaagaaacaaaaacttatggcacgggagtaaattcagcattaaaataaatgtaattaaaaggaaaaaaaaaaaaaaa

SEQ ID NO: 219260 - DNA, 882 bp, Homo Sapiens
  misc_feature (792)..(792): n is a, c, g, or t
aaaatggtattttttacatgcaatgcatgtggtgaatcagtgaagaaaatacaagtggaaaagcatgtgtctgtttgcagaaactgtgaatgcctttcttgcattgactgcggtaaagatttctggggcgatgactataaaaaccacgtgaaatgcataagtgaagatcagaagtatggtggcaaaggctatgaaggtaaaacccacaaaggcgacatcaaacagcaggcgtggattcagaaaattagtgaattaataaagagacccaatgtcagccccaaagtgagagaacttttagagcaaattagtgcttttgacaacgttcccaggaaaaaggcaaaatttcagaattggatgaagaacagtttaaaagttcataatgaatccattctggaccaggtgtggaatatcttttctgaagcttccaacagcgaaccagtcaataaggaacaggatcaacggccactccacccagtggcaaatccacatgcagaaatctccaccaaggttccagcctccaaagtgaaagacgccgtggaacagcaaggggaggtgaagaagaataaaagagaaagaaaggaagaacggcagaagaaaaggaaaagagaaaagaaagaactaaagttagaaaaccaccaggaaaactcaaggaatcagaagcctaagaagcgcaaaaagggacaggaggctgaccttgaggctggtggggaggaagtccctgaggccaatggctctgcagggaagaggagcaagaagaagaagcagcgcaaggacagcgccagtgaggaagangcacgcgtgggcgcagggaagaggaagcggaggcactcggaagttgaaacagattctaagaagaaaaagatgaagctcccagagcatcct

SEQ ID NO: 219261 - DNA, 673 bp, Homo Sapiens
ggctggggatatcgacctggaaaagagacagaggaagaggaagctgctgaggactggggagaagctgagccctgccccttccgagtggccatctatgtacctggagagaagccaccgcctccctgggctcctcctaggctgcccctccgactgcaaaggcggctcaagcgcccagaaacccctactcatgatccggaccctgagactcccctaaaggccagaaaggtgcgcttctccgagaaggtcactgtccatttcctggctgtctgggcagggccggcccaggccgcccgccagggcccctgggagcagcttgctcgggatcgcagccgcttcgcacgccgcatcgcccaggcccaggaggagctgagcccctgcctcacccctgctgcccgggccagagcctgggcacgcctcaggaacccacctttagcccccatccctgccctcacccagaccttgccttcctcctctgtcccttcgtccccagtccagaccacgcccttgagccaagctgtggctacaccttcccgctcctctgctgctgcagcggctgccctggacctcagtgggaggcgtggctgagaccaactggtttgcctataatttattaactatttattttttctaagtgtgggtttatataaggaataaagccttttgatttgtagcg

SEQ ID NO: 219262 - DNA, 717 bp, Homo Sapiens
cggagtccagaggacggagaagacgaggaagaggaggagcagttggttctggtggaattatcaggaattattgattcagacttcctctcaaaatgtgaaaataaatgcaaggttttgggcattgacactgagaggcccattctgcaagtggacagctgtgtctttgctggggagtatgaagacactctagggacctgtgttatatttgaagaaaatgttgaacatgctgatacagaaggcaataataaaacagtgctaaaatataaatgccatacaatgaagaagctcagcatgacaagaactctcctgacagagaagaaggaaggagaagaaaacataggtggggtggaatggctgcaaataaaggataatgatttctcctatcgacccaacatgatttgtaactttctacatgaaaatgaagacgaagaagtggtagcttcagccccagataaatctttggaattggaagaggaagagattcaaatgaacgacagttcaaacctgagttgtgaacaggagaaaccaatgcacttggaaatagaagattctggtcctcttattgatataccttctgagacagaaggttctgtttttatggaaactcaaatgctgccttagaaatcactcctagatgaaatgtttctcataataacttgtcaagaactttttagagttgttacataaaaataattgctgtgtaaaaaaaaaaaaaaa

SEQ ID NO: 219263 - DNA, 723 bp, Homo Sapiens
gccactgaagatcctggtgtcgccatgggccgccgccccgcccgttgttaccggtattgtaagaacaagccgtacccaaagtctcgcttctgccgaggtgtccctgatgccaagattcgcatttttgacctggggcggaaaaaggcaaaagtggatgagtttccgctttgtggccacatggtgtcagatgaatatgagcagctgtcctctgaagccctggaggctgcccgaatttgtgccaataagtacatggtaaaaagttgtggcaaagatggcttccatatccgggtgcggctccaccccttccacgtcatccgcatcaacaagatgttgtcctgtgctggggctgacaggctccaaacaggcatgcgaggtgcctttggaaagccccagggcactgtggccagggttcacattggccaagttatcatgtccatccgcaccaagctgcagaacaaggagcatgtgattgaggccctgcgcagggccaagttcaagtttcctggccgccagaagatccacatctcaaagaagtggggcttcaccaagttcaatgctgatgaatttgaagacatggtggctgaaaagcggctcatcccagatggctgtggggtcaagtacatccccagtcgtggccctctggacaagtggcgggccctgcactcatgagggcttccaatgtgctgcccccctcttaatactcaccaataaattctacttcct

SEQ ID NO: 219264 - DNA, 852 bp, Homo Sapiens
cccagcatggatgggcttttggcaggacccacaatgccacaagctcctccgcaacagtttccatatcaaccaaattatggaatgggacaacaaccagatccagcctttggtcgagtgtctagtcctcccaatgcaatgatgtcgtcaagaatgggtccctcccagaatcccatgatgcaacacccgcaggctgcatccatctatcagtcctcagaaatgaagggctggccatcaggaaatttggccaggaacagctccttttcccagcagcagtttgcccaccaggggaatcctgcagtgtatagtatggtgcacatgaatggcagcagtggtcacatgggacagatgaacatgaaccccatgcccatgtctggcatgcctatgggtcctgatcagaaatactgctgacatctctgcaccaggacctcttaaggaaaccactgtacaaatgacactgcactaggattattgggaaggaatcattgttccaggcatccatcttggaagaaaggaccagctttgagctccatcaagggtattttaagtgatgtcatttgagcaggactggattttaagccgaagggcaatatctacgtgtttttcccccctccttctgctgtgtatcatggtgttcaaaacagaaatgttttttggcattccacctcctagggatataattctggagacatggagtgttactgatcataaaacttttgtgtcacttttttctgccttgctagccaaaatctcttaaatacacgtaggtgggccagagaacattggaagaatcaagagagattagaatatctggtttctctagttgcagtattggacaaagagcatagtcccagc

SEQ ID NO: 219265 - DNA, 651 bp, Homo Sapiens
tgcagcaccaaggtgaagaccttgctgctaaatgctgctcagaacaccatggagccacccctgaccccgcccagcccagcccctccgggactgtcacttggtgatacagctctgcagaacctggagcagctgctagacgggccagaagcccagggcagctgggcagagctggcagagcgtctggggctgcgcagcctggtagacacgtaccgacagacaacctcacccagtggcagcctcctgcgcagctacgagctggctggcggggacctggcaggtctactggaggccctgtctgacatgggcctagaggagggagtgaggctgctgaggggtccagaaacccgagacaagctgcccagcacagaggtgaaggaagacagtgcgtacgggagccagtcagtggagcaggaggcagagaagctgggcccaccccctgagccaccaggagggctctgccacgggcacccccagcctcaggtgcactgacctgctgcctgcccccagcccccttcccggaccccctgtacagcgtccccacctatttcaaatcttatttaacaccccacacccacccctcagttgggacaaataaaggattctcatgggaaggggaggacccctccttcccaacttaaaaaaaaaaaaaaa

SEQ ID NO: 219266 - DNA, 428 bp, Homo Sapiens
  misc_feature (404)..(404): n is a, c, g, or t
ggtgtggagtctggagacgacgtgcagaaatggcacctcgaaaggggaaggaaaagaaggaagaacaggtcatcagcctcggacctcaggtggctgaaggagagaatgtatttggtgtctgccatatctttgcatccttcaatgacacttttgtccatgtcactgatctttctggcaaggaaaccatctgccgtgtgactggtgggatgaaggtaaaggcagaccgagatgaatcctcaccatatgctgctatgttggctgcccaggatgtggcccagaggtgcaaggagctgggtatcaccgccctacacatcaaactccgggccacaggaggaaataggaccaagaaccctggacctggggcccagtcggccctcaaagcccttgcccgctcgggtatgaanatcgggcggattgaggatgtcacc

SEQ ID NO: 219267 - DNA, 682 bp, Homo Sapiens
  misc_feature (647)..(647): n is a, c, g, or t
  misc_feature (679)..(679): n is a, c, g, or t
gcagcttccccgacttccccaccccaggcgtggtattcagggacatctcgcccgtcctgaaggaccccgcctccttccgcgccgccatcggcctcctggcgcgacacctgaaggcgacccacgggggccgcatcgactacatcgcaggcctagactcccgaggcttcctctttggcccctccctggcccaggagcttggactgggctgcgtgctcatccgaaagcgggggaagctgccaggccccactctgtgggcctcctattccctggagtacgggaaggctgagctggagattcagaaagacgccctggagccaggacagagggtggtcgtcgtggatgatctgctggccactggtggaaccatgaacgctgcctgtgagctgctgggccgcctgcaggctgaggtcctggagtgcgtgagcctggtggagctgacctcgcttaagggcagggagaagctggcacctgtacccttcttctctctcctgcagtatgagtgaccacagggcctcccagcccaacatctccagctggatcccagggaaatatcagccttgggcaactgcagtgaccaggggcaccggctgcccacagggaaacacattcctttgctggggttcagcgcctctcctgggggctggaantgccaaagcctggggcaaagctgtgtttcaancca

SEQ ID NO: 219268 - DNA, 697 bp, Homo Sapiens
  misc_feature (626)..(626): n is a, c, g, or t
  misc_feature (629)..(629): n is a, c, g, or t
  misc_feature (636)..(636): n is a, c, g, or t
  misc_feature (640)..(640): n is a, c, g, or t
  misc_feature (655)..(655): n is a, c, g, or t
  misc_feature (665)..(665): n is a, c, g, or t
  misc_feature (673)..(674): n is a, c, g, or t
  misc_feature (690)..(690): n is a, c, g, or t
  misc_feature (694)..(694): n is a, c, g, or t
ccgcccggagccgggagcgccgctccagcgaggcgcgggctgtggggccgccgcgtgcctggccccgctcgcccgtgccggccgctcgcccgccatgcctggcttcgactacaagttcctggagaagcccaagcgacggctgctgtgcccactgtgcgggaagcccatgcgcgagcctgtgcaggtttccacctgcggccaccgtttctgcgatacctgcctgcaggagttcctcagtgaaggagtcttcaagtgccctgaggaccagcttcctctggactatgccaagatctacccagacccggagctggaagtacaagtattgggcctgcctatccgctgcatccacagtgaggagggctgccgctggagtgggccactacgtcatctacagggccacctgaatacctgcagcttcaatgtcattccctgccctaatcgctgccccatgaagctgagccgccgtgatctacctgcacacttgcagcatgactgccccaagcggcgcctcaagtgcgagttttgtggctgtgacttcagtggggaggcctatgagagccatgagggtatgtgcccccaggagagtgtctactgtgagaataagtgtggtgcccgcatgatgcggnggntgctggnccancatgccacctctgantgccccaagngcactcanncctgcacctactgcantaangga

SEQ ID NO: 219269 - DNA, 859 bp, Homo Sapiens
  misc_feature (3)..(3): n is a, c, g, or t
cgntccgatggcggttggcaagaacaagcgccttacgaaaggcggcaaaaagggagccaagaagaaagtggttgatccattttctaagaaagattggtatgatgtgaaagcacctgctatgttcaatataagaaatattggaaagacgctcgtcaccaggacccaaggaaccaaaattgcatctgatggtctcaagggtcgtgtgtttgaagtgagtcttgctgatttgcagaatgatgaagttgcatttagaaaattcaagctgattactgaagatgttcagggtaaaaactgcctgactaacttccatggcatggatcttacccgtgacaaaatgtgttccatggtcaaaaaatggcagacaatgattgaagctcacgttgatgtcaagactaccgatggttacttgcttcgtctgttctgtgttggttttactaaaaaacgcaacaatcagatacggaagacctcttatgctcagcaccaacaggtccgccaaatccggaagaagatgatggaaatcatgacccgagaggtgcagacaaatgacttgaaagaagtggtcaataaattgattccagacagcattggaaaagacatagaaaaggcttgccaatctatttatcctctccatgatgtcttcgttagaaaagtaaaaatgctgaagaagcccaagtttgaattgggaaagctcatggagcttcatggtgaaggcagtagttctggaaaagccactggggacgagacaggtgctaaagttgaacgagctgatggatatgaaccaccagtccaagaatctgtttaaagttcagacttcaatagtggcaaataaaaagtgctatttgtgaaaaaaaaaaaaaaa

SEQ ID NO: 219270 - DNA, 491 bp, Homo Sapiens
  misc_feature (476)..(476): n is a, c, g, or t
ggcaagatggcagaagtagagcagaagaagaagcggaccttccgcaagttcacctaccgcggcgtggacctcgaccagctgctggacatgtcctacgagcagctgatgcagctgtacagtgcgcgccagcggcggcggctgaaccggggcctgcggcggaagcagcactccctgctgaagcgcctgcgcaaggccaagaaggaggcgccgcccatggagaagccggaagtggtgaagacgcacctgcgggacatgatcatcctacccgagatggtgggcagcatggtgggcgtctacaacggcaagaccttcaaccaggtggagatcaagcccgagatgatcggccactacctgggcgagttctccatcacctacaagcccgtaaagcatggccggcccggcatcggggccacccactcctcccgcttcatccctctcaagtaatggctcagctaataaaggcgcacatgactccnaaaaaaaaaaaaaaa

SEQ ID NO: 219271 - DNA, 806 bp, Homo Sapiens
  misc_feature (14)..(14): n is a, c, g, or t
  misc_feature (16)..(16): n is a, c, g, or t
  misc_feature (18)..(18): n is a, c, g, or t
gcctcggaggcgtncntnctgcttcaagatgaagctgaacatctccttcccagccactggctgccagaaactcattgaagtggacgatgaacgcaaacttcgtactttctatgagaagcgtatggccacagaagttgctgctgacgctctgggtgaagaatggaagggttatgtggtccgaatcagtggtgggaacgacaaacaaggtttccccatgaagcagggtgtcttgacccatggccgtgtccgcctgctactgagtaaggggcattcctgttacagaccaaggagaactggagaaagaaagagaaaatcagttcgtggttgcattgtggatgcaaatctgagcgttctcaacttggttattgtaaaaaaaggagagaaggatattcctggactgactgatactacagtgcctcgccgcctgggccccaaaagagctagcagaatccgcaaacttttcaatctctctaaagaagatgatgtccgccagtatgttgtaagaaagcccttaaataaagaaggtaagaaacctaggaccaaagcacccaagattcagcgtcttgttactccacgtgtcctgcagcacaaacggcggcgtattgctctgaagaagcagcgtaccaagaaaaataaagaagaggctgcagaatatgctaaacttttggccaagagaatgaaggaggctaaggagaagcgccaggaacaaattgcgaagagacgcagactttcctctctgcgagcttctacttctaagtctgaatccagtcagaaataagattttttgagtaacaaataaataagat

SEQ ID NO: 219272 - DNA, 939 bp, Homo Sapiens
  misc_feature (835)..(835): n is a, c, g, or t
  misc_feature (839)..(839): n is a, c, g, or t
  misc_feature (842)..(842): n is a, c, g, or t
  misc_feature (895)..(895): n is a, c, g, or t
  misc_feature (906)..(906): n is a, c, g, or t
  misc_feature (912)..(912): n is a, c, g, or t
  misc_feature (920)..(920): n is a, c, g, or t
accatgttgagtcctgccaacggggagcagctccacctggtgaactatgtggaggactacctggactccatcgagtccctgcctttcgacttgcagagaaatgtctcgctgatgcgggagatcgacgcgaaataccaagagatcctgaaggagctagacgagtgctacgagcgcttcagtcgcgagacagacggggcgcagaagcggcggatgctgcactgtgtgcagcgcgcgctgatccgcagccaggagctgggcgacgagaagatccagatcgtgagccagatggtggagctggtggagaaccgcacgcggcaggtggacagccacgtggagctgttcgaggcgcagcaggagctgggcgacacagcgggcaacagcggcaaggctggcgcggacaggcccaaaggcgaggcggcagcgcaggctgacaagcccaacagcaagcgctcacggcggcagcgcaacaacgagaaccgtgagaacgcgtccagcaaccacgaccacgacgacggcgcctcgggcacacccaaggagaagaaggccaagacctccaagaagaagaagcgctccaaggccaaggcggagcgagaggcgtcccctgccgacctccccatcgaccccaacgaacccacgtactgtctgtgcaaccaggtctcctatggggagatgatcggctgcgacaacgacgagtgccccatcgagtggttccacttctcgtgcgtggggctcaatcataaacccaagggcaagtggtactgtcccaagtgccggggggagaacgagaagaccatggacaagccctggagaaatccaaaaaagagagggcttacancagntantttgtggacaggcgcctggtgtgagaaggacaaataaaccgtgtattattacntgctgcctttnttgagngcaaggantgtaaatgtatttttttaa

SEQ ID NO: 219273 - DNA, 804 bp, Homo Sapiens
  misc_feature (743)..(743): n is a, c, g, or t
  misc_feature (748)..(748): n is a, c, g, or t
  misc_feature (763)..(764): n is a, c, g, or t
  misc_feature (768)..(768): n is a, c, g, or t
  misc_feature (778)..(778): n is a, c, g, or t
  misc_feature (784)..(785): n is a, c, g, or t
  misc_feature (789)..(789): n is a, c, g, or t
cttcaggagtcgctgtctctgaacttccagcctcagagaccgccgcccttgtccccgagggccatgggccgggtctcagggcttgtgccctctcgcttcctgacgctcctggcgcatctggtggtcgtcatcaccttattctggtcccggtgcccttccagctgtcactgaaatggctttattcgtcaccgtctttgggctgaaaaagaaacccttctgattaccttcatgacgggaacctaaggacgaagcctacaggggcaagggccgcttcgtattcctggaagaaggaaggcataggcttcggttttcccctcggaaactgcttctgctggaggatatgtgttggaataattacgtcttgagtctgggattatccgcattgtatttagtgctttgtaataaaatatgttttgtagtaacattaagacttatatacagttttaggggacaattgagatggctgaactactgaataaaaaaaaaacaacgctgttttctagtcctgcagaccgtaagatacttggtatcgcttctattttggttactacggtaggtgcctggcggaagggagtgggcggagatatgtaaatagaaagtgcgtacaggttagaacgtccggcacgtaactgatcggagcattctgggaagaagtaatttattccttttcggcagccgaatgaaaaaaaaatttaaaaaaatgtgcgagctaatatggcaaaacaactggaaggacgctaaanaatangattgctcataccanngcgntatgaactcnccctannttgnaacggaatctttttc

SEQ ID NO: 219274 - DNA, 940 bp, Homo Sapiens
  misc_feature (879)..(879): n is a, c, g, or t
  misc_feature (891)..(891): n is a, c, g, or t
  misc_feature (906)..(906): n is a, c, g, or t
gacagcattcgggccgagatgtctcgctccgtggccttagctgtgctcgcgctactctctctttctggcctggaggctatccagcgtactccaaagattcaggtttactcacgtcatccagcagagaatggaaagtcaaatttcctgaattgctatgtgtctgggtttcatccatccgacattgaagttgacttactgaagaatggagagagaattgaaaaagtggagcattcagacttgtctttcagcaaggactggtctttctatctcttgtactacactgaattcacccccactgaaaaagatgagtatgcctgccgtgtgaaccatgtgactttgtcacagcccaagatagttaagtgggatcgagacatgtaagcagcatcatggaggtttgaagatgccgcatttggattggatgaattccaaattctgcttgcttgctttttaatattgatatgcttatacacttacactttatgcacaaaatgtagggttataataatgttaacatggacatgatcttctttataattctactttgagtgctgtctccatgtttgatgtatctgagcaggttgctccacaggtagctctaggagggctggcaacttagaggtggggagcagagaattctcttatccaacatcaacatcttggtcagatttgaactcttcaatctcttgcactcaaagcttgttaagatagttaagcgtgcataagttaacttccaatttacatactctgcttagaatttgggggaaaatttagaaatataattgacaggattattggaaatttgttataatgaatgaaacattttgtcatataagattcatatttacttcttatacatttgataaagtaaggcatggttgnggttaatctggnttaattttgttcccnagttaaataatcataaaacttgaaaaaaaaaaaa

SEQ ID NO: 219275 - DNA, 641 bp, Homo Sapiens
ctcccagtccaggcagaggcgtgggtgaatcggcccacacgtactgcacagtgtgttgagtgagcacagatgctgtggggccaccctgtgggtccagggaagcacttcctagagaagaaatccaaacagggattccaagtcaacgaggcagaaagtgatgggaacagcatttgtcatagtcagacaggtgcctttcacagtgacatagagacagtgaggtggggttggaatttaggcctgagagaacggggacccagtggcatacagagtcttatccttgtcctacctttttgaaagagctaaattcagaggctgccaatatgttcataactcaaaaggatcacttatcccaataacttaggaaccgttggcatccatagccctaaatcggaaaatgccgaaatcagaatcatttccccctacattgatcacagtgacctttaatcaccttcagctccctggtctcctagagccacgggtcagcccctcactgccctcctccaaagacaagtctgctcagaatgtcactgaaactctgagcatccactcaacaagcctccatcttcttactttctcatcttttctcttttaggcctgaagaagtcagtgatttatagttcactaaaactgcacaaaatgtg

SEQ ID NO: 219276 - DNA, 643 bp, Homo Sapiens
cgctgaaacgacaggggaaaggaggtcttactgagcaccgtcccagcatccggacaccacagcggcccttcgctccacgcagaaaaccacacttctcaaaccttcactcaacacttccttccccaaagccagaagatgcacaaggaggaacatgaggtggctgtgctgggggcaccccccagcaccatccttccaaggtccaccgtgatcaacatccacagcgagacctccgtgcccgaccatgtcgtctggtccctgttcaacaccctcttcttgaactggtgctgtctgggcttcatagcattcgcctactccgtgaagtctagggacaggaagatggttggcgacgtgaccggggcccaggcctatgcctccaccgccaagtgcctgaacatctgggccctgattctgggcatcctcatgaccattggattcatcctgttactggtattcggctctgtgacagtctaccatattatgttacagataatacaggaaaaacggggttactagtagccgcccatagcctgcaacctttgcactccactgtgcaatgctggccctgcacgctggggctgttgcccctgcccccttggtcctgcccctagatacagcagtttatacccacacacctgtctacagt

SEQ ID NO: 219277 - DNA, 557 bp, Homo Sapiens
ctcgggaggctgaggcaagagaatggcatgaacccaggaggcggagcttgcagtgagctgagatcgcgccactgcactcctgcctgggtgacagagtgagactccatctcaaaaaaaaaaaacaaaaacaacaacaacaacaacaaaaaacaaccagagaaatagcacttgttaactacaattgtgactctaggtaaacttgggccttaatatggttagacaagaagggttttaggtaacttgcctttttagatcctatttaggcttattagtctatattctacattcttgcacgatggaaattactagagaagtgggataattctttgttgtggggaaaataaaatttgttgtgaaaatatactgtattttaaaatatttagaaagattataaataactggagaaaagataatttcatatactaatatgatggaattagcctagcagatgttaaaaatcctttctgaaaattataatctaaaattatttgggaaattacaatggaactgaataatctgtacgttggtatattaaagccatttttatattgtgaaaa

SEQ ID NO: 219278 - DNA, 729 bp, Homo Sapiens
cggagcccgcgatggccgaacctgctcttgtcgcggctgaatctctcgcgggcagcagggcgcgcgctgcacgcacagtactaggtcaggtggtgctcccgggtgaggagctgctcctgccggaacaggaggacgcggaaggccctgggggtgcagtggagcgaccgttgagcctgaatgctagagcgtgctcgcgggtgcgcgttgtatgcggtccgggccttcggcgctgtggggaccgcctgctggtcaccaagtgcggccgcctccgtcacaaggagcccggcagtggcagcggcggcggtgtttactgggtggactctcagcagaagcggtatgttccagtaaaaggagaccatgtgattggcatagtgacagctaaatctggagatatattcaaagttgatgttggagggagtgagccagcttctttgtcttacttgtcatttgaaggtgcaactaaaagaaacagaccaaatgtgcaggttggagatctcatctatggccaatttgtggttgctaataaagacatggaaccagagatggtctgtattgacagctgtggacgagccaatggaatgggtgtcattggacaggatggtctgctttttaaagtgactctgggcttaattagaaagctattagctccagattgtgaaatcatacaggaagtgggaaaactctatccactggagatagtatttggaatgaatggaagaatatgggtta

SEQ ID NO: 219279 - DNA, 598 bp, Homo Sapiens
cgtccgcccaccctgtccttggggcccgtccttactgtgctagcaggctgaacaattttgcgggaatatgggaatttttctttggacgcagtcatctcattcctatgaatgtatccaaatggagcctccccctagaaagagagggggtatttgattaaagatgcatattgcagcagtgcagcaaaagtactgaagctttcatagtgtctactagtagcaggtaacaagtcctgcttggatactactctaagtacaggacacccactcaatggaataatatggagtcatcttataattatgaagacttgtcatgacatgacatcatattaagcagagcacaactcaaaattgtatcagtgttgtataaaaattatgaatcggcagaaatgtggaaaaaggaaaacttgtaatttgttcaaagagagtcttgttttttgtttttttttttggactgtcttggtacagttatgatttgtgaagtaaataagaaatacaactcagttgaaaaatggcagaagtcagataattcaaaagtaatattaataaaaatttctcagaagggaaaacactgtggctaaaagtaaaaaaaaaaaaaaag

SEQ ID NO: 219280 - DNA, 696 bp, Homo Sapiens
gatcgcgagcggccgccctccttttttttttttaagatgaagacagtaatataatattttggtacaaaaacagctgcaggaagaggtggaggggggcctgtcattatgtttcccccccaccccccaacgaaaggaaaactaagactcccaacataaacagggccttgaggggggggattacaggcacttgggcatggagtcttcggctgcaggaagcactccgcttattcttcaggaatgggaaaggcgtgacccaacgagagcatctgtctcagagctccactcagggtcacccctctccagaggccggtatggggtggcttcagacttccactgcacgacctggagcaccaagaccacacaccacaataccaaattcacccaagaagaggtttcagcattgtgtaggttggagtaaaactgcagagcagttccagggggtgtccatggaattttctgggcttcagaacagctaattgtagtgttcaaggagatgatggagttgcagagagacctggtgccaaatcgaaggatacaggcagacaccaagaccaggaagacggctatagctgagatggccagtgcaatgcgcagccctatagcacctctgtgggagtcctcgatgcagctgctgtagatccagaagagcaaaagcaggaggcagtagagggccaagaggccagaggccccagctac

SEQ ID NO: 219281 - DNA, 642 bp, Homo Sapiens
cgtccggtcgactcctgtgaggtatggtgctttttgcagatgcagtgtggctctggatagcaccttatggacagttgtgtccccaaggaaggatgagaatagctactgaagtcctaaagagcaagcctaactcaagccattggcacacaggcattagacagaaagctggaagttgaaatggtggagtccaacttgcctggaccagcttaatggttctgctcctggtaacgtttttatccatggatgacttgcttgggtaaggacatgaagacagttcctgtcataccttttaaaggtatggagagtcggcttgactacactgtgtggagcaagttttaaagaagcaaaggactcagaattcatgattgaagaaatgcaggcagacctgttatcctaaactagggtttttaatgaccacaacaagcaagcatgcagcttactgcttgaaagggtcttgcctcacccaagctagagtgcagtggcctttgaagcttactacagcctcaaacttctgggctcaagtgatcctcagcctcccagtggtctttgtagactgcctgatggagtctcatggcacaagaagattaaaacagtgtctccaattttaataaatttttgcaatccaaaaaaaaaaaaaaaaag

SEQ ID NO: 219282 - DNA, 686 bp, Homo Sapiens
aacaaactttggtgaaatttcaggaattatagccattgaaatggataagggaacctatatacatgcactcgacaatggtctttttaccctgggagctccacacaaagaagttgatgagggccctagtcctccagagcagtttacggctgtcaaattatctgattccagaattgccctgaagtctggctatggaaaatatcttggtataaattcagatggacttgttgttgggcgttcagatgcaattggaccaagagaacaatgggaaccagtctttcaaaatgggaaaatggctttgttggcctcaaatagctgctttattagatgcaatgaagcaggggacatagaagcaaaaagtaaaacagcaggagaagaagaaatgatcaagattagatcctgtgctgaaagagaaaccaagaaaaaagatgacattccagaagaagacaaaggaaatgtaaaacaatgtgaaatcaattatgtaaagaaatttcagagcttccaagaccacaaacttaaaataagtaaagaagacagtaaaattcttaaaaaggctcggaaagatggatttttgcatgagacgcttctggacaggagagccaaattgaaagccgacagatactgcaagtgactgggatttttgtttctgccttatctttctgtgtttttttctgaataaaatattcaga

SEQ ID NO: 219283 - DNA, 747 bp, Homo Sapiens
gcatttcagcatatgtaaaaaaaaacataaaaaagggaattgacatgtcacatatcaaatgaatggaaactttgttgaaactttaaaaagcaaatttactccaaagacttgtattggaaattacatacctttttttttttttttaaaggactacagattatttttaatgactaaattggagtgatacttcttacactaaaaattatttcttaggcattctgaatctgggatgagaaacaggattgtttcacaatagtaagcacataatttttaaggccaaggcacatttgactcctgagatgaattttttgtggtcataatcaaatacttagttgtttttgatgccccaaaataaagtgagaatggtaatttgccaggaattcttcataacagtatcttacaaaaaacgtgttgctctcttcacagtattatgtgtaaagtcattgtttaaagcacgaatgttccctctggggtacttgttaaagctaaatttattttgcttccctccacttagaagtgctgcacactttacagcagcttcctttctttccatggcactgcctagttaacagaagtcttataaaaatttaaaaagacacatttcttacaaaaaagagttgaatgaggtaaaatggcattagatggctctatattttttaaagctatgtaattgttcagcgtcacttttctaagtacttatacatatctaaacatgtcttcatggtttatattttcacttatatatgc

SEQ ID NO: 219284 - DNA, 669 bp, Homo Sapiens
cgtccgattggatttggtgattgataatggtgttactgctctggagactttttttcccagtgggattgatgcgtatcgcacagccccttggccacttgatcaagcacagagaaacttacagcctgaggcattggtgcctgcacacccaagttatgttgggccatggcgatgagacagctcctctactcatctttctgaaaaagccatcttgccacatctaataaataatcttactaagattatttaatcttatggcccaattataaaagccaagtgataaaagcaactgcctctcgttctacaaatatttattctgtacgtactattctgtgcaaagcacaatgggtatatatacatgtgtaaataatgtgcctttcagaagcctaacaccgtccaacatcaaggtagaggaaccgtccagatgcaagagataagctacagttcttatccttggcctcttgaagtattgattatcctccagggctttatgattcatagggcctaataagaacctttcttttatgagtatagtaatctttgtatataattctggcttttcccagtacttgagtaaaatactgaattgagacaatacggaagttcatttctctgctcctttccttcctgatctcaggtacttgctaaagaagctcctccagcttcaggctc

SEQ ID NO: 219285 - DNA, 600 bp, Homo Sapiens
cgtccggagctcatagagaaatgcttggagtctatgtgtcaaggtgaggaagcagagcttcagctgcctgggcactctggacctcctgtcaggctcacactggcatccttcactcaaggccgagactcctgggagctggagactagcgagaaggaagccctggccagggaagaacgtgcaaggggcacagaactatttcgagctgggaaccctgaaggagctgcccgatgctatggacgggctcttcggctgctcctgactttacccccacctggccctccagaacgaactgtccttcatgccaatctggctgcctgtcagttgttgctagggcagcctcagttggcagcccagagctgtgaccgggtgttggagcgggagcctggccatttaaaggccttataccgaaggggggttgcccaggctgcccttgggaacctggaaaaagcaactgctgacctcaagaaggtgctggcgatagatcccaaaaaccgggcagcccaggaggaactggggaaggtggtcattcaggggaagaaccaggatgcagggctggctcagggtctgcgcaagatgtttggctgattaaaagttaaacct

SEQ ID NO: 219286 - DNA, 653 bp, Homo Sapiens
cgtccgcggctcggaggaggccaaggtgcaacttccttcggtcgtcccgaatccgggttcatccgacaccagccgcctccaccatgccgccgaagttcgaccccaacgagatcaaagtcgtatacctgaggtgcaccggaggtgaagtcggtgccacttctgccctggcccccaagatcggccccctgggtctgtctccaaaaaaagttggtgatgacattgccaaggcaacgggtgactggaagggcctgaggattacagtgaaactgaccattcagaacagacaggcccagattgaggtggtgccttctgcctctgccctgatcatcaaagccctcaaggaaccaccaagagacagaaagaaacagaaaaacattaaacacagtgggaatatcacttttgatgagattgtcaacattgctcgacagatgcggcaccgatccttagccagagaactctctggaaccattaaagagatcctggggactgcccagtcagtgggctgtaatgttgatggccgccatcctcatgacatcatcgatgacatcaacagtggtgctgtggaatgcccagccagttaagcacaaaggaaaacatttcaataaaggatcatttgacaactggtgaaaaaaaaaaaaaaaaaaaaaaaaaag

SEQ ID NO: 219287 - DNA, 764 bp, Homo Sapiens
cgtccggtgatgcaagttcaggttttcatccttgtcatttcgtacatatgagagggttgccttttcgtgcaactgaaaatgacattgctaatttcttctcaccactaaatccaatacgagttcatattgatattggagctgatggcagagccacaggagaagcagatgtagagtttgtgacacatgaagatgcagtagctgccatgtctaaagataaaaataacatgcaacatcgatatattgaactcttcttgaattctactcctggaggcggctctggcatgggaggttctggaatgggaggctacggaagagatggaatggataatcagggaggctatggatcagttggaagaatgggaatggggaacaattacagtggaggatatggtactcctgatggtttgggtggttatggccgtggtggtggaggcagtggaggttactatgggcaaggcggcatgagtggaggtggatggcgtgggatgtactgaaagcaaaaacaccaacatacaagtcttgacaacagcatctggtctactagactttcttacagatttaatttcttttgtattttaagaactttataatgactgaaggaatgtgttttcaaaatattatttggtaaagcaacagattgtgatgggaaaatgttttctgtaggtttatttgttgcatactttgacttaaaataaattttatattcaaacactgatgttgatactttttatatactagttactcctaaagatgtgctgccttca

SEQ ID NO: 219288 - DNA, 743 bp, Homo Sapiens
cgtccggacagtcctgtggcggtacactggctttcgaccatcgaatcttgcgaacaacacgatacttgttaagtggctaccccaaaacgatctgcttggtcacccgatgacccgtgcctttatcacccatgctggttcccatggtgtttatgaaagcatatgcaatggcgttcccatggtgatgatgcccttgtttggtgatcagatggacaatgcaaagcgcatggagactaagggagctggagtgaccctgaatgttctggaaatgacttctgaagatttagaaaatgctctaaaagcagtcatcaatgacaaaagttacaaggagaacatcatgcgcctctccagccttcacaaggaccgcccggtggagccgctggacctggccgtgttctgggtggagtttgtgatgaggcacaagggcgcgccacacctgcgccccgcagcccacgacctcacctggtaccagtaccattccttggacgtgattggtttcctcttggccgtcgtgctgacagtggccttcatcacctttaaatgttgtgcttatggctaccggaaatgcttggggaaaaaagggcgagttaagaaagcccacaaatccaagacccattgagaagtgggtgggaaataaggtaaaattttgaaccattccctagtcatttccaaacttgaaaacagaatcagtgttaaattcattttattcttattaaggaaatactttgcataaattaatcagcccc

SEQ ID NO: 219289 - DNA, 717 bp, Homo Sapiens
cgtgaaaatctaccaactcatggaccacttaagatggactgcttcatctgctgtatcctctcccatggagacaagggcatcatctatggcactgatggacaggaggcccccatctatgagctgacatctcagttcactggtttgaagtgcccttcccttgctggaaaacccaaagtgttttttattcaggcttgtcagggggataactaccagaaaggtatacctgttgagactgattcagaggagcaaccctatttagaaatggatttatcatcacctcaaacgagatatatcccggatgaggctgactttctgctggggatggccactgtgaataactgtgtttcctaccgaaaccctgcagagggaacctggtacatccagtcactttgccagagcctgagagagcgatgtcctcgaggcgatgatattctcaccatcctgactgaagtgaactatgaagtaagcaacaaggatgacaagaaaaacatggggaaacagatgcctcagcctactttcacactaagaaaaaaacttgtcttcccttctgattgatggtgctattttgtttgttttgttttgttttgtttttttgagacggaatctcgctctgtcgcccaggctggagtgcagtggcgtgatctcggctcaccgcaagctccgcctcccgggttcacgccattctcctgcctcagcctcccgagtagctgggactac

SEQ ID NO: 219290 - DNA, 611 bp, Homo Sapiens
tacccttgaactaaacacaatgaaacaagcaatgaaagaactacagttaaaacttaagggaatggaaaaagagaagagaaagctcaaagaggctgagaaggcgtcgtcacaggaagttgctgcacctgaattactttatctgcgaaaacaagctcaagaactggtggatgaaaatgatggattgaaaatgactgtccatcgtttgaatgtagaactcagtcgatatcagacaaaattcaggcatttgtccaaggaagagagcttaaatattgaaggcctcccatccaagggccctataccaccctggttgttggatataaagtacctgtcaccattgttgctggcttatgaagatatgatgaaagagaaggacgagctcaatgccaccctcaaggcgtcagcttcagactcaagcaaaactggttttagaggaaaacaagttgttgctggagcagttggagattcagcaaaggaaagccaaggacagccaccaggagcgcctccaagaagtttctaagctgactaaacaactaatgctcctggaggcaaaaacccacggccaggaaaaggagctggcggagaacagggaacagctggagattttacgtgcc

SEQ ID NO: 219291 - DNA, 662 bp, Homo Sapiens
ccgaaagcgattaaaagacatctttcctcttttggcatctacataatatcagatattacggatgttagattgcatctcagtgttaaatctttactgatagatgtacttaagtaaatcatgaaaattctacttgtaactatagaagtgaattgtggacgtaaaatggttgtgctatttggataatggcactaggcagcatttgtatagtaactaatggcaaaaattcatggctagtgatgtataaaataaaatattctttgcagtaaaatattccctttgttaatgttatagaaggggggatacaaaaaggaactaacaatttgtatggcagtgtcagatatttttattttagtatttcctgttttggtttatttgcatcttagaagagcataatgacattgtttgatgaagcctaattatgctggactgttttgacctggtttaacccttctgataggtagttgtggatgctggggatgagaactgaataatctttgcctggagtgacactacactctagaatttccactttggagaatactcagttccaacttgtgattcctgatagaacagactttacttttctagcccagcattgatctagaagcagaggaatcccagcgccttttaaaagttgttatgtggttttcttttaaaagctc

SEQ ID NO: 219292 - DNA, 692 bp, Homo Sapiens
cgagcaacctgcctatgccccaaccaccatagagcaccagccgcaccccaactaccccgcccagaagtaccattcccggagtaataaatccagttggagcagcagtgatgagaagaggggatcgacacgttccgatcacaacaccagtaccagcacgaagagcctcctcccgaaagagtctcggctggacaccttctgggactagcagtgaatcgggacacaaaccacccaccccattgggagaaaaacccagacgccaggaaaagaagaaacaacaaaggcaggagaacagccactttcagacttgaaaatgacaaaaccctcagttgagcctgagcccccggcgcgggggctgctacactacaggacacccagcatcggctttgactgcagactgttcacccacacgagccctgtgcttttggtgtaaataatgtacaatttgtggatgtcattgaatctagaggactttcccctttttatatttgtattaactttaacttattaaaaaaaaaaaaagaaaaagaaaaacgatttaaaaaaaaaaaaaaaagcaaccaaccccaacaacaaaaaagaatgttttggtattggagaagggatggtcagttagcctgtctgtcacacgacggaatggatactgggcccggggaccactttcatactcacgtcctcatccttggatacccagg

SEQ ID NO: 219293 - DNA, 656 bp, Homo Sapiens
ctgccaccctgcagctcgacggcctcgccagggccccaggccagcccaagatcgaccacctgcggaggctgcaccttggcgcttgccccacggaggaatgcaaggcctgcaccaggtgcggctgtgtcaccatgctcaagtcgcccaacagaaccacggcggtgaagcagtgggagcagcgctggatcaagaactgcctgtgcggtgggctctggtggcgggtgcccctcagctacccctgagcccagctgcccctcagctactcctcagctacccctcagctgcccctgagcccggctgctgcaagagccaccgctcgccctggactctcctcggcgcggttaacctcagcccgccctgcagggctgttgaaggccgtgggccggacgcctgcgtgaccagcagagcttctgaggaagcccctgcctttgtccagctgggcccgcagtccacacaccactctcccaggacccccagatccctggaccatctgcatccagaggaccgtccgtgacggccgggggtccaggcggaccttgtggtgacccggctcgggcgtctcctcggtttccttgcctcacccgcggagagcgctgaacctggacaagcagcggctgggaaggacaggtccaataaacgccctctgcgcccaaaaa

SEQ ID NO: 219294 - DNA, 710 bp, Homo Sapiens
tgaaattgacgagcaacaggggtgctgtgagcaggaacgagtatttgaacttgaacaggaaaacaaaggcttgagagagatgcttcaaataactcgagaatcagttttgaacctaaggagagatgatgcgtcggaaagtacttctttgtcagcatgagtgaccaagagtgatttgaggctgaggaagagctgaagaggttctgagtctgggagcttcttacatggctccaagatggtcagataagtgaatgaatgaatggacagaaaattcaatcctttatttgtttcgctgtaaatatgtacagtgcacgggctatgagatagcaacaaaaaatgcatagttaatggtcatagactttattccaaaacataattggaaaatagaaactgagccattgccaaatggtaaagaaatgaaaagttttcacagtgactactgaatataccaagagcttttggcagtactgctggctttctgggtgattaattaggtaaacttgaatattcccagtaaatgtttgagaatgcataaaattataccaatttaaaaatataaatttttgccactgttttgtgaacggaggatttgtacgctaaatttcatccttatttggcgtcaaagttgatgcaaagtttatgtaccatgagacttctagtgattgcctactttcacatttatttaaatttttgtgaaagaaaatacagtttta

SEQ ID NO: 219295 - DNA, 628 bp, Homo Sapiens
aactctaagttgcaagcgaagtcaaaactgatgaaaatttatttagaaaaatctaaaaattctggttttaaatatgagaatcagtggaaaataagggtataattttgtaggtcatatgattgaagaaaatattattttaacaatgtaaagcaatatgatttgttactataattaacctgtataaaagatacattttatggtggtttcagtaggtcattttaaaaaccaatgtgcattagttttcaagtataaggtttaagtaatttggtttaataatcagaaaatattcaatacagtgttggatattctgtcatgcactatttttcagttgacaatttctgtattttaattgaatactgtttcttcagtcatggttattgcactttatcctgaataataattcagaaattgggttttggttcagtgattctcaagaaaaagatctcttgcccatttagaagtgtatcaaaatctcataaggaatgagggagagaagggggctgtagagtttgaaaaagcatattcaatattaaaatagttttatatttgggaaggcaaaaatgaatctattgttttgcaatataggttataaacaggcaaaatgcaataaaatatatatctggttgta

SEQ ID NO: 219296 - DNA, 718 bp, Homo Sapiens
ggaaaacagctggtccttttatctaaaactcagattggtcacataaatgccacggcattccgaagttttgattttgattaacattgacaggattactgtgtgtttaattttttaaaaactgaacactgtgattatggggttttgtaatttagcagaactcttactggtagaaaaaatagacctgaattatgtgtaactttttggaaggtttaatctgatatcaaaataatcattgaaatacaattccattgtaaagttgtacagaaagttatagagattatattgtgatgctggaacttggagtgagacacacatcatttggcatttgagttgaatggtaattcacagtaatgctgccgttgttcgggacttaaagacacttgacctgtttgggctgttgccacttaaaagttcatgaccacaaatgtccacagtgtcttcctctgaggaaactcgaatcctgaaatggaaattctttgtggcagataactggcttatgacaccttgaaaagttcaagtgctcatataacacaccacactgaaccccctttcctacagcaatatgttcactatgttaccaatttgcaacttgtgcttcaatagtggaatctactttcattgttaacactgagctaaagaaaaaaagccgtgtgttttatgaatgaccttatctgtttcctggataatacctttaagaataatgtcctgagtcaggcgt

SEQ ID NO: 219297 - DNA, 672 bp, Homo Sapiens
ccctgggccaccttttcggaatctacttcactggctgctccatgaacccagcccgctcttttggccctgcggtggtcatgaatcggttcagccccgctcactgggttttctgggtagggcccatcgtgggggcggtcctggctgccatcctttacttctacctgctcttccccaactccctgagcctgagtgagcgtgtggccatcatcaaaggcacgtatgagcctgacgaggactgggaggagcagcgggaagagcggaagaagaccatggagctgaccacccgctgaccagtgtcaggcaggggccagcccctcagcccctgagccaagggggaaaagaagaaaaagtacctaacacaagcttcctttttgcacaaccggtcctcttggctgaggaggaggagctggtcaccctggctgcacagttagagaggggagaaggaacccatgatgggactcctggggtaggggccaggggctggggtctgctggggacaggtctctctgggacagacctcagagattgtgaatgcagtgccaagctcacaggctgcaagggccaggccagaaaagggtgggcctgcagcctgcaccccccaccttccccaacccttcctcaagagctgaagggatcccagcccctaggtgggcagaggcagaccctccccag

SEQ ID NO: 219298 - DNA, 728 bp, Homo Sapiens
gaactgtgagggctcttataaggggcaggaagagcaaagctgtcctaggccaaccagagattcatctttcatgcagtgacatgttgataaaaaatgatggaagtaccaccaagaacagggaaggacaagccagaggctggaggaagatacctgcagaacacagacctgacaaaggatcagtatcaaaacatataagaattttgacaaatgaataaaaagagtacaaataacccaacataaagtcaaaaggcgtgatcaggcatttcacagaagcaaacacctttggtggatgcccatgaggagaggcgcagtcacatcagtgcccaggagatgcaaacccagatcccaggggtgtgcatcccacccgttctgcctgtaggatctgcaaacccggcaaaacctagttctagagagactggattcactgcatgtcttcatcactgctggagggagcgcagactgctatcgcctcttagaaaatgacttagttctcatgtaatttgggcattcacacatcctcatcctagatccagcttttccactcccgcacacgtactggaaaacctgtacaggaacatccactgcagcactgctcataccaaacacaacctacatgttctctgcacagagaggggagaagagccggtcagttcactcagtggactctgtgctcaatagtaggtgtgaataagccgcagccgcccagaccgcatgggccaacctcagtc

SEQ ID NO: 219299 - DNA, 705 bp, Homo Sapiens
gccgcctttttttttttttttctgtgttggagtcttgctttgttgcccatgctggagtgcagtgatgcaatctcagctcattgcaacctctgcttcctgggttcaagcaattctcctgtctcagcctaatttttgtatttttagtagagacggggtttcaccatattggtcaggctggtctcgagaccaggtaatccacctgatctcaggtaatccaaccaccttggcatcccaaagttctgggattacaggcatgagccaccacgcctggcccctcctgtatgctttctaagcatcctatatttctttgcactcagctaggctgtgccctcaggacctagttccaccccagaaacaaagaggggcactgtgaattgagaagaaatgaatgatggggcttgtgaggttcagcatttattcctcaggaggtgaccaggctggtcagaggcacctggatctggggacagctgagccctccctgctgctcaagactggcctgggcactgcagtggggccagtcctggcccctgacaactcaagctcctaggtccagtctagactccagggacctccaggccagcccaaggctctttgaagcaagaatctgagtctactaacctgccttgtccaacccaacaccccaaactcctcagctagctgcatccctggtggctacagcttcagatggctcccccatacaactca

SEQ ID NO: 219300 - DNA, 600 bp, Homo Sapiens
  misc_feature (567)..(569): n is a, c, g, or t
cgtccgctagttcagatcgcgagggccgctcgtatctagaacctacacgccgccgcttgtgctgcagccatgtctctagtgatccctgaaaagttccagcatattttgcgagtactcaacaccaacatcgatgggcggcggaaaatagcctttgccatcactgccattaagggtgtgggccgaagatatgctcatgtggtgttgaggaaagcagacattgacctcaccaagagggcgggagaactcactgaggatgaggtggaacgtgtgatcaccattatgcagaatccacgccagtacaagatcccagactggttcttgaacagacagaaggatgtaaaggatggaaaatacagccaggtcctagccaatggtctggacaacaagctccgtgaagacctggagcgactgaagaagattcgggcccatagagggctgcgtcacttctggggccttcgtgtccgaggccagcacaccaagaccactggccgccgtggccgcaccgtgggtgtgtccaagaagaaataagtctgtaggccttgtctgttaataaatagtttatatacnnnaaaaaaaaaaaaaaaaaaaaaaaaaaaaaag

SEQ ID NO: 219301 - DNA, 763 bp, Homo Sapiens
ctgaccgtgggaatgccgtggtgactgagagactagacgtgatgcctctgggggttgtgcgttggggatgcatgcgacagcccatgacccgaggcattctcagggtatctgtgctgtgtgcccgtgagaacatcttcccatgaccactcctgccctcctgccccgtgctggatcttccctccccagctgggatctgctcccaggcaactgtgtgaattttacattatttggagcctcatctgtgtcaggctataacattctatcctcatctgtaaaacttccccgtccattattccttgcactataacaactgtcaacacaccaactattaggaagttagtattttgctattgatcactgaataaacatcagagtattttaaaaaacagttctctagaaagaactgttataattaaaatgagtctgaaagatgaactctagtattaatgccctatatttgatggcactttatagttcataaaattaatttcaccccattctcattggacccatttcccaagtatttattgaggccctgtaacaaacatgtcaggaactcttctgggtgcttgagacacatccatgaataaaatagggggagaagctgttgacctcgtagagcttatgtctcgtggatgtacctgatcttcagaacccgtggatattcctgcaaatcctctgggcctgtattcattgctttgtcagcatcttgccctgaaatgcatttgtcacctacctctttgtactaaatggtctctgccct

SEQ ID NO: 219302 - DNA, 697 bp, Homo Sapiens
gacctggggcccagtcggccctcagagcccttgcccgctcgggtatgaagatcgggcggattggtaagtgcccccctctagctaatgcttgggtttattttgaagcattggccccaaaaagcacgtgctgtgcccagtggatgtgcagcggctggtctggtcacttttggcagttaagtttgttaagggaggctgcaagaggcaccttgtgacttaaaaatctctccctgaatatctctgtcaccttgatatgaatgtcctgtttcatttgtgaatctctgtcctacactgcctggtgcaggtaaaactgacaagagatgaattgtcctttcctccattcttgaggtcattgctattagcattttgtgtgtaccatctcctgcattgtaggatgttcagcatttggtttccgcctactaaatatcagttgggcatgccagtcgtgtgacagccaaaaatgaagtggggggtaccagcttctgttattaataccctcaggcctgtgatctcctggctccttacagctcttaggaagggaacagtagtctttccctgcacattgttctgtgcagttagtagcgacatacactgacgccccaggccaaagttcctactgtgtcctacttgaaggatgattttgttttcttgagacagtgtctggctctgttgcgtgggctggaattcagtggcacaatct

SEQ ID NO: 219303 - DNA, 604 bp, Homo Sapiens
tttttagttcaatatgattttatttaaaaatgtgtacagctgaaggagggatctgatcttttgttaaatgaaaccaattttcacggtatatatttggccattttagcttcgtagtgaataataacagaaaaggaagtttctgttcaagatcctcactccagcacactcagccaggtgcctggcaagatgacacatttcctggtctgaagctcacagccaatcctctcactgaagtgaaacaccaattctccaggcatacacacacatacgcacatcttattttcactgctctacacagggacctgagaatccttaattttaaagttgggaaaaacgtgaaaggattccttaactcattgtctgcgacaaatccaactacctgttaactcttaacaattgcaagtataaaatacttgaaatttacaagatgctccatttaatggaacaactcaaatgctaaaaaattaggtcaaataacatgctttaatatttttaaatgttacttaaaacttattgagacaagatacgcagcacattcttggtattataaactcctactgacgactgctacttgatggccaaaaacatttaaagaaagagaaga

SEQ ID NO: 219304 - DNA, 709 bp, Homo Sapiens
cgcaaagatggactctaccaagccctcttttagagccatcctcacctcattatggaactctgggagaagggcagcaaaaagggactcctgccactcagcagttgaagtatcaacaccagcccttgacccttgagtcctggctttggctgacccttctttgggtctcagtttctttctctgcaaacaagttgccatctggtttgccttccagcactaaagtaatggaactttgatgatgcctttgctgggcattatgtgtccatgccagggatgccacagggggccccagtccaggtggcctaacagcatctcagggaatgtccatctggagctggcaagacccctgcagacctcatagagcctcatctggtggccacagcagccaagcctagagccctccggatcccatccaggcgcaaagaggaataggagggacatggaaccatttgcctctggctgtgtcacagggtgagccccaaaattggggttcagcgtgggaggccacgtggattcttggctttgtacaggaagatctacaagagcaagccaacagagtaaagtggaaggaagtttattcagaaaataaaggagtatcacagctcttttagaatttgtctagcaggctttccagtttttaccagaaaacccctataaattaaaaattttttacttaaatttaagaattaaaaaaaatacaaaaaagaaaaaa

SEQ ID NO: 219305 - DNA, 552 bp, Homo Sapiens
cgtccgggaaagggtggttatcattttcctccttacaagtaggtacagatattcggttactacacgtgcacctgtagcagtatttctagaaacatccctttttgttgagaacctcccttgaatgtctgtcacactcacacctgacgggatggttactggattagagagtagatttggcacatcttttcttagtcttttgattcaaattcaaaacttaacagcacaaaccaggtcagagttactttcggttagaatttattgccatttattcctttttataaatttctatagattatactgttatttttatgttattggcctagagctacacgtatatgggtttgtcctgagtccgttttcaaatgaccttgtgatagggaaatggttttgtccatgttcttggaaatacttgtgtatgtacagaaggaagggagggattatttttctacaaagtaatttatgatttctaattttctaatgtgccttggatatgtgccaaatgatggaaaagaaacagtaaactttatgattcttaaaaaaaaaaaaaaaaag

SEQ ID NO: 219306 - DNA, 688 bp, Homo Sapiens
agaacacagtggacttcctgtcctgattctcaaaaattattttctctgtatgattaaaagtttattccatttattttagtttgtgtttacttgattttgaggaagaaaatatttgactttgtgtaaagagtagggtatcagggtgtcttttctgcggtgggagatgtgtatatatatagtattttggtgtatagtagaaaataagctttgtgcatctgtatttgagatatgttaatgacgtggagtaaagtcagctgtaagactctggaggcaaacaagttgtatatggttcatatggctctatggggaatttaattacctttctgggcactttttttttttttttttttttaagtaatggtgaaatggtcccattggagagtctcctaaatagaccttccaggcagaaccgcaagctcaaaatctttgtatagttttgaaaattgaggagtagctttgtttggaagcctttctggtggtggtttttgttgttgttgttgttttgttgttttactatatgtaatacaagcctacagtatttgcactaaagaaagcttgttagaaaaagcttgctgctatggaagaaagaacatattaaaacttctttcccttgcgatttttttgggggaggggggttagcatttccactttcagttgagtagcattttgtagaataaaatgaattaag

SEQ ID NO: 219307 - DNA, 614 bp, Homo Sapiens
gatttagagtttttagattgtgggattgtaataatatgggattctcatggttacatcatgttaaatcacactgttcagtctttaaaacttggtgttttaaaatttgtctcattgtgatagccagaaacaaggaataaacgtgatttcagtttaaactatatacaaatatcttctgtaattttgctgctctaatttttaggctataaattttgtaatagagcttatcagatcgcaaatttcctttgtttacaatctcatgtagtagggctcagataatttcttagctataaaccttttctcccactctcatattgtttcatttaaaatgtttaagctaagcctaaaaattgaaatcagttaagaatttggagagtttatcttaaatggaaatggtgtattcttttcaaagaattttgtaaccatctttacagtttctttgcttggaaaacttgggttgttaactaccagttaacaatggcattactttccaaaacgttatctaatgggcccaatgtgtacctcaagataaacacagtatgttatgtctaaaaatttccttgtctgttgatttaaatggttctgaaatgtctgtaataaagaaattttcaaagtta

SEQ ID NO: 219308 - DNA, 645 bp, Homo Sapiens
cgtccggcgcttcgggagccgcggcttatggtgtagacatggccaagtccaagaaccacaccacacacaaccagtcccgaaaatggcacagaaatggtatcaagaaaccccgatcacaaagatacgaatctcttaagggggtggaccccaagttcctgaggaacatgcgctttgccaagaagcacaacaaaaagggcctaaagaagatgcaggccaacaatgccaaggccatgagtgcacgtgccgaggctatcaaggccctcgtaaagcccaaggaggttaagcccaagatcccaaagggtgtcagccgcaagctcgatcgacttgcctacattgcccaccccaagcttgggaagcgtgctcgtgcccgtattgccaaggggctcaggctgtgccggccaaaggccaaggccaaggccaaggccaaggatcaaaccaaggcccaggctgcagccccagcttcagttccagctcaggctcccaaacgtacccaggcccctacaaaggcttcagagtagatatctctgccaacatgaggacagaaggactggtgcgaccccccacccccgcccctgggctaccatctgcatggggctggggtcctcctgtgctatttgtacaaataaacctgaggcaggaaaaaaa

SEQ ID NO: 219309 - DNA, 694 bp, Homo Sapiens
  misc_feature (597)..(597): n is a, c, g, or t
ctggcacaagcgccgcaaaaccgggggcaagagaaagccctaccacaagaagcggaagtatgagttggggcgcccagctgccaacaccaagattggcccccgccgcatccacacagtccgtgtgcggggaggtaacaagaaataccgtgccctgaggttggacgtggggaatttctcctggggctcagagtgttgtactcgtaaaacaaggatcatcgatgttgtctacaatgcatctaataacgagctggttcgtaccaagaccctggtgaagaattgcatcgtgctcatcgacagcacaccgtaccgacagtggtacgagtcccactatgcgctgcccctgggccgcaagaagggagccaagctgactcctgaggaagaagagattttaaacaaaaaacgatctaaaaaaattcagaagaaatatgatgaaaggaaaaagaatgccaaaatcagcagtctcctggaggagcagttccagcagggcaagcttcttgcgtgcatcgcttcaaggccgggacagtgtggccgagcagatggctatgtgctagagggcaaagagttggagttctatcttaggaaaatcaaggcccgcanaggcaaataaatccttgttttgtcttcacccatgtaataaaggtgtttattgttttgttcccacatttaaaaaaaaaaaaaaaaaaaaaaaaaaaag

SEQ ID NO: 219310 - DNA, 716 bp, Homo Sapiens
gttaaagtgcgcattggtgggaaaggaactgctcgcagaaagaagaaggtggttcatagaacagccacagcagatgacaaaaaacttcagttctccttaaagaagttaggggtaaacaatatctctggtattgaagaggtgaatatgtttacaaaccaaggaacagtgatccactttaacaaccctaaagttcaggcatctctggcagcgaacactttcaccattacaggccatgctgagacaaagcagctgacagaaatgctacccagcatcttaaaccagcttggtgcggatagtctgactagtttaaggagactggccgaagctctgcccaaacaatctgtggatggaaaagcaccacttgctactggagaggatgatgatgatgaagttccagatcttgtggagaattttgatgaggcttccaagaatgaggcaaactgaattgagtcaacttctgaagataaaacctgaagaagttactgggagctgctattttatattatgactgctttttaagaaatttttgtttatggatctgataaaatctagatctctaatatttttaagcccaagccccttggacactgcagctcttttcagtttttgcttatacacaattcattctttgcagctaattaagccgaagaagcctgggaatcaagtttgaaacaaagattaataaagttctttgcctagtaaaaaaaaaaaaaaag

SEQ ID NO: 219311 - DNA, 527 bp, Homo Sapiens
cgtccgcgagctgtgcagttttagcgggtacatatctaccccggacacgggaggcgctacgccaggaccgacgggaaggttttccagtttcttaatgcgaaatgcgagtcggctttcctttccaagaggaatcctcggcagataaactggactgtcctctacagaaggaagcacaaaaagggacagtcggaagaaattcaaaagaaaagaacccgccgagcagtcaaattccagagggccattactggtgcatctcttgctgatataatggccaagaggaatcagaaacctgaagttagaaaggctcaacgagaacaagctatcagggctgctaaggaagcaaaaaaggctaagcaagcatctaaaaagactgcaatggctgctgctaaggcacctacaaaggcagcacctaagcaaaagattgtgaagcctgtgaaagtttcagctccccgagttggtggaaaacgctaaactggcagattagatttttaaataaagattggattataaaaaaaaaaaaaaaaaag

SEQ ID NO: 219312 - DNA, 582 bp, Homo Sapiens
cgggacgatgaacgcaaacttcgtactctttatgagaagcgtatggccacagaagttgctgctgacgctctgggtgaagaatggaagggttatgtggtccgaatcagtggtgggaacgacaaacaaggtttccccatgaagcagggtgtcttgacccatggccgtgtccgcctgctactgagtaaggggcattcctgttacagaccaaggagaactggagaaagaaagagaaaatcagttcgtggttgcattgtggatgcaaatctgagcgttctcaacttggttattgtaaaaaaaggagagaaggatattcctggactgactgatactacagtgcctcgccgcctgggccccaaaagagctagcagaatccgcaaacttttcaatctctctaaagaagatgatgtccgccagtatgttgtaagaaagcccttaaataaagaaggtaagaaacctaggaccaaagcacccaagattcagcgtcttgttactccacgtgtcctgcagcacaaacggcggcgtattgctctgaagaagcagcgtaccaagaaaaattaagaagaggctgcagaatatgctaaa

SEQ ID NO: 219313 - DNA, 620 bp, Homo Sapiens
tctcctgggccgcctggcggccatcgtggctaaacaggtactgctgggccggaaggtggtggtcgtacgctgtgaaggcatcaacatttctggcaatttctacagaaacaagttgaagtacctggctttcctccgcaagcggatgaacaccaacccttcccgaggcccctaccacttccgggcccccagccgcatcttctggcggaccgtgcgaggtatgctgccccacaaaaccaagcgaggccaggccgctctggaccgtctcaaggtgtttgacggcatcccaccgccctacgacaagaaaaagcggatggtggttcctgctgccctcaaggtcgtgcgtctgaagcctacaagaaagtttgcctatctggggcgcctggctcacgaggttggctggaagtaccaggcagtgacagccaccctggaggagaagaggaaagagaaagccaagatccactaccggaagaagaaacagctcatgaggctacggaaacaggccgagaagaacgtggagaagaaaattgacaaatacacagaggtcctcaagacccacggactcctggtctgagcccaataaagactgttaattcctaaaaaaaaaaaaaaaaaaaaaaaag

SEQ ID NO: 219314 - DNA, 541 bp, Homo Sapiens
gaagaaccggattgccatttatgaactcctttttaaggagggagtcatggtggccaagaaggatgtccacatgcctaagcacccggagctggcagacaagaatgtgcccaaccttcatgtcatgaaggccatgcagtctctcaagtcccgaggctacgtgaaggaacagtttgcctggagacatttctactggtaccttaccaatgagggtatccagtatctccgtgattaccttcatctgcccccggagattgtgcctgccaccctacgccgtagccgtccagagactggcaggcctcggcctaaaggtctggagggtgagcgacctgcgagactcacaagaggggaagctgacagagatacctacagacggagtgctgtgccacctggtgccgacaagaaagccgaggctggggctgggtcagcaaccgaattccagtttagaggcggatttggtcgtggacgtggtcagccacctcagtaaaattggagaggattcttttgcattgaataaacttacagccaaaaaaaaaaaaaaaag

SEQ ID NO: 219315 - DNA, 791 bp, Homo Sapiens
cgtccgggatttgctcgacttggacgaggactttcgctacagcttggctacctccagggccaagatgggtcgccgagctcaacaggagtcagcgcaggccgagaatcacctcaatggcaagaattcctctttgactctgactggagagacttcctctgctaaattacctcgctgccgacagggaggctgggcaggtgattccgtgaaggcttcgaagtttaggaggaaggcttctgaagaaatagaagatttccgcctcagaccacagagcctgaatggatcagattatggaggagatattcctatcattccggatctggaggaagtacaggaagaagactttgttttgcaggtggcagcccctcccagcatccagataaagcgggtgatgacctaccgtgacctggacaatgacctcatgaagtactcagccattcagacactggatggggagatcgacctgaaactcctcaccaaagtgctcgcgccggagcacgaagtccgggaggatgatgtcggctgggactgggaccatctgttcactgaggtgtcctcagaggtcctcactgagtgggacccactgcagacggagaaggaggaccctgcggggcaggccaggcacacctgagcccgtcacccatgctctagacatgaagaaatgcaatgagcttaaagctaaagaagcttgtaagcagctccgaatttttacctggaatattttgtaataaaaatatttatattcagtcaaccacattggataattcaattgcaataaattgcttattctgtgc

SEQ ID NO: 219316 - DNA, 555 bp, Homo Sapiens
ctagaacttttggccagcgtaccagggtggagatcaaacgaactgtggctgcaccatctgtcttcatcttcccgccatctgatgagcagttgaaatctggaactgcctctgttgtgtgcctgctgaataacttctatcccagagaggccaaagtacagtggaaggtggataacgccctccaatcgggtaactcccaggagagtgtcacagagcaggacagcaaggacagcacctacagcctcagcagcaccctgacgctgagcaaagcagactacgagaaacacaaagtctacgcctgcgaagtcacccatcagggcctgagctcgcccgtcacaaagagcttcaacaggggagagtgttagagggagaagtgcccccacctgctcctcagttccagcctgaccccctcccatcctttggcctctgaccctttttccacaggggacctacccctattgcggtcctccagctcatctttcacctcacccccctcctcctccttggctttaattatgctaatgttggaggagaatgaataaataaagtgaatctttg

SEQ ID NO: 219317 - DNA, 759 bp, Homo Sapiens
cgtccggtgtcataaagcacggaagcattgcatgccctggtgagtcactcagcagcacttagtacagaccagggcaggtcaccctttcactggggatgtgatagacttcctcgattgagaacggattaaagcaagtccctaaaatttcatttcgtgacttgatgacccatctggaaaaacagacacacagtcactcactgaagcatcaaaaccttgctagtcccaggtgactgcaactgcctgcctggaaccctgctgttgtctgcctctaaaccaagcaggtgcctggcagtcaggacagaccatcagtggggctggaggagaggaccctggtttaataaactttacactctcaccttgctctggtaactgcagaaatagggttatgatttatatggtacattatggaaaaatcacattaacgggccaggtacatcatagggtctcagtaagtgttactttccttctgccactaactttggcaattttttgtggatatttggaggaggagagagggaaggaaggaaggtcagagatgggaagactcactttgctgttagtgaaatgggatcctgagtcgggtttcaggggccactgtgctatggttagaattactacttggggaaaaaaaaaaactattaaaaaaaaaaaagattaaatcccagcacttcgggaggccaaggtgggcagatcacttgagcccaggagttcaggaccagcctgggcaacataaggaaacaccatctctaccaaaaatat

SEQ ID NO: 219318 - DNA, 810 bp, Homo Sapiens
ttgggtaaaacattgacactccaagaactgattcatccataattgaagctggatcaaagaaatcaggcttcagttctgttctctctcgtctgttctttgatggtggcaaatctatatccatggtgtcaaaatccattccctcattaagatcctcaatcctcccttctgaggacatcataacatcttccacaattggctcttcatcatcttccattaggcttgtgccacgccgattataatcaagaggtgtttgatgatgttcagtctgcattggataaacactcatgaagctatcctcaggccgtaatcttttgggctctctcataatagtggaggtgagttgtggtgtctgcatcataacaggggtgtgcagtgtttgttctctgcttaaccacatactgtcactactactactttcttcagtgagtgaaagctgcatgccctcaaccactttccgttttcctgtagatggttttgattttttactccgtactgttgacccccggctgctgattccactaatgactgacatggtgtcatcatcaccaccagctagcaaagaatttcggtaagacatcagtggaagccacacatcctctcttcggagtgacatctgaaaggtcatgaacttttccaagtaaacatacactgttcttttgtcttgtcgaagtagtttagaagaaaattcactcagatatcagaatgccaaatttaaaggtggatggctctccctgcgatagctctttaaagcaaattctatgccatcttgtgtagcatgacaatggcctctcttgttttcaactggatcca

SEQ ID NO: 219319 - DNA, 666 bp, Homo Sapiens
  misc_feature (645)..(645): n is a, c, g, or t
ttgggtaggctccagtctcggctacctctgctgggcggtagctcacaccccctttggttccccttctgtgctgccttctcatctgcacaaggaacgcgacgctggtgacagcaaaaaggaggccaaaaaccagggctaggatgtcaccagcagccaggcaggaattcagctggactggctcagcagcccgaggactgctgtccactccagcagggaaggaggcctcaatcactcgcccattcaaaggctgcgtcgctcggaagttcagctgtagccgagagtcaccaggtccccacagggtgtcagagagggtgtggagctgcttagcactcagcatcactgtctggttaaacacagtccagatgacaccctgggcacagggcggtgtagtcagagacccctcatattggaagtagcggctgaagtcagagggcaggagtgcagatatgtccagtcctgggacctgagtctctgagccttcctcagcgatttcttccaagcgagacagcaactgctcataggcactgttttcttccgggccctcctccagaaaggcggccaacacggccaggcctcccgggcgccccaggcctcgtcactctggcaaagcggtgctgaggtgaacacgtggactcggcaggaacngtggccttcacatgtgctcga

SEQ ID NO: 219320 - DNA, 645 bp, Homo Sapiens
  misc_feature (499)..(499): n is a, c, g, or t
  misc_feature (579)..(579): n is a, c, g, or t
ttcctgagacagagtcttgctctgttgcccaggctggagtgcaatggcacaatctcaactcactgcaacctccaccccctgagttcgagcaattctcctgccttggcctcccgagtagctgggattacaggcgcctgccaccatgcctggctaatttttgtatttttagtagagacggagtttcagcattttggccaggctgattttgaactgctgacctcaggtgatccacctgcctcagcctcccaaaatgctgggattacaggcatgagccactgcgcccagccgagagttttaaagaaggtgaaagctcttcccttttcctaacctagcctggccttgattctgttaataccaagcctgtgtgaattggagtggaaagcagaagtgctgaagggagccattgccagagggaagaacacaaacttcaaggccagatgctcagcggagctctcagaacagccaagccaggaggacagtcaggaggaccataggccangccaccaggaaccctgcagtgctaggggttccattcatgacaccgggagactgtgcacctctccgagtgatgggccccanatctagaacccgggctaggtcgattggccgtacttcactgcggacttgacttcttgagcaagaagc

SEQ ID NO: 219321 - DNA, 514 bp, Homo Sapiens; identical to SEQ ID NO: 60237

SEQ ID NO: 219322 - DNA, 463 bp, Homo Sapiens
ttttcatacaacactttaataaaaattcattatttatttataattacatgtacatacatatatgcatttgaatatctagaagaaactaccatttgcaatctcttttccatggttctaacctacttggaacataaccaagtgacaacatacaaacaagttctagattctaaacctgttttccactgcactgtaactgggggatgggactcagcaacagtgactccataagccagcaaatgattttcacctagagggagcaccagacttccaagagttattgggatgtgggaggggaacactagtttggaaaaaagaccttaaatgattttgatacttctccctacagtatatatgcttccctacccctcacggcgacctacagcaagagtatcaaagaaacaagtctacggatttgaaatggcatgttgcttgcactatatattttaatctaaagtttattaaa

SEQ ID NO: 219323 - DNA, 581 bp, Homo Sapiens; identical to SEQ ID NO: 58692
  misc_feature (10)..(10): n is a, c, g, or t
  misc_feature (14)..(14): n is a, c, g, or t

SEQ ID NO: 219324 - DNA, 541 bp, Homo Sapiens
tttaaggtttttagtttattctttcaaagcaggtctcctcatctcttaaacgctatacatatgaagtagataaaaactggtttcttttttggtagcatttaggatctacaaaagtgatccttcaattacttggaatttcaaaaaattgaggttacctagtaacaatgcaccagtagaacacaaaatactctgactttgtttagtctgtgggaaaagaaaaatctttaaactggaaagattttgtagtcttacaaagattacattggaattggaattactgtagttcgtttttccctctaggagggcagccatttctctaaaagttgtgtaaaagttaagactaggatttcaaaatgcaagcagatgttgatgaagcatacgaaatgggcaactccgtttctatttcggagccgcagcgactccgactttgtgccccaaccctgtaaagggcaaaacctcatcccttcggtgtaaactttcaagagaagtggggcagcacactttaggcgtttcaccaagaggctggcgacatgctaggtca

SEQ ID NO: 219325 - DNA, 595 bp, Homo Sapiens
ttttaaaatttaaaattttatttttttaccttttttttacatttttattttaaaataaacagtgtttccaaaaaacattgactacaagggggaaatgaggcaataaggttggaagaagggaaggactcaagaagaaatgctgaacctgcaaacacaatgatcagggagcatgcagagaggcccttgctgtgacactgtcctctcactgctactcctatgaagcccagtgactatgctgggacactggagctaaagggtcaaagagaagcatttcattcctaaaaggtgatgtcaatttgtacttagccccagcaatgtgaatccccctcttcacagtccaattctaagattccattcttaagaaattaccaaaaatagagccaaagagatatatacaagaaactttatcacatcatcattgataataaaagtatctgaaacaaccaaaattttcaacagtgtggggatggataaggtagaaccactagaaatctattttcaaagatttaaaaacataggaagttactcgtgataccatgttaatcagtgagagggtaaagttaggataccaacctgtatctatgtatgaccttca

SEQ ID NO: 219326 - DNA, 575 bp, Homo Sapiens
  misc_feature (438)..(438): n is a, c, g, or t
atcattttaggaggtttatttgccaaagcctcaggaggtcctgacgacaggggcccagggtggtcagggcacagcttggttttacgcatttttagggagacgtgagacatgaatcaatgtatgtaaaaagtacgtggttccgtccagaaaggtggggaccactcagggaggggcttcaggtcatgggtaggtgagacaaacagtggccttcttttgagtttctgatgagcttctccaaagaggcaatcagaacatgcatccatctctgtgagcagagggatgactttgagtagaatgggaggcaggtttgccctgaccagttctcaacttgaaggggtccaagctattttgctttcacagggggaaaggctggccactcaggaggggctgatcccgacctggccggtcccccttaacccagcccaggccgacacctgnggcagaagcctcagagaagctggtgggtgggtgtcgtcctcagccaggtgccggcagcgtttccagaggtgatacgtgggcaaggccaggagcagcagtcccagcaccgcactgctggtccacagagccgcgggcag

SEQ ID NO: 219327 - DNA, 552 bp, Homo Sapiens
tttaattttttaacttttaaattttattaaaatgttgggagtaatgcacggaatgaattccagacctacataaatacactggcagctgttggtaatttgcatttttatcagttttgaaagagcacaatgtacttcctgcatcttattttcagaatttgcatttttatcatctttggctatccactacataacatggagtacttgagtatctcattctttgaattttcatttttgattgtaaatcagatgatgtctggcaattttttctcatttttctctctctcaacctccaggtttacttgctcccatttcttcttggctctggatatatcttttcactttttgaatatgtttttgaaaaaggaattcgttttcgccaggctgaatcattatatgatgttgacgtatatttgtctggactgaggttgggtttgggttccctgttagcatggactttattgtaggacccatgcgtgggcctgctgcgggaaggtgcattcaacgcgacagtcctgacagcatctctttgaacgtggatataggatgcattct

SEQ ID NO: 219328 - DNA, 421 bp, Homo Sapiens
tttttttaatgtgcaggctattcaagttcaatagtaaaagctcaaaaatgaatgttctactccatgctgaaggagctgaaagctgccttcttcatattttgcactttctggtagttcccctgttttttctaattccctaaaattgtgtgggtggagtggagccctgcagttggggggtaacatggaccactgattttgccctttgaccctgcacaatgacctttgcatcagccaaactcattgccatgacaactctttgtactgtgtccgtgccacagatctgttggtcacattgttaatagtaaaggggacaagttggagacggtcaatttttacattttttgttgcaattttttcttcaatggttgtaagtagtttttttttttttttaataataaaagggttcactagttaatactct

SEQ ID NO: 219329 - DNA, 549 bp, Homo Sapiens
tgggtcagttttgacaatggcctcatatagagctcttcttcagcacattcaatacttaatcttatcaattttattatgaagttaattaaactaatatgtatcaaacgtcatattaattatgttgaatactagctaagagttaagaaatgtaaggcatgtgtcctatcttcaaggagcttaatatagttggggaggcaactataaagaaatgagatgattggttcaacttatgaaatgagtcatagttttcattccagaagtatgactctaaacttaaaacgtgtgacaataatgaaaaataattcctaacatggtacataattatcaaatgctgtgagttcagaaaagatgtttctgagtaattaagggattggggaggaggaagaccttgaaaaaccccgtgtgggatcatttagaagctacaaagcattgttagaatgaagagattcgggtgttagtctcaattctaacaaattaaggtagttaattctatcaaaaactggcagtgtaatgttgagcaagttactacctaggcctttactttttcaa

SEQ ID NO: 219330 - DNA, 451 bp, Homo Sapiens; identical to SEQ ID NO: 61253

SEQ ID NO: 219331 - DNA, 432 bp, Homo Sapiens
ttttaatttaaaaagtttatttgtattaaacattatttcgataataagatgacaaaggacttttgtccttcaacattgtagcttctctctgctcattaagtgtctgccaaggataatccaccaaggataatcctgaagacagtgttagtctttgatacagataagcattaacatttgccatccccaactgcattgcatttattttctttattataataattcaagcttcatgcttagatcactagaggacataaaacaaattaaaaaatcaactatactgcatttacaatgaatgaggtggtgcatttctcctgctttctttctttttttcttcatctgttactgcatataatcatcatataattttaacactgcatgaagctgctactatgacccaggtacctcacacgattaataggatttctaagactg

SEQ ID NO: 219332 - DNA, 540 bp, Homo Sapiens
ggctagttaataaagaggttaaagaggctacgtggatctgtcactgctttagcttaccattttcaattcagcaccaaagtgctcagaaagacaggctcagatcaggacgacttcttaaagggattcacaggcaatattactggcaaaatgattttccaaagctgagccacgcgccccaccctacagggaggggagtagaatcttatggcccagcattggcattgaggcatcttgctttttttcctcagaattccacaaaggcttaagagtgatctaaatgcctggctggaagctcaagtctaggagagctattttactgcactgttgagatgttctctgcaaggtagtcacagataataagcaatttagtagataattattctatacaagaattaatgttctctgaaacagtgattaatagaatcttcacatctggcctggctgggaggcttgggggcaggaaagggagggtggaaggatgggtagcacatcaaaatggtgatgaacctggcaaaacgacaatgctgctgtttttgtatc

SEQ ID NO: 219333 - DNA, 464 bp, Homo Sapiens; identical to SEQ ID NO: 57817

SEQ ID NO: 219334 - DNA, 480 bp, Homo Sapiens
ttcatatatgcacagtgcaggcagaaagtagaatgcatcttcaattgtcctataggctgcctgtaaccttttcatgggcaacttgttctaatgccaccagccaacccatgttttagtttgctggggctacattacaaagtaccacagactggagggcttaaacaacataaacttattgtctcacagatctggaggctaaaagtgtgagattgagaggctggctggcttggttccttctgagggctgtgaggggaggatccattccagacttctctccttggcttgctgatggctgtcttctctctctgtcttcacatcatcttccctctgggtgtcactgtgttcaaatttcccttttatagggacaggttagtaagattagggcccacccttatgacctcgttttaacttctataatgatctagtttccaaataagttacaccctgaagtactaaaggttaggacttcaacatgtgaat

SEQ ID NO: 219335 - DNA, 653 bp, Homo Sapiens; identical to SEQ ID NO: 48132

SEQ ID NO: 219336 - DNA, 520 bp, Homo Sapiens; identical to SEQ ID NO: 47306
  misc_feature (399)..(399): n is a, c, g, or t
  misc_feature (469)..(469): n is a, c, g, or t
  misc_feature (479)..(479): n is a, c, g, or t
  misc_feature (494)..(494): n is a, c, g, or t
  misc_feature (505)..(505): n is a, c, g, or t
  misc_feature (520)..(520): n is a, c, g, or t

SEQ ID NO: 219337 - DNA, 1000 bp, Homo Sapiens
gtaaacaccaagaatatgaacagaagctacttcaagaattatataaattaaatcccaattttcttcagctatctacgggttcagttgataaaaataagaacaaagtgacaccactgcagaggtacgatacccccattgacaaaccttcagattctctcagtatagggaacggtgataattcccagcagatatctaacagtgatacgccttcaccaccacctggtttgtcaaaatccaatccagtcatccccatcagttcatccaatcacagtgcacggtccccttttgaaggggcagtaacagagtcacagtcgttattctcagacaattttcgccatcccaaccctatcccaagtgggcttcctcctttccccagctccccacagacatccagtgactggcctacagcaccagaaccacagagcctcttcacatcagaaacaatcccagtatcatcctctacagactggcaagcagcttttggctttggttcttctaaacaaccagaggatgacttgggttttgatcccttcgatgtcactcgaaaagccttagcagaccttacagagccaattgagaggaagagactggcagtgctgaagagaagataggctcattcagtaggataatagatgtcgttgggtggtgggaagagataagctcctgagacgagcatgtggtatagcttaagagaggtgggtggccaggcgcggtggctcacgcctgtaatcccaacactttgggaggccaaggcaggcagatcacaaggtcaggagatcgagaccatcctggctaacacggtgaaaccccgtctctactaaaaatacaaaaaaattagctgggcgtggtggcgggcacctgtagccccagctactcgggaggctgaggcaggagaatggcgcgaacccaggaggtggagcttgcagtgagccgagatggtgccactgtgctccagcctgggcaacagagtgagactccgtctaaaaaaaaaaaaaaaaaa

SEQ ID NO: 219338 - DNA, 509 bp, Homo Sapiens
cagaggatcccaaagattttgagcatcacccaagacagtagttgttacaaaaggaatgtttgaatcgccaataagcatgtgtaaaagtgtttaaaatcattagttaacaaggaaatgcaaatttaagataccatttggtgcccaataaaatgagagaattgaatatattcacagaaagatatatgtgaatgtttatgacagttttattcatagttgccaaatgtccattagcacgagaacagacaaatggtgataatataatgaaatactattcagcaataaaaaggaacacaattttgggggtaaatctgaaaaacatattaagtaacagaaatcagacttaaaagaagacagttggtgggactgttcatagagcctgtatagaccatctacgtgaagtttaagaacaagcaccactaatcttcagtgatggagatcagaacatagttgtggcatgtggatgtatgtgtatgggtatgtcagagtggggagaaattgactggttaggg

SEQ ID NO: 219339 - DNA, 703 bp, Homo Sapiens
  misc_feature (17)..(18): n is a, c, g, or t
ccgacggacgcatcagnntatagtggagattatgactcatttatgggtgtgtttggggactcagaacaaagatgagggaatatccttaaagctctgtatgaaataacgaaaagcagtcacattttaataatagaagcttcctagcttactctttctgtaatcttcttttcctaaatgtaagagagcctcataattatgaggcctattactagagtaaggctgtcaaaggcagcaaaatgtctttctgttgggaagaataacataaacttgacatgtatggtgggggacagaaggtttcaaaagtttaagaatctgtgttgtcttaacaaatagatgcttctcaaggagcttacgctagtggttactctgtccagtcagggttttttcttctttaacttgggttcatttcctgatggcacacatgaagtttggatcatatggtttgactttagctatggtccttagctatggggagcagcatcagcgacctgtgacatgtaaattaaaaatacaatgccagggcccttccccagcccctctgatagagaacctcttggccatctgtatttttagatgttccaggttagtctgattaacacccttggttaagaaccattgggaggatctgatcgccagtttaaggggaccttcaagcctgtaggtctttatagtttaaaaaaaaaaaaggatttaaaaatcatgc

SEQ ID NO: 219340 - DNA, 302 bp, Homo Sapiens
agtgagccggaccagcaggctgggccccagattaagatgtcaagaacctagaaaacgggtggaggggatgctcctttatagcaggaaaggaattccattaattgtacaaattctcattaaatttcagctttggttcttcagaagaaacactcatataacttctgcagtctgctgtgtctgaacaccatctacctgaggcaggggcccaagtgtcccttcatcatcaaaggccaaaattggattcaaaggaatttctgggctctcactgttggtgacatcttaatctggggcccaagcctgct

SEQ ID NO: 219341 - DNA, 599 bp, Homo Sapiens
ggtaggactatttcttcactctgagaagtactgggctgagaaactgatggactgggctgagtgacaactgaaaaggacaagaacacaaatatgtcacgcattcactggctaacatttttaagtcaaaaaaggaagtatttacagagaaacaggaagatgcctgataaaaatgtttataagtattccttgaaaatacaagctttaaacagaatcttccattttaacatcagaacttgattcaaatctgagaaattcctggcaatcaccatactacttgcttctctaatttggtaaaatgatcgcttcactcaagaaattcctttaaaacactggtaaccgccagtactaaaaacaaaatcctaattctgtattaaagagctgggagatgttaatcatatgctcaggttttccacgttataatttcccaaatggcaacttttcaatccagggcgttcacattcattacatcacagtgaataacagtagcccaatttgagtttatggctataggagaaaaaatcctgtggatattaaaaccggcaaatttggccattaaaattcaaacattcatccctaaatcaggtagaatcaaaattcaa

SEQ ID NO: 219342 - DNA, 587 bp, Homo Sapiens
  misc_feature (345)..(345): n is a, c, g, or t
tgcttgattgtactgcagcaaagtggtgaaatagagacatatataagaaaccaatttttatgcaaaattatcctaaacactagttttataaatctgtgtgaaagaacactaagatgtgctttctaatggccatctataacattttctcaagaaatacaaaagaaaaaatagacaagaacatgtagctgttcaagcacatttcttttcttttttctttctttttttttttaaaagatacaaggtctgggctggggcacaggtggctcacaccgtgtaatcccagatacttggggcaggcggagaacaggcggatcaccgtgaggttgcagttggagaccagcctgnccaacatggtgaaaccttgtctctactaaaaatgcaaaaattagccgggcatgggggtacacgcctgtaatcccagctactggggaggctgaggcaggagaatcacttaacccagaagggggaggttgcagtgagccaagatcgcacggctgcactccagaggcaggcagatcacctgaggtcaagagttcgagaccagcctgtgcaacatggtgaaaccccgtctctactaaaaatgcaaa

SEQ ID NO: 219343 - DNA, 582 bp, Homo Sapiens
gaatcaaacattttcaaagagccaggttcctttcagtgcgaatgttgtaagaaaaaccaagatctgagtcctaggtgctactaagtcttagttacatttgggtgcactgcgccttaacacaccattactttataaaatacaaacaagagagatagttcaaataaaatctaaactcataattactgtgtgggtaagacgactcatacgccttaaactctcctcaaatatattttactgccagtggatagaagagcttggattcccacaccaaattcttagttcttaaatgtgctctcttcccacttatcatgctattggccatcggacaaagtgtacatttaactataggacaaagtgtacatttaactatggcaggatagtaaataacttttcctatggtctgggagtagactaagcagagaagctatggtagtatgattactttgctgtacccaaagacacctagtttaggacaagtgaaggctagaatccagtcctaaaatccaggtagtgttggctacctgtctggattaggggcctcttctcattctcataaatgtaccatctgttagtcaaaacata

SEQ ID NO: 219344 - DNA, 588 bp, Homo Sapiens
gctctgaggatcccaccatggtactgggatggattcgaattgacactgctgcgttgacactcctcagccggactgccgtgctgagaccatgccaggaaaatatagagctgatgctgagagactcagggatggccagctgatctaaggaccccagtttgggaactcatcaaataatcacaaaatcacaattctctgattttgagctcaatctctgcaggatgggtgaaaccacatggggttttggaggttgaataggagttctcctggagcaacttgagggtaataatgatgatgatataataataatagccactatttactgagtgtttactgtttcttatccctaatacataactcctcagatcaactctcatggatttgatcattggtggcccttggtgttaagttgctgactactcagtctcagaggacaccaccttgctgaggagtgggaggggacatatcacgatgtgggtggaggaggagagaaactagaacaggcaagcagatggccaggggaccttgagaacgtgcccacagaaggctttaagtatcagcgagatgccgtcaaaatgcaaatcttactgg

SEQ ID NO: 219345 - DNA, 710 bp, Homo Sapiens
gcccacactacttgtatgtagaagtgagtcaccggctggcaaatgggcatagctgctgggcagtggatgcagctccatgcagtgttattctcatgtgatacaggatctcattggcttctcacagcaatcctgtgcactataggtattgctcccgggaacagatgaggaaacaggagagtgcgagattacagtaattttttaaatgggaggatttgtgaaggtttcagacatacaccctctctcatatgtcaaggatatgaagtctaatgaatcccctaaagcagcaggggttggcaagctgtggcccgtggggccaaatcagcctactgcctgtttttgtaaataaagttttattggaacacagtcacacccatcatcaatgtattatctagggctgctttctgttcattggtagtttgctgagtagccacagcagagacaggcttgcaaagtgaaaatactatctggccctttacagaaaaaaagggtcagtgtccctgctctaaagaagtatgtgtgaggtgccctggccacttatgggaagaaaagctgagcctattcagcaaggttttaggtggctcagatattatagaggaacaaacattgagctggcctgggaaggatgagcagaaggtcgtcgagtgagttgggggctgggggactctacgcagtgggagcttcttacatacaggcctgagaaagcctggtgg

SEQ ID NO: 219346 - DNA, 637 bp, Homo Sapiens; identical to SEQ ID NO: 50351

SEQ ID NO: 219347 - DNA, 537 bp, Homo Sapiens
gcgatatagaggacccccctgaagccgctgacagtaatgagtatacggaatcatttcagtagcaacaacactcactgaccttagaaggaaaaatttccttttataattacttgttagtctaacacagttgtaactttccatacagtatattaccttactttaaaatgaagatatcttgcggaagtgtatcttctgtggcttttcttcaaaatgaagccattggtcacacgctgagattgagtttgctggaattgttaagactccatctggtcatcttgtgagtcaacacttatagtggaacccttggctgctggtatcagcagtttcataggacttctggtctttggcaaagttgatgaaaacctcttccagagtggtctgactcactaagaaatttgtaatatttaaagcagtcttgttggttcccagcagatcaaaaatgtttgcgactcctcctgctgtgactggtacatgatactctagcatgctgaggtgctgatcttttaagtaatgtttttggaaagtgcagctccttga

SEQ ID NO: 219348 - DNA, 602 bp, Homo Sapiens; identical to SEQ ID NO: 40680

SEQ ID NO: 219349 - DNA, 648 bp, Homo Sapiens; identical to SEQ ID NO: 48504

SEQ ID NO: 219350 - DNA, 620 bp, Homo Sapiens
tattgtacaaaagtggcatgatgttatccttattatacaacttgattctttcattcttaatgtatcacgaacaattttacagaacgtgcctgctgaacattttaatatctacagtgttcaatgatatgaaatcagaattaagcaatacccacatgattttttttttggagacggggttttcctctggtggcccaggcgggagtgcaagggcatgatctgggctcacggcaacttcggcctcccggttctagtgattctccggccccagcctctcaagtagctgggatggcaggcatgtgccacaatgcccagctagtttggtatttttagtagagacagggtttctccatgtgggtcaggttgttctcgagctccagatctcaggtgatccaccggtcccggcctcccaaagggtgggaattataggcatgaaccaccaggtccagccggattttttattattacaaacagtacggcagtaaactactttttttacatgtatcttggtgtatgcgtgtatttctgcatgataaatttatcaacgtagaaacggcagatccaaaagggcatgcgttctcacattaaataagccctttcccaagaccaggtcattcataaga

SEQ ID NO: 219351 - DNA, 662 bp, Homo Sapiens
gccctgaggattccctcgaatcgacggtttctcttgctaataagctgttactctcctgtattaaaaccattcttctagttgctttacatatttacatattatgttaaaataaagactcacaaaatgctgcaaatatagtaccgtttacacataccactcaattttccccagtggtgatattttccattaacattgtacaatatcacaaccagcacattgtcattggtgaaatgtgcacatttacatgacattttatcacatgtatacatttttgtaaccactgcatgaatcagaatgcagaactcatccatcattaaaaacgtatcccttccactagtcttataatcacatacaaccctaacttctaccatccctaacagatgaatacgaacaatgttctctaaactatttaacttcatcacattaagatacataaaaataagcattatgttacaacttgaaatgggtttttccttcagaattgagaatcatctaaggcttatttgtatagtagtagtttattccttttaatttttgagttgtattacacaatacggaaataacagacttatttaactgtttacctggtgaataacatgtgagttgttccaggttctgactattacaaataaaatttctgtgaaagtcaagtgcggtttggc

SEQ ID NO: 219352 - DNA, 396 bp, Homo Sapiens; identical to SEQ ID NO: 53118
  misc_feature (178)..(178): n is a, c, g, or t
  misc_feature (219)..(219): n is a, c, g, or t
  misc_feature (292)..(292): n is a, c, g, or t
  misc_feature (305)..(305): n is a, c, g, or t
  misc_feature (341)..(341): n is a, c, g, or t
  misc_feature (369)..(369): n is a, c, g, or t

SEQ ID NO: 219353 - DNA, 445 bp, Homo Sapiens
  misc_feature (375)..(375): n is a, c, g, or t
  misc_feature (382)..(382): n is a, c, g, or t
  misc_feature (416)..(416): n is a, c, g, or t
agaggaagtaggctatgatacacatagaaaatttgaggacagtgttacttaacaaggacatttcttgtctctgcagaagtcacagcttggaggaaaccagtttgcactatttgatgaggaatttggccaccaaaccactgatactttcccaaaggtttggcagaaattgttttttgagtggctcaccagagtacccagaagaatcagtatggaattagaggacagtggcctaccctaaataaagacatgagtgatgtataaagtctagtgtcaatttattcagaaaatatcaaaattattctgggagctatgggtcaaagttgataggcacaaacaaacaaaaacgaaaggtatttttaaattcacagcttgggnttaagtnaaaaggggaggatgttgtccttttcttcttcttncaatcccaacttttaggattttccaagcc

SEQ ID NO: 219354 - DNA, 383 bp, Homo Sapiens; identical to SEQ ID NO: 48955

SEQ ID NO: 219355 - DNA, 418 bp, Homo Sapiens; identical to SEQ ID NO: 48961

SEQ ID NO: 219356 - DNA, 448 bp, Homo Sapiens; identical to SEQ ID NO: 47156

SEQ ID NO: 219357 - DNA, 495 bp, Homo Sapiens
cacgaggtcgcctccaacctgactactaatgaagacatcaaaggctcgtggtccagcaagaggggcggtgaggcctctgtcaacccctacagccataaaagtattatcaccaactgctgtgctgtgctctgtggccccctacctcccaggtaagtgagcggggtgcggaagaggggtaacagggccatgcctggccagtgatcaaagtgttcctggatatcagccgacctccccctacaccctagatgccctccgtccactaccccctggagggcatttgtcatgtgacggaattccatggagaattgttatttaatcacgtgctcattgtagaaaaaaaaaattaagtacaaaacgtaaaacagaggagcattggatatgacatgtaattctactccccgggggtagccaccatgactgtttcagccatgtttgaatgacactgcccttccggttgcccactgcctggactgggtggcgactccatcctctcct

SEQ ID NO: 219358 - DNA, 517 bp, Homo Sapiens
cacgaggggatcctcttcttggtggcagcagccacaggagcccactcccaggtgcagctggtgcagtctggggctgaggtggagaagcctggggcctcagtgaaggtctcctgcaaggcttctggatacaccttcaccggctactatatgcactgggtgcgacaggcccctggacaagggcttgagtggatgggacggatcaaccctcacagtggtggcacaaactatgcacagaagtttcagggcagggtcaccatgaccagggacacgtccatcagcacagcctacatggagctgagcagcctgagatctgacgacacggccgtatattactgtgcgagagatcgtgtcgatttttggagtggtccgattcacaactggttcgacccctggggccagggaaccctggtcaccgtctcctcagcctccaccaagggcccatcggtcttccccctggcaccctcctccaagagcacctctgggggcacagcagccctgggctgcctggtcaaggact

SEQ ID NO: 219359 - DNA, 571 bp, Homo Sapiens
ttttttttttttttttttggagacggagtctcactctgttgcctgggctggagtgcagtggtgcaatctcagctcactgcaacttccgccttctgggttcaagcgattctcctgcctcagcctcccaagtggctgggactataggcgcatgctgccacgcctggctaattttttgtattttagtagacatgggatttcaccatgttgcccaggctggtcttgaactcctgagctcaggcaatccgcccgccttggcctcccaaagtgttaggattacaccatgcccggccagactattttctgataatgatctcagcgatagtaaacagaagatcctgagaatttctgtatgcactgatcctacacaaccatattcactggaaaatttgtagatgaacttttagaagagtcattccatctaatttactgcagtcttctccactccccatttacctggagtttctgtcccaattactgttgaacctgtaatttcacctccacacctatagtctgacaacaaatggcaccagtctacactgacttatatgccatggcacatggctcctttgca

SEQ ID NO: 219360 - DNA, 644 bp, Homo Sapiens
tggcgatattttggaagtgaagaaattggaacacctgtttctaatttggtcttcatcattagagacaaaaccaaaacactccaggcagtactgtttatagtgctgagccaggtagcacacagacatagtagcctaaaggctcacataattcgcatgctcaggccagggcagggtaaaaatagccttctgcttctttcaacccagtatcaggaagcactaccccagtgttattatttgttttgtcaaggtaagtctaaataaacaagaaaaacttcttcggaaggcatggcgaagggagtattttaaatgaaaatgattacagaatttgaattagcatgcatctctttgtgtgcaacagtaatccaagaatgtatatgttaccactacaaccatttgtttctaatagttttttcatgttatataacataaatgtatccacaaccttaattaagaactattcttcccccaaaatcatagtcctagtgtcaagaaacatactccagtgtttattgtaaaataacaaccacaccctcaaattgaaaaaagtgaatgtctaggactttattacaacttttcagaataatctgtaatgaaaactcatgcttaaaaatttaatggaaaagactgagccccaaattttgaat

SEQ ID NO: 219361 - DNA, 448 bp, Homo Sapiens
ttttgaaaggaagcatgccaaaatgtttactgtggatattctatggcttatagagttataagggtgatttttcttttcttcttgattcctttcaggatattccaagttttctataaagaatatgctttacttttacaactagggaaagaaagacagaaaaatatatataacatttaaagggcaaaacaatatagctgtttattttacaggctaaaatatcaagatgaaaagctctgatcccaaatcatccattttacctatattctgtcacttttactaaaagcagagttctactcatcccagtgaaaaaaacaatgaattaaaagtaatttctggcgttaacccaagtaccgagttaagactccttaagaatatagaattatgtaatcaacttagataattcaaagcccaatgatataactaagttctttgacgattgagcacacat

SEQ ID NO: 219362 - DNA, 525 bp, Homo Sapiens; identical to SEQ ID NO: 60763

SEQ ID NO: 219363 - DNA, 673 bp, Homo Sapiens
  misc_feature (511)..(511): n is a, c, g, or t
tttagtatttttaaactagagatatctttaatagaaatccatctcaactcaaggtcaatcaactcattacttcccaaagtccctgtagggtgaatccatccttcaatttctctattgcaagccccagttcttctgaaaatacaggttcacgatcttgttgcttattgccatcagcaaaataagccacaaaagcatccgtgtgaccatcagagtctatttctacatcatcttgaatttgttcgactgtcagagcttcgagcggctggggcttttcttccatctcataatcaactccaaatatgggactggcagaatagactttgtgaagtgaattgatttccttaactgattcttgtagtttttccacaggatctattttaaagccaagaacatatccaccactctgctgagagctttctatgacaagagctaaaccaaattttgaatctctaatctttattgaacgaatttgcagatatggtatactgacattaaaactatcattcatatntgcatgccacacaattctcacattggtaataaaaaaggttcctaaattgccctgatcactggataaattcccaactccatttattttatcatatacatgttcttgtgggcacagtcctagttgcttgttcctgattagtgcacttcttaatttaaaatcccg

SEQ ID NO: 219364 - DNA, 492 bp, Homo Sapiens
  misc_feature (466)..(466): n is a, c, g, or t
  misc_feature (473)..(473): n is a, c, g, or t
taaagactgaaacattcagaaaagtttcattgatttttacactaaatgaagagcaaatttgtaaccggtttctttgttgactagctttggaactttgggcagtgatttttaaaaacttattatttttttgtagaggcaggctggtctcaaacccctgggctcaagcaatcctcctgccttggcttcccagagtgctgggattacaggcgtgagtcaccgtgcccagcctgtgtaagtgatttaacctccatttcctcctctgtaaaatgggagtaaataacacctcccaaggatcattgtgagggatgcataaggttaacgtgtatgagggcatctatctcaaggaactcccaagggacttcaattaaatgttaggggtctcctttcccttccctcaggtattcattttctcctcccctggcccttttaaaatcacaggttaacaaaaaataggttcacaggctgnatttcanggggcagggctcacctcat

SEQ ID NO: 219365 - DNA, 349 bp, Homo Sapiens
  misc_feature (71)..(71): n is a, c, g, or t
  misc_feature (73)..(73): n is a, c, g, or t
  misc_feature (106)..(106): n is a, c, g, or t
  misc_feature (322)..(322): n is a, c, g, or t
ggagtggtagtggcagttctcgagctatctgattaagccattccgctagttcagttgtgccctggaggagngnggacagggtcagtatctctggggctgcaggctncttgccttggccctcctggcatggggtaaccaccagctcagctctcctcctccagctttcctctctctagcacaccccagccagggcaaggatgcccacgggattagctacagcaacccctgcgggatttggtgtccacacccgagaggccagggcagatggggaaagggattagcgcctcttccctcacactctgccagggttgccgggagcttngggccaggtcttaaggtaatgaggtgc

SEQ ID NO: 219366 - DNA, 444 bp, Homo Sapiens
ccgcctactactactaaattcgcggccgcgtcgacttttcttaggggttcttagtctcctgtccccaaacttcttagagttattcctgttggaccgggcgcggtggctcatgcctgtaatcccagcactttgggaggccgaggcaggcggatcacaaggtcaagagatagagaccatcctggccaacacggtgaaacccggtctctactaaaaatacaaaaattagcggggcggcgtcttggcgcgcgcctgtagtcccagctactcgggaggctgaggcaggagaatcgcttgaacccaggaggtggaggtagcagtgagccgagatcgcgccactgcgatgccgccactgggcgacagagtgagacttcgactcaaaaaataaaaataaaaaagaattatttctgtttgtgtatgtcttcttctaaggtagggaggagtgtc

SEQ ID NO: 219367 - DNA, 413 bp, Homo Sapiens
  misc_feature (110)..(110): n is a, c, g, or t
  misc_feature (196)..(196): n is a, c, g, or t
  misc_feature (301)..(301): n is a, c, g, or t
  misc_feature (311)..(311): n is a, c, g, or t
  misc_feature (336)..(336): n is a, c, g, or t
  misc_feature (345)..(345): n is a, c, g, or t
ttttaggtcaaatgatctattttctttgtaccataaacaaatgtcaacttgcctagccattctaccccaaattgaaaaccctaccacaattccttcctaacactggaggnaaataaaaccaagataatcactaagacattaaaggcttttaatagtacccaattttattattagatgaactatttcacaccatctntaagcctccaaataaacaggtataaaatttcagtctactgatttgaggggaaaaaaatttttttttacactgatatgacagacctgaccccagggtgcaggaagnatgtgtccanttacctcacaaaatactctgagggntcaacaggntaggttcattctgcttttttaaagggggaggaaaagggggagggctcataggcttgggggagggctaa

SEQ ID NO: 219368 - DNA, 539 bp, Homo Sapiens
tttttttttttttttttgaaaatgttggtctgggcaatgatttttttttttaattaagactttctgaagaaaagggcatacttttcactgaaaaagtttgagttttttaaatgagcagatactcatgcattactagtgcagccaaaaattatcaaaagtagggaagaatgcaaaatagcgtgtgcctcttaactaaagaactgttaagatacaaaacttggctctttgctgcctttcccgcactgccaagagggaaacatgaattagttacattgccgtggtgctcactgggagttcgctgtatggaccagatgggtactgctccgaatttccattcaagtctgacattcttttgtcagcgtttgtgtaaccggttttccttgcattcagaggaaagacagcatggaagtatggatgggaaggttgagacgattggatactgtatggtaacctcgatcgcagctctcctatgagacttgcttcttggattctgagtcacttaagcttgccccttctctttcctgaccctcttccgtttc

SEQ ID NO: 219369 - DNA, 504 bp, Homo Sapiens; identical to SEQ ID NO: 48128

SEQ ID NO: 219370 - DNA, 556 bp, Homo Sapiens
tttttttttttttttttaaattgggcaggctctgaagccagaccagcctcagagagactccctctgtgatttttccacagcactcctcagccaaaagaaatagccaagagagctgtgtattaagtagtgaatagtgtaagttcacgtggcagctgaaagatggtgctatgactattagttacaaagttaaaatatcccacagtgccccctgagtctgctggcactacagggcattgggaactgcaggtctaagcaggaacttacgtgcgtgagccaggctaagcgcccagagcctcaggtaggaggcggtgttggagatgcatcccagacagtactcgatggaatggattacttgggtcattaatatttctccaaaattaaactgagagagatcacacaacatatgttaagagtcatgatgttacatgtgtacttctacatgccaagtgggttccacttcaaggattacaatgaaagagctgccggctggatgctggtaagaacacgctagagtgtgaggaacagaaaccccagacgcactctgttcaccactctg

SEQ ID NO: 219371 - DNA, 487 bp, Homo Sapiens
  misc_feature (444)..(444): n is a, c, g, or t
tttttttttttttttttcagagtggggagtgcatgtttttcaaaaacaaaaagtaggcaaaaacagtccaccaccccatctttcctgcccaggcccctggctgggggaggccaaggagtggcttaagttgtccagcttctgggccctcctccctcccatcaagacctggaaggaggggctgagccaggggccggccccagaggcccaggccagggccggggccaggtcagcacctccgccctccccaatgagagtcagcactggagccttgggtcttgcagttgtttccagagccgaatgctggcctgggggcccaggggccgtaccagcagcaggttgcggaaagcacagtggtccgcagtgcggtctgctggccaggctgtgaggaagcctgggtgggcctggggcaccaggcccagggctcggatgcaaaggccagtgtanacgtcctcaaaggggaagggtgccacacgggctgccgcccgca

SEQ ID NO: 219372 - DNA, 500 bp, Homo Sapiens
tttttttttttttttttctttatgacgatgaatattttattatagagatggactgaactcacttttgcataaagaatctctgaattgggtcagggaaatccacccgctaagaggtcaccacccagctatccctgcctctgcctcagcccccacttgctgtttacatctcagggtcactagaaacagcagagcctgctgttcccagggccaggctggtggggttgggccaagggtcagggatcctggctgcctgccagatcagaaccgccccgtctcccgccccagtcggttgtccagaacctggagctgccggaggaagcctgagttagggcagatattgcggtgggcctgcaccgtctggatggcctctaccagcgtcatgttctcacagatcatgaggaaggccaggacaagtgtggcagagcggcttacccccatggcacagtgtaccagcacgcggccttggggaacactgagggcagctcggatgtatcgagcaa

SEQ ID NO: 219373 - DNA, 579 bp, Homo Sapiens
tttttttttttttttttaaacaatgagtaagcacttttattctaagagagcagagggaaactgaatcacagaacctcaattttctgtaagctgacatctctctccccatagcgttgacaggcaaagcacaggcacgtgtcaaaggccagagcagtccgattccgccgccctaaactttggatctagaaggagagtcccggagatacatggatcattcagtgatgggaagagcccaggaaaggttgtgcctaaggctgtgcccaacacttcttccggggctttctcatcacatctgtgagccatgccatccaccccgtaaaccttccgtgcctatgttggcagagtccatctctattctttgcaaccaagtgcagtactttactgacacaggaactagtgttagttgcaggcaacagatacttaggaaaatcggtgggatgaaaggcaggaatggtcatctaacttcactgaggatgagggtcgcgaaaatcccatgagttctgaggaatggtccagggcagcctgtatttacatccagttcatctgcccactgtaagcgtgaccccaggcaaatgtctg

SEQ ID NO: 219374 - DNA, 474 bp, Homo Sapiens
tttttttttttttttataaaaaggcaggcctggggcaggcttgcacagcactctacacacggcaaaacagccctgtgctgcacactgagaggaacacgtaagccgcggtggttagatgcgctttactttcagagccctgggctttcagcctgggctggccacccattagctggatgggacgttcggaagtaactctcgagccttctctgtaacaggggaacgaccaaggagctacctctcgcgttgtgaggacaaagcgctcgctacatgcccggcacacgaccacaattccactgaaagcattttaatacggaacttgtcactcccagggagcctccgctcagccggcagttggttcatttcaatccccacgacaacccttcaaagtgcagggcagacagcaggtggctctgcccaggcgcctggatcacagcccggcctgcagccctaacctgggcgcggggagaccctgag

SEQ ID NO: 219375 - DNA, 400 bp, Homo Sapiens
tttttttttttttttttcctctcccactcctcagctccaacttcattcttttcacgtggatatccagttttcccaatactatttattgagagaccatcctttccccattgaatggtcctggcacccttgtcaaaaatcaatttggccgcagacacaaaagggtagcattcttcaatcacattattactgaaatgtacaagtgaaaaaaattaatgcagaacgactatgtgatttatattagatcacatcatgtgtagcaaaaaagcagaggtctcatcatccactacaggaagcatggggggctccaaactgactgcaactttgtctttttttttttttttagacagggtcttgtccaggcaagtggctcatgcctgtaatcctaacactttgggaggtt

SEQ ID NO: 219376 - DNA, 525 bp, Homo Sapiens
tttttttttttttttttcagcaccttaaaggtgtcacttttatctgtgggcttacagtttttgtcaagattcctatggtcattcttatctttgttcatttttatgtaatatttattttcctggctttcttaatttcatttctctagcttattttattggaagaatacagtatataagacatataacacacaaaatacgtactgactgttatgttatttgtcaggtttccagtcaacagtagttaatcagcagttaaattatatgcagattttcaattgcgtggggagttggtgcccctaacctctgcattgttcaatggcagaccatttgatattgtactacagttcttggatgcaattttctttgtttttcaataaatctctcctgcctccccttctattatacttccactacctctgccacctctgagacagcaagaccaagcaagactgtcctcttcttcctcagcctactcaaagtgaagatgacagtgatgaaaacctttatgaggatccactttcaccc

SEQ ID NO: 219377 - DNA, 429 bp, Homo Sapiens
tttttttttttttttttagcatttctaataggaggggctctgctgacgacaaatgctcttggattctgtctgaactctccttattacacttacactcttgaagaatatttctgctgcacacagaattctgggttaattcctcccagcccagatcttcgaagatgtgatccactgtgtcctgaaccccatggtttctgacagggcggctgtggtgattcccatgagtgtccccttgtatgtcatggatccttttttctctggctgccttaaagattctctttactgctgcttttcagcagtttgacaatgacaagcctagacagggatttctggacacacatcctggttgggctttctggagctttatgaatttgtagatttatacgtttcaccaagtttagaaaacatcccgttcatcccgttacgtct

SEQ ID NO: 219378 - DNA, 309 bp, Homo Sapiens
tttttttttttttttctcattcactgcagatgactcatactctgaacttcttcgaaataaaatgcaggtactgaaccatactttttctctatccaaaggagaaaaaactttaaaattgtgaatgccttttagagtggtaaaggttaatttttataagtgggtgttttcttctagacatatttgaaagcacaagcaaaaagggcacctgtcatcacatgatgggttggtgtaaggaaacggcagttttgaatcggcctttgctcataaagccttctaagaactctgaactcagaatgtcacctcgtgccg

SEQ ID NO: 219379 - DNA, 473 bp, Homo Sapiens
tttttttttttttttttcaaatatatatatatatatatatgaatatccacacatacacactgagtgcctactagcacaagacaagacatacagagttccactctccccaggtacacagggttgagatccaatgggaaagcagtgagccagctgagtcaggggtaagaggagccagtgaccagagaaatgacccgggacatatgaggccagaagccaaaactatggcatcagtagggagactgcagaaggcggcaggtcctggatcaccaaggaccttgaaagcatgtggaagactttgatcaatgggggaatcattaaggggttttgcattccggaactatcatcagcttcagcggggggcagggggtaggatagaggcagggaggcaggaagttctcgcagggtccaggcaagagatggtggagtgtggtcctggggaagggggcagtggacggatctgagggaggttcagt

SEQ ID NO: 219380 - DNA, 467 bp, Homo Sapiens
tttttttttttttttttcattttttagtgtatttactcttgggcgtatatttcagagtagaattactgtcattgggtatatttacagtcaacactgacaaagaattttcgaagtgtttgttcctatttacattcccacaagcagtgtctgagtgttccagttgctctgcatcttcaataacacctggtattgacagtttaacatttttaaccattctaggatatatacagggagctcaggaacctgaagaaaaggaaaggcacagtaggggtgtggtggaactgggcagcacagaagtccagtaatcataacccccaacccaggctggttcaagtgctggcgatggtcagcacggtcactaaacggatgcaaatccccaagggagagcctggaggagttcagctctctccacctcagtgtctgaggacagggcaggctctgagcttttgggggagaaatggaaagtt

SEQ ID NO: 219381 - DNA, 560 bp, Homo Sapiens
tttttttttttttttttgcatgaaatacccttctctagctgaaaaacttctacttaccttttaagaccctaacatgtccacacaataacagttttctatactcctcgccccagcagtttaatcccagtcatttatgcagacaaagtgtgctgctcactcttccactgtgagcatgcttatttcacatttggttgaacaatcaaattcgtgctaacttagaaagggatttttcctctggacattaataataacctcattcctccacacactaatcagagtagagcctactttcaactgtcattatctgcttatcttgttttactaatgggctgttggttccttaagtcttcaggaatgtttctcatttaactctgtacctagcaacttagtaaatcctcagcaaatatttgctcaataagatagtaaaatcgtctaacatttagccatctaaattgtctacaattccaacctatgcttatcatcatttctcaagataaagctgtggtaaaacataattccccctcatcatcatccatgaaagggataagtgttttttctca

SEQ ID NO: 219382 - DNA, 516 bp, Homo Sapiens
tttttttttttttttttgctctgtgaaacgtatcaactcttcataatctaggctgcaaatgcaaactggcaccccgcagatgaaacggggctgcagaagcaatttattaggtcttcacagtgtttgctttttaaaaatattagttggttgccaacattaaaaactcagaaggcttcacacaaaaatgcaaacatccagccagtcctggaaactggataactgagcaactccaggctgacatttctgcagggcagccatggacgagaacagagcagtggcagcacgcttagaacaggcctcgctcatgcccagcctgcttcacctgttcacacgtcttgcctggctctgcacttcctaaatctagtgatttatttagtggcttcaagaactgctacactttccagtgtgttaagctctgaaaaactgagtgcagataaagatgctgcaaagacactgcccaccttaaagtcgactgatggagaaatctacatcccagatcagattttttacttcctt

SEQ ID NO: 219383 - DNA, 483 bp, Homo Sapiens
tttttttttttttttttaaattaaaatatttattttgtaacattcaaaaaccaaaaaccaccctgacatactgggtggcaagaaaagtcaagatcagattaaacatttgttttgcactaatcacaaaactaataatccaagtcactatcatcaactccagttgatctcagctctgattatgcatcagaacaccctgtgaggtctattaagttcctataccaaatcccaaacactcttgaatcagtctacaaagttgggacctaggtatctgtacattttttaaagttcctcaaaaaattctgcttctaggcaaatgtaatagatattgtgcgttgctcatgtttttcctatcagaaccatgattttaaaaaaactatcctttctgtccccatatatccctcatgtggcctccacttctactctcagctccagtggacctgactgccctaaaggttattctagaccctttgccagtgactggct

SEQ ID NO: 219384 - DNA, 598 bp, Homo Sapiens
cggccgcaaacgtttttaaaaatgtccagtgacacaatgtagctcttctgaaatgaatggaaaacacaacacactgctaaccagtggagggagctcaggagattgtccagggacaaggagacctggccggacctctgcagggaggtgaggcccctgcccccatcttgtcccatcacattctggatgtttggcatccccaggctcctgggaggggagaagtgctgataaaaaggccaaaaatcacacagaaagaagacagaaaactccaggcacttcctacataggtgctaccgtattcctacgagcacggggcctgtgttgaagactccctctggaagttacagaaggaagccaccaagagttcagcctcacagcctctttctcagatgcagtcaccactttaccaaacttggcacatccaaccactcctttcataattttacacctgtttgtggcctggctgacagatattttgtcattgatctttctaatttcagggattctaaatgtgttttgagaatctgctcagcactcagggattctgtctttaaaaatatgattaaaccaccagatagtgtgatttcagaaagtgtgcgtg

SEQ ID NO: 219385 - DNA, 450 bp, Homo Sapiens; identical to SEQ ID NO: 61985

SEQ ID NO: 219386 - DNA, 667 bp, Homo Sapiens
tttttttttttttttttaatttcataaatgacttttacttatcatttctcttgacagtaattcttggcaatgtgcatataacatgaagggaagcataactttcagaagtcatcaaagatattatcctgttgtcctcattttcttaaaccattaaaatattttcatttataaaaattaatctaaatataaatattgacactaaagatcaaaatcacttgatgacaaaataattcttctggaactataacatatgcttatggtttttaatagtaaattaaatctttgcacttatttggcacaaggaaacctttataaaagttcagatgccacacagcaggctgctgctgctgcttcttttttgttgttttttgtttgcaaggcttacacagtacacatttttgtcaaagaaaactgaatatttttaacactgtaacacaacaatagttgcttttcatgcctcttaaagaaaacattctattcggaagtcaaatcttttttgttgtgttcttaaaatttgtttttgtttgtttgttttgctttgaatcacaccaacagaacaaaaagccaaagatttacttatttcaaaagagtcatttctgttagatgacacataacacagcatcagcaaggagtactggaagattaatgtagacccccatcaggagtg

SEQ ID NO: 219387 - DNA, 504 bp, Homo Sapiens
tttttttttttttttttacttacgtgagtttattgagacatagccccataagtagaggagcatctgtacttgaaagtgagatactgttttaaatagttatgagcgactgagggtaaaacaaaacaaaacatgggttattcccaagataataacctggaacagaaaaggaatcaacataatacattcacagccctttcaataagctggttacaagtggctgagctcgttagggaaggaaacaccaagggaagttccctagaagttctgagagggcaaagcagtctgaattctgtgtaactctatcctcattcataccacattttgggtggcttcggggaatttgagatagcatgtttaaagatgaacttagtggctgacttcaaccaaagagaagccctgtttgtaaaaagccagtcagagctcaccagagaatggtaactgcaactagtctttccttcctctctcaaggccaggctctctaaaagcagcattttcctcgtgccg

SEQ ID NO: 219388 - DNA, 450 bp, Homo Sapiens
tttttttttttttttttctctttgtaataaattaattccagatacatgtttttggagactgactatgaggggaggtccacaggctatttgactaggggagaaggtccattattgttgcttctccaggttcacttgagataaaaacaagtagagaaggcttcagtttcacagagggtccagcaatgcagtgaatcttgaatgttgaaacagtaagagttctgaacagcttatctaacagattcagtgtggcagagctaaggggggaattccatgcatgctcagggctgcttcttcaaaatctagatttatctcattgtccttccctccatgggagaactgtgcttccctccatcggaaaacatttaagaactaactagcaatctcaggcaggtatcaccagcccctttgtcagcttctctgcagtaacagaaaggaatacaattctgtgat

SEQ ID NO: 219389 - DNA, 342 bp, Homo Sapiens
tttttttttttttttttcagagttttgggaggttttaatgggatgaacttgatgaacctcaaggtggcctgattctcttagccacaaagtcttgggtgtggggggcatgaggctgaaccccaaatgaatctgtccttttcttctttttcctgggtagagctccctcctggtgcggattctcctcctggccgcatgcatttccttcgtaagtgtgggagggtctctgggggctggctgggggtgtgaggctgggatcgggcgaatgcggggctcgcagtcactggatcctcccgtccgagtcccgagcatcccattgtacagacggggcgggccctcgtgccg

SEQ ID NO: 219390 - DNA, 518 bp, Homo Sapiens
tttttttttttttttttcaaatctcaatcttgtaaatgtttacttctggacaatttgatcaattcatgaaacagaagcagtgtgatatgcctgggaaattacacaccttgtaatatgtcacagcctcttcaagcaaatcaagaataccaagactcactcagatatgaagttagattttggatcactggcttcttcagagagactcagaagatgccttattatttttgtgatttatttctgggcttctcacatatccctgtcatacagccaaacgtgagctgatgctgacaatagtttattggccatggagaaaatcctcagtcttgatggaactccaggatgataccaaatgaacagcgaggaacatcaggatgccaaaaagtccttatttacagaggaaaggaggctagctgcttatgtgttcaatgaagtaatacatgcctcttaaagtattgaaataatactgcatactgtattgccatactttggcaatacagtgatagcacattttaatttaa

SEQ ID NO: 219391 - DNA, 556 bp, Homo Sapiens
tttttttttttttttttctttggtcaacctctctttcctacatgatatctgctattttctgattcctgtttctctgaaacattcaggaattaagtgacgaacgcagagaactgtaagccgccttggcctccaataacccagtttccttgtgaggctcttaacatctccacacacacacactcgcacacacctgatgtggaaatcaaaggaaaaagaaaacaaagccaaatgttgtgttaatcccgccccgccccacaaacccttaaagtcttaaataggaaactagtgttctgctttctcattaaaacacagaaaaggctcgatacaatactaaggtggatacaatactatgtcgcacaaacgtcgttgagtgaggggcctctgctcccagtccctgaagttctgcaaaggaatcacctactttcacgagtcacctcacagatgcggctgcccacagcccgggaggccatgcacacggccaggcgcgtgaacatttcccgtgcggtacagactttgtgtcatgtggcttaagtgctgatggggccctcgtgccgaa

SEQ ID NO: 219392 - DNA, 580 bp, Homo Sapiens
tttttttttttttttttcaggataattatttattattcatagtcatcagcatcttcattaattattcatatgatccttaattattatccttaacagtaagagcagtaaatagcagaaaagtccttgaggtgcctaaggcccagggccgggtgcctccgggcagttagaccagctaatgccctcagggcagtggggggaccacaggccccacctactgccggccctgcccctgcccctctcactggggcccaggggactgcaggagaagatggtcccaagggctgggggaggagctgtgctttcgagttcctctccccttccacggtcagggcctcctgagcagggcctccaaggggagcggcccagcagcgccttgatccctgggtgagccacgtgtccacactgggcagccccactaactgcccgggtccgagccgtgtctgtgcaggggctgggaggtgagggcccccagctggcccggtagggagaggcgtcgtgtggggccttcttggggaagctctggggcccccgggggcagctcctcacacgccatgaactgggaaacctgagaaagcgagtc

SEQ ID NO: 219393 - DNA, 638 bp, Homo Sapiens
tttttttttttttttttgcctgcatggaaatattcattcaatcagaccacactccatttattaaggtctgtactcaggtgttacctctgtctagaggggacaaatgtatctaatctctacaaggtaatttgtaaaattgcagtaggccagaaaagaagtacttcatttagaacacagacagacggacccatgaggacttttagcagacagacagagggacccacgaggacttctgactgacagatgggtcactgttagttgcccatatcaaaagttgaaatgtcatggttgtaaaatcataagaaaaagaagtaataataatgtttgtaaaactacacattaatggataattaagttaacaacatacaaccacatttatattacatatgtgtttgtatatatatatatatatatttatactagtatcttaaagactgtacatacatcagctcattttttttctataaatccttatgaggaagattctgttatatttcccatttgaaactgatatagagtaattatatagagaaggttgaatattaagctatatgctgggattcaaaatcggatttttgtcatccccaaatcaattcatatactcactctgctatgctgaaattataaaatctgaatta

SEQ ID NO: 219394 - DNA, 584 bp, Homo Sapiens
tttttttttttttttttaatggatttaaaaaaaacatttaaaatgctttcatatctaaagcgatgagtaatagaagtttcgcagccccttgaacttgaatcccaggctgcaccttgccaaggaacaggtgcagtgtaatttgcggcaggtatgttagaagagcctccacttttaccactcctttctgctgagcttagagagagagagctagagttctcttctcagaattaaagagtaccaagcacagaagtcctctccatgtccattatggacaagaaggaaggctgggcatgagagtgacctgtcacatcgccaagggctgggtcccgctcctgaagctgccgggtctccccctcacctcccctgcagggcgtgctatgccacagcccactgagccatgcgcagcaccctgggactacagaaccacagggtcactttttctcttttccttgcaaaaaagcaatgccactatctccactataatgcattccctatgtcttattcctctcattatgcttgaaagtagtgttatataacaggcaatatttatgagttgcatatcatcatatgcaaagcaaaaactg

SEQ ID NO: 219395 - DNA, 541 bp, Homo Sapiens; identical to SEQ ID NO: 60224

SEQ ID NO: 219396 - DNA, 378 bp, Homo Sapiens
tttttttttttttttttgtgacttggcgtttacttgaagaggagctagcagaatgtagtgcatagacagtttcacagcacagagggaaggcatcgctcagaaggcttccttggcactattaaatttctttggtggcagcctcggctgggaaggcaaggcacagaagttgcattcagggttctgaggaccaggaggtggtgtctgcgcacttacagggatagaacggctcaggaatctcgctgaagaagaagaaagcccggtgtatgagggtcggaggatggtggtgtgctcctctgtcttggcgctgtgggggcctggggggctgttcaagttgcccccgttgctgttgctgcttctgttgtactgatcctcgtgccg

SEQ ID NO: 219397 - DNA, 573 bp, Homo Sapiens; identical to SEQ ID NO: 58893

SEQ ID NO: 219398 - DNA, 476 bp, Homo Sapiens; identical to SEQ ID NO: 61473

SEQ ID NO: 219399 - DNA, 420 bp, Homo Sapiens
tttttttttttttttttgatggcaacaaaagagtattttatttctcttttcatgcaatggtctgggcttgggaaattcctggaagaaatgtttgtttcatgggggccctggatccttcccctgtacttctccaccctccctggggtgttgcttcatccatagggttggtgatgatttatggccaggtgctgcaatgcataactcgtgggcatgttgcatagaacacaaagagagtggtgttctctggagccatgcaacacagtgctgcctccattcctccagatgctgacttgcttgtcccctcttccttgaaacattcccctcaggctccacatgcacagtgaagaatcaggcaacatggcgtcagccaggtagagaacccaactgcataataaaagattatggtgaggcctcgtgccg

SEQ ID NO: 219400 - DNA, 464 bp, Homo Sapiens
tttttttttttttttttaacctttggcaattattttattgagcagaaagttaatggttacacgtaccataacagtagattcttagaggattccaatttcctgtttagtatttaagtgacatcataaaattctcaatatatgatatttactgataatgacatttgaattgtcacttctccaccaataagtcttccaaaaagcacaagactattattattattccaattgtctgttttagtagtacactttatcttacttcttagcttctttgaactattttttctttacaattcatccacttaatattcttgcgatagaaataattttcaaaataaaagtgagacaaaaaggataaaaagtcatacactctaattcaaatttcaacatttataaaaatccttctcaagaacaactgtgaaatatcacaaatctgtatattattcaaacaaaggaaaatctctggt

SEQ ID NO: 219401 - DNA, 600 bp, Homo Sapiens
tttttttttttttttttggtgctaaataacttattttaataaatttatctttaatacaagtgtaaaacaagagtccttccatttcaactacagttaaacccaaacttcaaaactggtcaataattaacaatgtattaattttgaaaagtttttaactgtaagagtatcaaatataatacagagctcttaaatacttaaagctttctgtcacaatattaaaaataaaacttcttagcattccaagactatgaaaagtgccccctcccaattttttaagcaagtaatagtatctgctggtgtttatatttgttaaaaatttaaaataacaacaacaaaaaaaaaacttctaacttgaatgtgatgtgacttgagtacttctaaaccatcgaaaatacctgatacggggagtaggttcatggttttggtaaaagaaactatgtcacagagttttaatattataactggacttctaaatcataaagtaagaaaattaacatcatttagtaccttttcttgtttgttttttattttgctaagaaggaaccagattttatatcatcattcttcatctaaatggactgccatatgaagttctgggtt

SEQ ID NO: 219402 - DNA, 477 bp, Homo Sapiens
tttttttttttttttttgaccatagtactcacacttttttaattaaagtgatgtgtcctcacaaatacatttctcaaactcaaaacatcatgcttgaaatatcactgaacttgtcaccaaagaagtcacatggcaatgataataaagaaatatgcagactacactctgaggatagagctctaaagagtaaaaacaatggaatttggaaaaaataggagtaaagaattgctttgagcaataaaaactgagattgataagccacttttctttttgatataggcttgtcactcacagccaaaatctctcagcaaaaccacagctactgtttaccctcctgagagatgctccttcctcacccaacacgcatcaaccttcctagaaaggtttatcctctttacaattcttgttaaggtggcactgaatacaaagttactcatgatcaacttccttactagttgtcagtgtctgcccttctaa

SEQ ID NO: 219403 - DNA, 499 bp, Homo Sapiens; identical to SEQ ID NO: 59853

SEQ ID NO: 219404 - DNA, 375 bp, Homo Sapiens
tttttttttttttttttctggaatcgcaccttctcaatgagccccgggcccctacccgcagctatgagcccaccagggggaaggggacgcacctgccctgctggcctcaggtcccatcgagacgccatgttagttgaataaatgagtgagcccctgggcctcaatgggacctgattggccacttgctgtgactgccagcagccaccagggacccctaggccgttccagggatgtctcatacccagggcggctccttggggggtgggggtgagcttcccctcaggcagcataagggcctttcctactcaagctgcctatgtgcattatgatgtgtaagaccccacagtcagccttggagtacggcgcctcgtgccg

SEQ ID NO: 219405 - DNA, 480 bp, Homo Sapiens
tttttttttttttttttagaaatatatgttgaagtacttgggggtgatacggtgtccgtaatttacttttaaatggttaaatatatgtatggacacacaaagcaaatatgacaaatacaaccattattgaatcgcagtagctgagtttatggatgtccattgtactacatacttttgcatagattttatttttcatcataaaaaaatttaaaaactgaaatgcttgtcaacccccccatctcgaaaaagccaaattgaaatacacctggttaattatgagaattaaccactatctgaggattaagtgtgatttgtttcccttccttcatcccactggcctcaggaatggaaaatactttaaagggagaaaaaactcaaactgtgaccatgagcctccaccccatcctgtcctgtctgcttcttgtgtcagagccactaagggaaaaatcactaagttgtcacaatggctgggtgcagtgg

SEQ ID NO: 219406 - DNA, 481 bp, Homo Sapiens; identical to SEQ ID NO: 58930

SEQ ID NO: 219407 - DNA, 1000 bp, Homo Sapiens
cacaaagtagatagattaacaaataaacccatctaaaaagtgaagtatgcaatggaatgattatgacagggaacacagaaaacacagtaagagatatggaagatgagattgggaaaagcaagataaattaatgtaaagagagagagagaaatattagaacatgatacagaggacagataaggggatccaacatacacataattggtgtccctggagataagaatgaaaataattaaataaaaaaaatttaaggcacaattccagaactttctaaaaataagatttgaatttatggactgaaaggaagtacagtgagtggctgagaaaatattgatatggtgaggtcaacagaaagacatagagaagtactaatttcctcataaatcaagaacccccaaaaaaattcaatagaagaatggataaaggatgtgatgaggagatggtttacataaaaggaaatagaaatatcttttaaacacataaaaactcaacctcactcataataagaaaactccaagttaagatactgttttttatctatcgtataggcaaggactaaaatagctgatattaccatgatggtgcaggtatgagggaaacaagaactctcagaaacatggctatggatttcacttctaatccttgtctgatggaagtacacaagtaagaggccaggtgtggtggctcatgcctgtaatcccagcactttgggaggccgagattggcagatcacttgaggtgaggagtttgacaccagactggccaacatcacgaaaccccatctctactaaaactacaaaaattagccaggcgtggtggtgcatgcctgtaattttaggtacttgggaggctgaggcacgagaatcgcttgaacccaggaggtggaagttgcagtgagccgagatcacgccactgcactctagcctgggtgacagtgtgagactctgtctcaaaaaaaaaaaaaaaaaaaaaaaaaaaaaaaaaaaaaaaaaaaaaaaaa

SEQ ID NO: 219408 - DNA, 1000 bp, Homo Sapiens
cacatcctttgggatataattgtaatgatatttcaggctctattctggcattaagttttattctgggataacatagtcaataaaaatttgaacgatattcagtacagagaaggataatacttagaagtagtggtttgggcttcaacacagtaggagatgaaaacttagaaatctatgtgaaaatacagaggtgtgaaaggcaatgtgaaacacttaaaaaaagtaaaatgttttgttaataaaagtaatagtaacgatggcctccatttattgagagcctaccatgtgccaagcactgtgagcatttgtttacatacgttcacttagcctgcaaaatagatggtgatgttccattttataggtgaggaacctaaggctcaaaaaactaaaagcattttgtctgaagtcactacactgtaaaggcaagattgaaactcagcttgtagtttagctgatagtattgtatctgtcagtttccaaaggccatggttcttttcatccatctatacccagtatcagtaaacctttactgtaagaaacagagagcacgtattttagagtttgcaagccatacagtcactgttgcagctactcagcactgccatcatagcgtgaaaacagccatagactatttataaatgaatgggtgtggcagtgtcccaataaaactttatttacagaaccaagtggtgggccaggtgtggactgtgggtattagtttgctgacctttgatctatatttttgtaagtttaactagatgctggttgaaagtaaaagccttagggataaaccaaaggctaaaattgatagcagatgattcttggtgacctaagtcaagagaataaaataactgaaaccaggacccagacagagcagcctgttcctctagtcccagccacttgggaggctgagacaggaggatcgcttgagcctaggagttcaagtacagcttgaccagcatagcaagacccagtctcttgaaaaaaaaaaaaaaaaaaa

SEQ ID NO: 219409 - DNA, 1000 bp, Homo Sapiens
cagtatgatactgttttggtgactatggacttatagtatactttgaaatcaggtaatgtgatgtctccagatttgttctttttgcttaatcttgctttggctgtgcgggctcttttttggttccatatgaattttaggattttttttttctaattctgtgaagaatgatagtgatatttggaggggaattgcattgaattgtagattgcttttggcagtatggtccgtttcacaatattgattctacctatccacgagcatgagcttggggtgtgtttccatttgtttgtgttgtctatgatttctttcagcagtgttttgtagttttccttaaagatgcccactgtcaccactcctcttcaacatagtactagaagtcctagccagagcaatcagacaagagaaagaaaaaaagggcatccaaattggtaaagaggaagtcaaactgttgctgtttgccgatgatatgattgtttagctagaaaaccctaaaggctccttcagaaagctcctggaactgataaaataattctgcaaagtttctggatacaaaatcaatgtacacaaatcagtagctcttctatacaccaacagcgaccaagctgagaatgaaatcaacaactcaggccgggcattgtctctcatgcctataatctcagcactttgggaggctgaggtgagcagatcacctgaggtcaggagtttgagaccagtctggccaacacggtgaaaccctgtctctactaaaaatacaaaaattagcggggctgtgatggcgtgcctgtaatcgcagctacttgggaggctgaggcaggagaatcacttgaacccgggaggcagaggttgcagtgagctgagatcgtgccactgcactccagcctgggtaacagagcgaggctccatctcaaaacaacaacaacaacaaaacaacaaaaaaagcccacaaaaatcagtaactcaaccccttttacaatagctgcaaaaaaaaaaaaaaaaaaaa

SEQ ID NO: 219410 - DNA, 1000 bp, Homo Sapiens
tttacctctctctgggttttgggacattctcacatggaaggagccgagatcgtggcataattaccacctgctccatttgggtactctgtcggcttctacatctaccctcaagtctcccactccgggtgagagcaatggtagaggcttttgtagtgctgatcattatctccatccccgggaaacaggaaaacagcacaatagcaaaatccttttggctataagatttcctgtccctaagtcacagaggaaaaccacataaagacaactagaagctcagtaacccccagcaaacctagctatgcacatttagcatgtctaagcagccttaggttcaaattctggtacattgctgtgtttctctgagcctcagtttcagcattcataaaatggggataataatacttgtttccatttcatagtgtgattcaaggagataattgatgtactatgttctgtgtatgtctgatggacactctaaggcagaatttgaaataaagacattgcttcagctgaaggcagatgttaggaatagtttgttgttaatcccaccctttggcaacaaagacatttcaacatccagtatcaggctgactgtgactcacaaatgaattcagaataatagcaatacctgtgagctctcagactggcagtcagaaccctgctgaaaggattagcgcccgcagcacatggcaactctggtaatggtgacttgaagaagtagtaatgtctcagctctttaaattgtgtgtttttttaactaatataatttttaaaaacttcattagcagcacagaatgttagaactgaaggatcttccttatccctgcctctccttttacagatgggaaaagtaaggaccctcaaaagggactgtacctggcttcaaagtgacagaagtaatagatgacaaaaatgagattctaacttgatctcttgtataatgtcaatattctgattttacatgctcattagaaaaaaaaaaaaaaaaaaaaaaaaaaaa

SEQ ID NO: 219411 - DNA, 1000 bp, Homo Sapiens
tcatcatccagattcataacgccatacataccttaacaaagtgtgaggagagtaactttcactagggtgcaaatgcccatcaagtttaacctcacagattgcatttatactttaaaagaggagctcagtagtaaatattaatttgtaattatagattctaactgtggattgtagagcagttgctttgctgtgacaggcatctatgcaagaggcacttctcttatcttgccatctacctaccctagcctcttaaaattaagaaaaatagaagtcagtgactaagccaccaaatttgaatgtgttacctgggctagctggagtgttttgggggagaattctaaaacctgctctggtcttagctctgccctcatttactgagcctctatttccttttctataaagtggagctaataggagttttgtgaagagtaaaagtgagctgaaaagtgctgggctgacacaaggtagccctgcacatagccagggagcccagcatcctgtccaaagattagagtctgaaagctcactctactgatttgcaaactttaacctaaagcaaatatgcttaattttattgtccttacatttattgcttctgagagacaccttttttttttttaaggcaaggtcttgctctgttgccccatgctgcagtgaggtggtgcaatcatagctcactacagcctcagcctcctgggctcaggtgatcctcccacttcagcctcctgagtagacatgagagtctccctgtgtggcccaggctgcctggcctcaggagttcaagaatagcctggccaacatggcaaaacctcgtttctactaaaaatacaaaaattagctgggtgtggtggtgcgcatctgtaatcccagctacttgggaggctgaggcaggagaatcacttgaacccgggagatggaggttgcagtaagccgagatcgtgccactgcactccagcccgggcgacaagagtgaaactccatctcaaaaaaaaaaaaaaaa

SEQ ID NO: 219412 - DNA, 1000 bp, Homo Sapiens
aagtttccagaagtgctcttctgattttacaggtgaagaaccggagtcctgggggtgtaacaagcccaggtcctcaaggcaagggtgggaactcacgagcgcccaactccaagctgtgtcctcgccccgcaagcttgtgctggtcactgctgccctgtgccccccggatagaaacactgctggaggagaagcctttctcagagccctggggaaggggatggtcaggccacctacactcctggccctgctccactggctgcactggagtggcatctggatggacagcagccggctggagactgggaggaggcctgggtgcaggaggctggggcgctgggcagcatgcgccgcggggcagcaggacgcaggggcctcccagcgggactcgcacgtggcactctctggggcaggtggtgacgggaggcagacacactccaggggagtccctcagtcaccatgctccaggtacttgcgcctcacgtttagaaccagggtagatttggagactcctgggatcttttgacaaaatttctctccaatctctaagtacaaaggatgctcctacaaagggccagatggcaagtcctgggatggaacccctgcccttggtgccaccactgctctttcataactgtgggctcttccgaaagtgacttcatggctcagtgcctcagtttccctttttgtaaaatggtcatcatggctgggcgcggtggctcaggcctgtaatcccagcactttggggggccgaggcgggtggatcatgaggtcaggagttcgagaccaacctgaccaacatggtgaatccctgtctctactaaaaatacaaaaattagctgagtgtggtaggtgcctgtaatcccagctactcaggaggctgaggcaggagaatcacttgaacccggtaggcggagcttgcagtgagctgagatcccgccactgcactccagactgggcgacagagtctctgtctcaaaaaaaagaaaaaaaaaaaaaaaaa

SEQ ID NO: 219413 - DNA, 1000 bp, Homo Sapiens
aggaggtgcctagcgcccctgctggtacctctctccccactcctgagaaagagcaaatatctccaaaaacaggaggaatatacccttttagaagcctttgaaagcaagtttattattcttttcctgggtatagaagccttgcccattctttgtaggaggtttttaaaacagtacgtaaaaattactcataattttacaatccctagattgaatcaacaatatgcaacttatgggtcacctcccgtgtgccactcatttctagatgtaggaggccctgcggtgaatggagctgactaggcactgccctcagggcgcttacgttgtaagaatctcctccaaatgatagctgaaatcaagctgcagcagcactgtattctgctgaaaatgttgaaaaacatttttaagagcattttcttttttaaatatgtatatatttagggggtacaagtgcgggtttctgatgtgcagctatactgcagtgatgacatccgtctgggcttttagtggaccttccactcaaatagtgaacattgtacccaatagggaagctttaatcccccacccctcccaccgtgtcaccttctggaatccccagtgtctgtgtttccactcagtatgtccatgtttacccattgtttagctcccactcataagtgagaacattttaagagcattttctcatgccattaaaaaattattatataggccaggtgcggtggctgacatctgtaatcccagccctttgggaggctgaggcaggcagatcacctgaggtcaggagtttgagaacagccaggccaacatggtgaaaccctgtctgtactaaaaatacaagaattaaccagatgtggtagcggcgggcacctgtaattccagctacttgggaggcttgaacctgggaggcagaggttgcagtgagctgagattgcaccactgcactccagtttgggccacagagtgagactctgtctcaaaaaaaaaaaaaaaaaaaaaaaaaaaa

SEQ ID NO: 219414 - DNA, 1000 bp, Homo Sapiens
ctatgcatttcagccccaaagcacttaaagcataaggtagattgtaagatcctggagttcacctgccttaaacacctcctttcataggagaaggacaccaaggtcgttagagaagaactgagttactcatgatcaccagtcagagctcttggctgcaccacatagatgccaatgttggatacctagggagaatgagatttgatggaaggatatggagaaggccactgaacccactggaagactggagaaccgggtccagaaaacaagcagaagccaagggaaagtgggctgctgagagcatagccagatcatgccacgaaatctgattagcccacttcagctacggcccatgatgcatcagaaatggacccatggctctctgtgttcttcccagtgggtacaggtgattggctgagcacagactgcgttcccctccctggctgttagggtctgggagaacaggtgggaggcttttgtggcttctgcagcagaagcccggagcccatctctcccaacgactcacacaggaaggaagcccccatctggttgggggcagaatgaggttacaaagcccatctcctgtcttgcagttcagattatgcagccaagggtactcttttacataagtgtttaaaatcttgatttaatcagcaacatagaccttgcagcgttcctgcttccatgatagaaggatatgaactatttgaaacattcgcaactactgctctccttggggattcctaccctccttccattctttactcactggcctcatggtagagtaactagagcagaaatgcagagcgagagagaaacaaatatgcagctttcgaaacccatggcagagacaatagtttgagagtctcaaaatcttgcctttcgagaatccgagtcctgacacacagaaatcaggaggactagtgtatggtttgttaagctactttttcccacctacccagtctacattaatgactccctgagcaaaaaaaaaaaaaaaaaa

SEQ ID NO: 219415 - DNA, 1000 bp, Homo Sapiens
gaaaataagaatgtgagtatactgtattaaaccaaattttccttcaggactcccatatttcttcagctcttgtactgtcacagaggttcgaatttgaaagcattaatgttgtcattttttgccagtggttctgatggtaaatatccacagagtcttttatctttaatttcttttgatgtgtgtttttagatcaagcttagttagcaatttttaatgagaacttatacatcttggagctttagtgctttgtttcaaaagcctgaccttgcatttgctttttaaacaaatgtctcagagctcttgttgccaaagactaaaatcttgaaattttggtgtgatcatttataaatttcttgatgtccagttatgagactttgctagggggataacctagtgctgtaaccaatgacatactgatagaaaaaactttactgcctttttggttgaaggatgctcgttgttagatcattttttcccccaggatctcaattttcatgaatgttctttccagcctatctttaaggtttatttttatattgcattgcaaacaatgcagtatcaaatgtttgttgttcacatggatgtggacatcaatatgaggaaggaagagccagacaggcatgtgacggtcctctgaaggaccactgatattacaaatggcctgtgaactgggttcccaggcaggttcctcaaggagagacgttgcatcctggcacccagatccctggacttaaagatcaatggccttgatttgtctgaaattacttcacagagaggattcctgttaatgattacagatccttcccaatacactttatttatgggaccctctcaatgaggggatctctgctgtctctagcaccggaaagatgctttctccagaagatgaattggcatgaaccctaccaggcctgggagggtaggagcttctgtagccttttcaagtaaaagggaaaatccagacttgcattagcaaaaaaattaaaaaaaaaaaaaaaaa

SEQ ID NO: 219416 - DNA, 1000 bp, Homo Sapiens
ttatgtggcgagcttattctcttccttgaagtctcactgcaaatttctcctgcacacagcagtcttctccacctgtaccgtctaacacaggttgcctcttacagctggttaccctccatcatgtccctgctttctttcctccctggtgctcactgtggtctgcttgccatcagctgtgtatttgtgtacttattagtcctggctttccctctagaatgtgagctctgggagggcaaggacctgtcattagacccctagcactgagggcagtgtcttatacatagaagtcaataaatatttgttgaacaaatttgccagacaccgtatttggctccttaaacccccctctgcaaagtagttgttggttactttcactttataagatgaagaaactgaggctgaaacagtttaagtcacaaagcttgctgggcacattgtaaaagctagccctggaagaaatagcatcctgagctttctggtagccaaaacaagagaaggacaccatggcttacacatctgtaataatttaattgaaagcacaccaggctattaatagctatcagttttccatgcattttatgccaagggaaattgatcatctaaattttgtaaaaagaacttttaaatgctgcttttgaaagcaggttgagtattttcctcatgaccacttctcacactggtgcttagtgaatgctgaggctgtctatgcctggagcttgcactctaaatactagttatgggaaggtatttctatcaggtgtaagagtgccccttaaaatgaggctctctggagacgtgacttgatagaggagtaaagtcttagaaacattaggttgttttattttttatgggttttttagtttttgtttttgtttctgagacagagtctcaatctgtcatccaggctggagttcagtgagccatgattgcgcctctgcgctccaacccaggtgacagagcaagactctatctcaaaaaaaaaaaaaaaaaaaaaaaaaaa

SEQ ID NO: 219417 - DNA, 1000 bp, Homo Sapiens
ggttattttcattttatgaggattaaatgaagtaaatgtgaaagggttttataaaatgtaacattttgtacaggtgcttattgatgttgttactctctagtgcgttgaataaatgtaattacattgataataatattctaaaacctattggaaattaagaacaaagtgaaaacttttctctaggtgctgtccgatttctacatcaattaaatccgtttccttttgttggatagggaatggtctcaaatcctagatgtgaccgtgtagcttatgttaatgtcacactaatgtgaaaagataagaaccagaataggaaatttgtcatgcaaaccattggagtttcaaaatgaaggtggtgagcagtatcagatgcttagaggaatataaggaaaatggagactgagaaaattctgtttaatttggtgattgggaggcagttggtacctttcaagataccaattaaatgagagcataagtaaaaggtttgctcagtatatctatctttaacacaaagatgaatgtctttattttatataaaattactgtccttttttttcttgacatgtttttatttccttttctccccttaccataatggatgctctgtgaaaacaagggctttgttttatcttgttttatttactgctacatctgccatcaccgagagcagtatgtgtagcaggcttacaagaaatacttgtggccgggcgcggtggctcacgcctgtaatcccagcactttgggaggccgaggcgggcggatcacgaggtcaggagatcgagaccatcccggctaaaacggtgaaaccccgtctctactaaaaatacaaaaaattagccgggcgtagtggcgggcacctgtagtcccagctacttgggaggctgaggcaggagaatggcgtgaacccgggaggcggagcttgcagtgagccgagatcccgccactgcactccagcctgggcgacagagcgagactccgtctcaaaaaaaaaaaaaaaaaa

SEQ ID NO: 219418 - DNA, 1000 bp, Homo Sapiens
ggattaggaataaagttaagtacacttgttataaagtgtatttcgtcatcctttcaaaacaaatgaaaataattacagtacatagttactgtgtatattgtgcctaataatgcactctgcttgttatggtgctttgtattcagtttttcatttggtcctcacaatccttcaagtaagtaccgttatttctcttttacaaaggtgaaaattaagatttatggagtctgatttgtctaagtttgcacagctaggaggttgcagtaccagggtataaactgtattttttctgaccccaaacttgttttgtttttattatgccttgttgcttcaataaacagaccaactatacacaagtaaatgtatgggaaaagttttgtacgttctttttttctgatttttaaatacatgtattaatacattaattgtgccttttgatttaatttggaggttaattagcctctttgtgtatacacagcaacccctagaaccctgtagaattgattttactttggatctttttgataactttgagaatataaaaaagtcaaatgcatttgaattgtgttagagtattatattcttgaaattagaaagctatctcagagatgcaggaaagattacttgatttatcttaaaacaacaggcatacataaaaccaaaaacactttgacaagtacaatactaaaagcttaaatagggccaggtgcggtggctcacacctataatcccagcactttgggaggcagaggtgggcggatcatttgacatcaggagtttgaaaccagcctgaccaacatggtgaaaccccatctctactaaaaatacaaaaaaaattagccgggcacggtgatgcctgcctgtaatcccagctactagggaggctgaggcaggagaatcgcttgaacctgcaagacggaggttatgtgagtggagattgagccactgcactccagtctgggtgatagagtgagactctgtcttttaaaaaaaaaaaaaaaaa

SEQ ID NO: 219419 - DNA, 1000 bp, Homo Sapiens
aaaacatcctcacgaaatgttccccaaatgttctgctccagctgagcaactaataacaatgggaagatgcagaaaaaaaatgcatggagcataacgttagttttgggactcgtcagtggcaacgttttagagatgccatgaagaattcctggtaataatccttcttcctacagcatttagcaatgaatactatgggattacggctaaaagatggtcaagactgcctcagccattaggatcagaattctaagttccaaagaagagcaaactcaagaggatttcctcaggcctctgactatagatgctgcctggggagaacaggtgctacactcaaaacattctcattttatttatatcctccctgaactagtacccaactccataaccccagactcaaataacagaaataaaagccatctcactgattataagctctctagttattacaaaaataaataagcatcaatcaaccaacaggcatcagaatgagaaaatcactgatttgagacattcaggctgcaggaaaagaacactttttgttaatatgtaactatatcttcagtagtacagaaaaatgggaagaacgagagttcttacctggatttgcggctcacttaaagtagagcacctgagatgctgggaaatcataaagataaataaccaatctaacaaattcctgccatgagaccaaagtgatccttgactactctattagtaagcgactctgagccaagagtacgaacctgtaagtggagtggtggttggcccattagaaatctctgaaagatctaaacatgacagttaccttcctactggactcatacttctcaattccctctcctaaaagaatacttttgggctggccccagtggctcacacctgtaatctcggcactttgggaagccaaggtgggaggattgcttgaggacaagagtttgagaccagctcggtggaaacatagcaccatccatgtctctaccaaaaaaaaaaaaaaaaaaaa

SEQ ID NO: 219420 - DNA, 1000 bp, Homo Sapiens
tagagtgccaactgtacatctagaagaaaggacagaattagcagattgattcaggccagaatcatccgtgagtgctatttcaagtgtagggactctctgatgagtaacaggatttacatcatcccaaagcatctccccacaaactactcattataaaagcaaaaatagcaactgcacaatggagacaccggatcccaccttcactgtgtggttactgccatcatcaagagcagaagggcctcctgggtgtctgtggagccctggtaagttcacagcttcacaggtggggtgttgccaaagaccacacaccgcactgctcatgagcacacatcagaggacccaccgccagggccactcggtccgataactgaagaatgttattgtcacgaaaaccaaagaaagactgagcaactgttttccgtctaaggagaccaaaggaatgttatggctaaatgcaaaaatggtcctggactggatcatacccttgggaaatgttatacagaacattattggggcaatgacagaatcacagtgttatttggaattattatattggaatacaatgttaaatttcctgaatataactgtgctgggattatgtatgaaaatatttttcttagaaaatacacactgaagtattaaggaagtaaagtagcatattgtatgcaaccttttctgcaatggtttaggaaaaaaatgttcaaagagaggaagagaacaaatgtgacaaaatgttgaaaatcggtaaacctgtaggccagctgcagtggctcacgcctgtagtcccaacactttgagaggctgaggtgggcagatggcttgagctcatgagttcaggaccagcccgggcaacatggtaaaaccccatctctacaaaattaggaggttgaggtgggaggatgatttgagtctaggaggcggaggttgcattgagccaagatcacaccaatgcagttcagcctgggcgataagtcttgtctcaaaaaaaaaaaaaaaaaaa

SEQ ID NO: 219421 - DNA, 1000 bp, Homo Sapiens
ggtcaaggtctctgattctgacagcaatgtgggcacttcccacgtaccttcatggcgggattcatggacttgattcgttgtgtcctttcctggcctagtctatgaaagctagagagatggctgaaaacatctgacccctctctgcacataaggaaaagcccaggtatgttcctgagctgtgtttccatctagaacctcagatggaggaaggaatggcttccaacctccactcccctaccccttccctctttatctccccacagtcaattaatgagctgctcattttgtccatattcccgggctgacattgaaggagtggcaaagagggacgtgatgcccgccttgggttagatcaagacttgtaggcatgaagagaggagactggaccagaccaggactaagaagcctggctgagaacgagctgtgtcacataaggggctctgggacctcaggccagccactttccttggagccccagtcctcccagttctgaaatgggggtggtgagaatgcccgctgcagtcatgaggcttaactgagatgttgtaaaggggaatttaaatcagggatggttgtgcagatgctagccattactaaacaagggaagtgatcgttgtgtaacaatgatctagattatatttttagatgtcctcagtgtaggaaagtggagatggaggaggctgtaagaattcagaggaggggccaggcgcggtggctcacgcctgtaaatcctagcactttgggaggccgaggtgtgcggatcacaaggtcaggagatcgagaccatcctggctaacacggtgaaaccccgtctctactaaaaatacaaaaaattagccgggcatggtggcaggcgcctgtagtcccagctactccggaggctgaggcaggagaatggcgtgaacctgggaggcggagcgtgcagtgagccgagatggtgccactgcactccagcctgggccatagagcaagactctgacttaaaaaaaaaaaaaaaaaa

SEQ ID NO: 219422 - DNA, 1000 bp, Homo Sapiens
gcctcctgatgtcccgccaagaagaagaaaatggggactggaggggttaagtaatgtgcacaaaatagtaaatggcagagtaagaagttaaacgcagagcctgttaaagaaaaatgaaaatctctgggcagttctcactataatatactgccagagtaatcccactacaaaatacagtcacgtgttgcttaaggatgtggacgggttctgagaaatgtgtcatcaggtggacttgccattgtgcaaacatcgcagagtacttacacaaacccagatgctagagcctgctacacgcccaggctgtgtgctatggcccgttgctcctgggctacaaacctgtacagcaggttcctgcactccatactgtaggcaactgtaatgcaatggtaggtatttgtgtacctaaacatatctaaacatagaaaaggcatggtaaaaatacagtcttataatcccataggaccaccatcatatataggtgcatcgttgacggaaacgtcattatgcaacacatgactgtacctagtttaccattagggatataaggaaagaaaaaaatcaggaagtcctgtggatcttaatttccagacttgctagtgaaagccatcacagcttctctaatccccagactcccgccagaggaagcccagaggttgggccttattgcttagcctgtttgggataaagagtcaacttgaggccgagcacggtggctcacacctgtaatcccagcactttgggaggccgaggcaggcggatcacgaaatcaacagattgagaccattctggccaacatggtggaaccccgtctctgctaaaaatacaaacattagttgggcatggtggcgggtgcctgtagtcccagctacttgggagaccgaggcaggagaatcgcttgaacctgggaggcggagattgcagtgagctgggatcacgccactgcactccagcctgggcgacagagtgagactccatctcaaaaaaaaaaaaaaaaaaaaaa

SEQ ID NO: 219423 - DNA, 1000 bp, Homo Sapiens
aagttcaccctcctcccttccctcctttctgtaaggactctaaacgattgcgcttcattaagttatttttataatgagttcctgttaccagggaatacagagttaaaaaggtgatctcactaaaagtaattagcataagacctgctggacctgtagaagtgactggatggtaatcaatagcaatatgattacacccatgcagcaattataaattatttaaaacactacccctaggttactgactagttgcctttaaattaaattctctgtcgataattgatgcaaagaattaatgtgagaacaccttcagttactgcaactttttcaaggtggcataaaatattgaactattgcccgtcattagcagctaagctgtctgtttgctctaacatccttcttttctaaattggtcaagaaagagtctcagatcttgaaagatgacaaatgatttcgaatccactgctgggtattcttctaagagcactgaaatgtcccagtgagaaatttcatatatgaaggcaaaggaaaaaaaaattaaactttaaataatgaccagttatacttcatcaactctaacaaatgaaggagcagagttggttttccggagtttgcttcagttctttgatatggtcagtgtaggtcggggaggtcttccctagcttgagaaatcataacctaggatatttaagctgtcagtaatagtgttttaaaactccaggcctataataaagtaaaaagtgtgtctgataaaatgggtttttttccttgcttagtaaatgtcttctgtttctcgctaaacattgtcacttgccaaaccatgttttctgtttcatactaattttctactggcagtgagaccagcggaatctaagaaattgcatacgaaattcaaggattggaaagaagaagaggaagtcaaccattagcaaccctagctcctctttaatctcaagaggcaagaggtactcgatgaaccacatgctaaaaaaaaaaaaaaaaa

SEQ ID NO: 219424 - DNA, 1000 bp, Homo Sapiens
tttcaaaatgaagtctcctaatgactcacttaaatgtttattgttttcttgccgtaaggaactttgtgacttgtaaatatgaatttatgtatgcatttttgtatgaataaatacatttataaaattgatatttaaaaagagctagcacttaagttaggccagacgtttttctaagcactttacagatgctaattttctaatcctttcaacagccctgaaaagtgactttcatatttaggattgaatataaactcattctaagattgtctataacctatttctgtgttgcttagcatagttctatttaagagaactaagacaaacatatagaaatatgatgatgacaatgatgatattatattactttcccaagtgtctggcactatgcgtatttcaccaagcatttgtagagaagcggcagaatatgatgattatgagcctcaattctggaatgagactaacctggttttaaatcctggctgtgcttcttacaggttgtgtgatttgtggtaagttacttaaattgtctgtgcttcagtttcttcatttgttaaatgtgtatgacacctatttcatagaattgttatacagattacgttaattactaaaaaattatttcgagctcttagaatagggactggcacatattcaatacaaaataagtaataaaatacagaggtatgtatttgaatattcaagacttcttggaaggaaaatacttaatgctgttgaggaaaattttaagcaattagaatggcaactagaagagattttgtaacaaactatagtggattatctcacatatttatccctcattcaggcaactacacatctgagttctctgcttgttactagagctcatggttgctggctccgaatgagaactgaatatgaaaattttcagtttgtgaaaaacatctggagcttttagttgactacaagcttaatatgagccaactgtatgttgcaactgcttaaaagagaaaaaaaaaaaaaaaaa

SEQ ID NO: 219425 - DNA, 942 bp, Homo Sapiens
cagtgcccatgaagatgatcctaactttcccaatgaggacagattacagtgtcagcaggatgaatgtgcctgtgtaatgcatcaggaatgtcaaatccagccctctgagctctcagtgactcaggaacccaggccttctgccatgacatccttggcatcactgctttgattatatcacaagctttgtctgcttgtctagaaagtggaaacctcccagaagaagggtcagcgaccacgctgaggcaggaggtagtgctcaggctccaagacctggcaataaagtgcagcctctctaaagcctgtagcaaattgaagttaggctgaagtgagatttgatctagattggtggtatctaaaattcatgtttatttcactcatgtattcagttggcttaaccttctctgacttctctgaggatgaaagccttacaatttcatcatttcgggtagtgggtactgtctcctggtatcgacaaccaaatggagacccctcatatccagctcctctcatttttttttttttttgcctttggccagagattcattttgcattcttcatctttagtactttattgaaattctgccactttctacctgttttggataagccttggtgtggtggttgctactattcttggacaggatacagttattgcctcctccatctctaaacaatgtttgtgattttttttttttttttcactcatgagtaagatacctgtctctttctgaagtgtgcctctgatgttctctagccatctttattgaaacataggctggatgcagtggctcatgcctgtaatctcagcactttgggaggatgaagtgggagaaggatcacttgagcctaggagttcaagaccagcctgggcaacattctgagacccctgtctctaaaaaaaaaaaaaaaaaaaaaaaaaaaaaaaaaaaaaaaaaaaaaaaa

SEQ ID NO: 219426 - DNA, 1000 bp, Homo Sapiens
atggcattcatgtttcattattacactgactctctttttattaaaacaattcttatggtaaaacagatcccctcaatcttgtccaatactgaaatatatggcataaatatgacaatcacgttttgattagcgatgagaaaaagaggcaatgtttaattttataacataattaaaatccagaattacctttgagatgtaagttaatactcagagaaattattaattatctgctaccacttgcatgatgaagtgttctagcctgattaaagctgataggactactggagggctgcaacaatgggaggggagactggaaaataaaaacaaggatagtagtcagaaaactttgaacaacttgcccatgtgtgagcagtcggatttttaaatactcaacccattgatatctgggagcagattaaagtcctgataacctaatgaagatggcaaccctaaattacactgagtaagaaacctgatctggcagtcttactaacagaaagaatttcacccttgtgtatttctgggagggtctagcacttctaaaaatgatcttttgagatctttgcttccatcatcaccaagaacagaatcaggaatttgtgcttgtgtcacccagttcagtacttggtacataaaagacaataaatgtttaactgagccaagattttcttgtatacaaggagccatgataagtatggtcaagaaaacaaagcttctaggccaggcatggtggcttatgcctataatcccagcactttgggaggctgaggcgggcagatcacgaggtcaggagttcaagaccagcctgaccaatatggtgagaccccatctctactaaaaatacaaaaaaattagccgggcatggtggcacgtgcctgtaatcccagctactcggggggctgaggcaggagaatcgcttgaacccaggaggcagaggttgcagtgagcagagatcatgccactgcacttcagcctgggtgacagagtgagactccatctt

SEQ ID NO: 219427 - DNA, 420 bp, Homo Sapiens
  misc_feature (319)..(319): n is a, c, g, or t
  misc_feature (357)..(357): n is a, c, g, or t
  misc_feature (401)..(401): n is a, c, g, or t
  misc_feature (413)..(413): n is a, c, g, or t
gataataaaacaaatttctctaagtggttacaacaaaccaaaacaattcttgggagataagtcttctccataagccgtgtggatttgactgaaaatagtaatgtccctttggcataccaagagagcaaaaatgagagaaagatacatagaaaagagtaaaaaaaaatagggaagaagagaatgaaagactaatagagcaattcattcaacaatattatttaatcattactaacatttattgaccatttacatgatagggcaaagtgctaaaccctttaaggttaatttaaggcatctacttcaccaaacccaaccccantacttatttatcctccaatttttataggccaagggggnttttaaaatccgggggaggttgggggaacttggatccgggttantaggggggcccnaggccgg

SEQ ID NO: 219428 - DNA, 580 bp, Homo Sapiens
ttttccaagattttttttattccaaacaagaaatgccaacttgaacagaaccaggaaatctggtgttcctagggcgacttccagctcctgcccctaattcgtgaactcagcccaataaaaaaaaccatcatcatcttaagagcctccagggtcacagtagggagaggagcaggccccttatttcctgggggaggtggggagcaggacggttgttgatggggacatgaagtaaagaaaagtgtgcaaaacaagtcaactgacgaggagcacacaatccagaaatagtctcggttgaaaggaggaaaacactgactatttcttttttaaaaaataaaaatataaaacctaaccatacattaaaatgtcttttaagaaatctaagagatgacatggacagccccaaggattgagtaatcatgtaaaaagtgaaaaatggaagttggatgaaaaaataaaaacacagtcgaacttcagcaggatgtaacaaacaaatatcaaagaccccaggaagaacatttggaagaatcctaaacaggtttgtttgcacagaaaactgacctgctgggtgagtgaaggaaga

SEQ ID NO: 219429 - DNA, 538 bp, Homo Sapiens
ttttttggtttgttatattttattttccaagtaatactgattaaaaatatttacacacctacttttaagtccacagtttagcactcttatttgtatggctttaaaagttatagcacaagatctttacattaagaattgggggaaaagattccattcaaaacaaagcctgataattatatacatgtctttctctgtactttattttaaatacattaatttttaaatgctgctcatctttttctcatctggtggtaaaatactagtgcaacttttcatcaaaataaagtttaccacagatgtaaataaattttcccaattgaaaatggcccttcagtggccattaaataaaatttctcaacctaacttaagtgaaaaagaactggtggttgtcattataaccaaaaatataaagtattatagcatcatctacattgctccttacaacacaaactttgaaagaaccagagatgctttatagaagttcagttggttttgagaaggcacatgggtgtggattttttttttttttaacattcta

SEQ ID NO: 219430 - DNA, 493 bp, Homo Sapiens; identical to SEQ ID NO: 60212

SEQ ID NO: 219431 - DNA, 538 bp, Homo Sapiens
tcattcaaaattattttattaaagacaaaaatattttacaataaataaaattccagtattatgaaaatgttttgaaatgccatataaagttcccctacttcaacacatcactgaaacttgatgtaataagagctgagctttagaaatagtataactgtaatctggttattagaataaaaagtctctgtacattcaaggaaaactgtaaaagcttggtggcaaagctatattaccaaaacaaaacacttgaagtaaactgtaattcatatgtagttctaatttagtaaacatggtttgcatctaccattatacagtatggatattcagcatgactagattagggcataacagaaatgaagcccagtattgtaggttaaaaggttcaaaaatctgaagtgtgaagtactacagattacatttaaatcagaaatattccacaatctgagccatgcattgttactgaacttactagtcagtgtttctaccacaaaacattcagtgaactaaggttatggtaaaactgtttgggaacctctct

SEQ ID NO: 219432 - DNA, 641 bp, Homo Sapiens; identical to SEQ ID NO: 57768

SEQ ID NO: 219433 - DNA, 517 bp, Homo Sapiens
attggcttttacttaaaataataattttaagaggtaataaatgcatgtccatatccattcttacctggcctagaacaatcaattggctataagtcctttgactcataaggccttcagccatagggagtcccatggaagtataggatggacccgagatggggagccatgccaccctagcaacgctgtgggacaaaattaaaatttgctggtttttgatgttgcctctggcaaatcttggccagaaggggaagaacgtaaatgaaaatgaaaattcgaaggccccccacaactatctgaatggacttcctcttcctccagggttcaggccatgatggaaagtgggaggtgggacatgcttcattatacctctctggcattaacattcacagtctattctctctgaagcttgctacctggatgtttcatctgcatgataaaatcccaggtcttcagacaaactcaactaattgtcaaccagaaaatatgtaaatttacctacagcctagaacccccaccc

SEQ ID NO: 219434 - DNA, 488 bp, Homo Sapiens
aatttaagaaataggtatctcttaattcattctcaggtaacactatttcttatagccaaacttttaataatttttttttaatggaaagaataggacaatatagcccctggaagattcctggaatgcaagtatcctgtgctcatcaaatacagactcatgggccctcacaggctacgagaatagctgacatcctcttcttagagtggaaggatctagtaatgatggacgcctaaatgcaaagaaggctattccacctccacctggagaccaggggaatcactaccaagcccccaaaattctgattcataaaattttagcctgaaaaattttaaaggaaggcataaccagacattcagtggtctacaacagcccaaatggcatccaagattaaaacttacatgttgtgattctcaacccaacctttcttcctcaacactacgaaatctcccttcagcctccttaatatattttcgggcacctgatgatgt

SEQ ID NO: 219435 - DNA, 421 bp, Homo Sapiens
taaacttcattctaacgatggcgggtaatgattaaagagagagcaatgggaattttgtttttcaattactctggctaaaatgtggcagaacagattgaagaagttgattggagtagttttcatctaaaacaagaaagacagctggttaaaaatctgacaagaatcaaaattattttcataagaatgtaaggatcaagagagcaagactcttaatacctaaaacagagccttgcacatgggaatctgtccaataaatatttgttccacgaatgacaatagcctaagcagggttgtggaactggaaataaagacaaacagaaatggcagaagtaacattatcagaacctgttgttgagcgagtagagtaagaataacggaggtatggatgaaaattcaaatttctgaattgactgtgtagtcc

SEQ ID NO: 219436 - DNA, 501 bp, Homo Sapiens; identical to SEQ ID NO: 57889

SEQ ID NO: 219437 - DNA, 462 bp, Homo Sapiens
  misc_feature (451)..(451): n is a, c, g, or t
tttctcctcagctgcacacaataaacaaagagtttttaaaaacactttttgataagtacagcagcactggcaacatcctactgcttggtatcatcttcacttgaatgggtatttttctttcttctcttttaaactcaagattaagacactgtctatactgatcacattgcaaccttctcctccagaattccatgctagagcaaaaatactcattagccaagtagttttgaacaatataaaataattattaaagagaaaatttatgctgccattcacctagctacctaaaaatatacttaataaaatatacaaaaacatattgacacacacaaattttggtaatttctatcactggaaaattacaagctaaagctaaaataataaatacataaataaatgcaagctctaaagtgaacccaagtagcatcatatttcatacacaggggaaaanatcattaagtt

SEQ ID NO: 219438 - DNA, 455 bp, Homo Sapiens; identical to SEQ ID NO: 60406

SEQ ID NO: 219439 - DNA, 402 bp, Homo Sapiens
  misc_feature (393)..(393): n is a, c, g, or t
tttttttagctataagaagggttttaatctgaagagtttgacagagaactaagaatccccaaataatcaaaaagaaaaactcatcacatctagtggtaacaaaattcggatatatatggttttcatatctgttcatgaataactcaacaatgggcagcaaaaacacacccacaatttcaagactctggccaggagtgctgaccagcctcaataaaatgtcagcttgctgccaaaggatccagatcagtggaattgtccagttctctaaggagacaatgcagagttgcctgcagactggttctgaaatcgaaccagaactagacttaaaaacaaaaagcagatcaatctctaggcatcaaatttcttcttccctgacccggcaggggagtgacnctcgtgccc

SEQ ID NO: 219440 - DNA, 633 bp, Homo Sapiens
gtatctccattttatttgacaataaaaggtttttaaaaacagtgaaaaggaaacagtgactacctgagcatttgtcttctgaagactgtggagactgcagttggaagacagaaagctttggagatcatgacttataggagtagggctggaccacagaaaaataaatgatttgggactggaaggagtaaggtctcaggggagtttctggacaatgcccttggcaatggggattaatgatgtacacgtagaagggagaagggcagatgggtgggagatgcatgatctcagaacacagagctccagaatcagttcgggctcctccaaggatcagggaagagagttattcccagaacattgacctcatgaatgtcctttacctcacccagggcccagactactcatcactacttcaggctccagagagagaagcttcagtgaggaccttagcatgactgagggagcagaacagctcttgagacctcattaccagacatctgcgtcctcacatatcctttctgagcccttagctggatgacgattcccaccagaatgaagattagcccaaatatgaaggctgcaatgccactcagcatctttctccaagaatattcagactgagcctctcactccaca

SEQ ID NO: 219441 - DNA, 471 bp, Homo Sapiens
tttttttttcatttaggccattaaccaggagtccatggatgggacttagtgggtccataagcccctgaaatcatatccaaatcacatgcaaaatgtcttaggtaaccacatttttctagagatcaggcaacacacatttcctcaaacaggtccattattcctcaaaaaccactgggaaacaataacaaaaatagtcctataaaaatgttttcaatgctaagggataataggatggggaagagaaaggtagaaaataaagcatttgaccttcatggtaaaataatgcacactgacaggttataagctttgggggcattcctcaaaataaagaaacatttcaggaagaaaaaaatatgaatggaaagtttaaacaaaacggacaagaaggaagcagtatctgggcagtctgacagaatgaaggggaccagggcctgccaccattaaaatatttcttactgaatctcaaaatat

SEQ ID NO: 219442 - DNA, 436 bp, Homo Sapiens
ttttgagacagagtttcactcttgttgcccaggctggagtgcaacgacgcggtctcggctcactgcaacctctgcctcccaggttcaagcaattctcctgtcccagcccccaagtagctggggttacaggtgcccaccaccacgcctggccaacttttgtatttttagcagagacaggggttctccctgctggccaggccggcctcgagctcccgacctcaggcgatccgcccgcctcggccctccaaagtgccaggactacaggcatgagccactgcatctggcccttcttcttaaacactgaggtcagggtgatctctagggacagcctgacacaaccaggatgatgagaaaatacacaccttggtggtggtatagaaagcctcgatcatctactagccaatgcttccagcccctctcccatgctttcctttcc

SEQ ID NO: 219443 - DNA, 385 bp, Homo Sapiens
tttttttttttgggttagttatgataaacttttatttgtatattctttgatgtatagtagaaagaactctggaccaggtgtcgggggacctcagttttagtcccagcttgtatcactaaatagtagtgtgtccttgggcagttcaagaaacccctctggacttcagttcctcaccccaaaagaagttttgctgacatggtgtcactgtgctgaagaggctgtttgatgccatagtccctcctttttttttcagatagaacttgtaccctctgttgtaaatactgcttgcagccttaaatgactctgttggtctcggtggctggtagtgacctgcggagattaaccatttaaaaaccagagacttcttgctgtcctcctggagaaa

SEQ ID NO: 219444 - DNA, 512 bp, Homo Sapiens
gccttcttgcaagcgttattaaaagaggctcagaaaaatagatagagcacatgtaaacttccttcgttctaatgctgtaagacctctacatttctagatggtctatacagatacgtgaaatatttatagttaaaatacaaaacactttttcagtgtgcaaatactgaaacctgtttgttgaaatacagtttgtttctaatcatatcaaggttctacaattaatgaaggatttcaaaaacatacaaaattacaccaatctgatcttattatgccctggtattcctgcgtctcctaaaaaatggttgtagacacactaggcaaagtttagctcgtctggttttttttagacttaaaacacatttttatccagtataacataaagtatagatatttctccccatttaacataaaaaatatctattttgaggggttgttctcagcccaccattggttaaggataattaatttacttcttattgaatggattatctagattgagacaaaaagcaacc

SEQ ID NO: 219445 - DNA, 414 bp, Homo Sapiens
  misc_feature (378)..(378): n is a, c, g, or t
ccaggcctcagctccgggcgacgtggagtggggcggtcctggcgggccgagatgccgtcctgcgctgcgagggacccatccccgacgtcaccttcgagctgctgcgcgagggcgagacgaaggccgtgaagacggtccgcacccccggggccgcggcgaacctcgagctgatcttcgtggggccccagcacgccggcaactacaggtgccgctaccgctcctgggtgccccacaccttcgaatcggagctcagcgaccctgtggagctcctggtggcagaaagctgatgcagccgcgggcccagggtgctgttggtgtcctcagaagtgccggggattctggactggctccctcccctcctgttgcagcacaaggccngggtctctggggggctggagaagcctccctcattcc

SEQ ID NO: 219446 - DNA, 458 bp, Homo Sapiens
gatagagagagggtctcactatgttgcccaggctggtcttgaacgcctgcactcaagcaatcctcccgcttcagcctcccaaagtgctgggattataggtgtgagccaccgtgcccagctggtgttataagtaatctagagatgatttaaaatatatgggggtatatgtacaagttatatgcaaataccatgccattttatatgagggacttcagcatctgttaatttatagagtattctggaaccaattccccatggataccaagagacaatagtatatgttttatgcaaacaacttcctgtgaaagtttgatcccttttcaagattcaaggctatgttgcgagagaaaagaatgtactttgttccttcagtggatggaaaattccatccaagtactactgttccggcattaaaacaaactaccaaatgttgatttctcaaagggaatgcagcgtct

SEQ ID NO: 219447 - DNA, 640 bp, Homo Sapiens
tggagacagtctcgctctgtcacccaggctggagggcagtggcatgatcttggctcaccgcaacctctgcctcctgggttcaagcgattctcctgcctcagcctcctgagtagctgggactataggtgcctgccaccatgcctggctaatttttgtatttatagtagagacacagtttcactgtgttggccaggctggtctcaaactcctgacctcgtgatccacccgccatggcctcccaaagtgtgggggttacaggtgggagccaccgtgcccagcttcttttactttttaaacatttgttgggccatctcccatgggctttgtgggagaaacaaaataattctaatatttatttcttatgcatatatgcccctttttttttttgggaaataatagcgaacatacaagagagtaggtgcataatagatctttgttgcctgggtactaagtccataagcaccaaatgccaaaaatgaaagataacataactttgagaatatacttcaccatagggaatatcatttgatgcatgttattaagaagtattagcgaggtaaaccttgcttttaaaggttgtcaaacccaaaccttataaaaatctgactataccctgtgaccaaatttcaattttaaaata

SEQ ID NO: 219448 - DNA, 460 bp, Homo Sapiens
tttttttttcaacatgtctttatttgcttaaattaacaaaatataggttacatgctcttttcaggtaaactgctttttcagtgaagcagaaagcaatattcacaacttgggctgctatatacttagagttttagtttttaaatagcaagccagagttctgtacaaaatcaacatttggtgtaatgttgtccaaatatgcgaaggatttcaaacgttagctctgttatattttgttccagcaaagcagacaaagatcataattcaaaacaccatgttaatattttattaaatgcgttcagggcttaataaatacagtatgcacattgagctttctcatgcaactactcatatacaaatataccagttactcttgtgggtttatgaaaggtcagccttagtctcatggccggtggggagtcaaatttttaaaaagagagacagaaagaggaattgaaaggta

SEQ ID NO: 219449 - DNA, 482 bp, Homo Sapiens; identical to SEQ ID NO: 57917

SEQ ID NO: 219450 - DNA, 457 bp, Homo Sapiens
aaaagtaagaaatttatttcttctgtaatatgtgtcaaagatattatgaaaaaaagattagaagtcttttcccccatttttagtaatcttgatattatgaaacaagtgagtactaaaacaaaaacaacaataaatatgagcactacagcaaacatgacatactgtaatagaattttattgaaaaaaataacacgtacttactgaagttttttttttttttttttttgaaaccaagtctcgctctgtcgccaggctggagtgtagtggcatgatctcaccacactgcaacctctgcctcccgggttcaaacaattctcttgcctcagcctctcaagtagctgggactacaggcatgtgccaacacacccagctaatttttgtactttcagtagagatggggtttcactatgttggtcactatggtcttgatctcttgatctcgtgatctacccacctt

SEQ ID NO: 219451 - DNA, 507 bp, Homo Sapiens
tcatatttaacaaatatttattaacacagaaatgaataaggcttggccccctgttcttagatgctcagtgcagaggggcagacaatcacaaagctacaataaaatcacagtagaataagtactatcaccgaggtatggacaaagtactttggaggcacagtgagaggaataaagaggggaagagaggaacaattttctcatttatacctgcctagagcattcagggaagactccagagaagtcatctgtgagttgggtcttgaaggaggagtaaaagccaccaggtgaatagtcaaagaaggagccctgcaggctggggctcagagatgtaggtaaggccaggtaagtaaggggttcagggaactaggcatgagtgacaaaaaaaggaaataaagagggaataaagaatgagcagaaggactgcaagcacaaacccattgctctactgtggaaattaaaggtcttgtttctccttggagggggaagagggaaaaaggaaggtgggaa

SEQ ID NO: 219452 - DNA, 420 bp, Homo Sapiens
  misc_feature (313)..(313): n is a, c, g, or t
  misc_feature (347)..(347): n is a, c, g, or t
  misc_feature (359)..(359): n is a, c, g, or t
  misc_feature (377)..(377): n is a, c, g, or t
  misc_feature (383)..(383): n is a, c, g, or t
  misc_feature (394)..(394): n is a, c, g, or t
  misc_feature (411)..(411): n is a, c, g, or t
tatgcattaatagaatggaccaattttagctcaacttttagtttgttagaagcaagtgtaggaactctagcactgtagtttttaattattgcttgtatctattattattaattccaacagagtataatgtatatttattctataaaatatatattatcagagtgcatttgttacaacttaggttcttttcttaccaagtattaaggaatctagtaagaggaatactaggcaaaggacctaggccctgtggaacaggattctcgtatgttatatacataaaccccacttcttcaatattttttgaggttttatnacttttttggattggataaaacactggagggaantctaaaactctnactcacactggtgtggcnggtccnagggagggccnctttttccatatttttnaaggcttag

SEQ ID NO: 219453 - DNA, 533 bp, Homo Sapiens
acaaagtgaagaagatgaggctgtagacaaaaagccaactctactcagtgcccccttagatactcctgaccttctccatgaggacagattacagtatctgcaggaagagggttccggtgtgatgcatcaggaatgtcagatccagtcctgtgagctctcggtggctcagaagcccaggccctcttctcctgcagtgacatccttggcatcaccaccactctgctttggcagtttcctaagctgtgtctgccagaccttctcaaggtctaggaagcagaagcctcccagaagaaagggtaacaaccaggctgaggcaggaggtgatgctgaggtcctgagacctggcccggcaaaaccagagttgagcctcagcaaaacgtgtagccacttgaaattgatagagctttcctttgtgtttagttttatagttctctctgtatgtcattgttcctcttagttgagtttttgcctgtcaaagagatagagagctgcttttatgctgagatcctcaagccaaaacccacaagtaaacg

SEQ ID NO: 219454 - DNA, 521 bp, Homo Sapiens
ctatctctttgacaggcaaaaactcaactaagaggaacaatgacatacagagagtactataaaactaaacacaaaggaaagctctatcaatttcaagtggctacacgttttgctgaggctcaactctggttttgccgggccaggtctcaggacctcagcatcacctcctgcctcagcctggttgttaccctttcttctgggaggcttctgcttcctagaccttgagaaggtctggcagacacagcttaggaaactgccaaagcagagtggtggtgatgccaaggatgtcactgcaggagaagagggcctgggcttctgaaccaccgagagctcacaggactggatctgacattcctgatgcatcacaccggaaccctcttcctgcagatactgtaatctgtcctcatggagaaggtcaggagtatcttcctgggcactgagtagagttggctttttgtctacagcctcatcttcttcactttgtggtggtgttgaaggtgttggaggaacaagggagcact

SEQ ID NO: 219455 - DNA, 897 bp, Homo Sapiens
cgggattttttttaggtagtgtgttgattgagctttatttcagcaaacaaaaaatatttctaagaacttgcataggttctgtcgttagcataccctccctaactcagtttgctcaagaactgtgaattgtcctgccagtggggtgatcagaaatgggacctgcatggtatgaggaccagttatccccatcattgtatgttcactcacaaagacagaacaatcccctccggtgtcacaggcactgttctgtaagatcactttggcattttattgaatactttctggtgaggttctctttccctgcacacaggcttttcttccctaaaggcctctaacctgctggaagatagggaccaagttgagtattttatttcttctgtctacagcatccagcatagttctaattaaatacaattaggcaagtactcaaataagtcttgcctaattatatttaaagtaagtatcctgcttaagtgagagaaattcttggcagatcttacctctagtactattgtttagtgccaggatggaaggtgagtctctgaattagactttttgctgaaagaacgctcccagctgggcatggtggctcacgcctgtaatcctagcactttgggaggccgaggcaggtggatcacctgaggtcaggagttcgagaccagcctggccaacatggtgaaactccatctctactaaaaatacagaaattagctgggtatggtggtgcatgcctgtaatcccagctactagggaggctgaggcaggagaatcacttgaacccagaaggtgaagggcacagtgaccaggcgccagagtgagactctgtctcaaaaagaaaaagaaaaaacgctctcctttagctggatgtagtggtacacacctgtagtcccagttact

SEQ ID NO: 219456 - DNA, 821 bp, Homo Sapiens
gaatcccgggattgaggtcatcacgattagctcaacacaaaaatggatgagaaatagactgctaacagatttgtcatcagcaacactgaatgccagaagtcaatggatcaacatcttcagagcttaaggaaaatttttgtacctagaatttcatagtaaggcagactgtcaagaagaacatcaaagtgaagacattttctgtcaggcaaattttcagaaagtctcctttgcacccttactgaggaagtatcttgaggaaattctccagcaaaatgaggatgaaaaccaggaaagaagaagaaatgggatccataaaacagtggaccttacttaggatgtctcattctagagtgacagccaaaagggtatctcaccctagagtgacagctatccagcagactaatttcagatgagagcatactgtctcgggctttctgggaagaatgtgcattcagtgccatagatagtatcattgaagagctgggatgcttgagaagattatttagtcaagaaaaaagaaagacaaatcaacaatatgtcaaaaaattcaggtccaattatagagcaaaataaaatgaggcatgattttgagttattcatgaagaataagaagaggcttgataggtacatttccttttctatggcacaggcatgatgatattgggtgtgtaggggaagaaaatatcctagcttatactaggctcccagtaagaagtatttaaatagccaaaataatgtggatatcatttattagtattcaatgttcagatcagcctattaacaaagtgtgaaaggtttcattttttattcagaactgaagt

SEQ ID NO: 219457 - DNA, 899 bp, Homo Sapiens
ctctaccggcttattcctgtgccggatcttcatcggcacaggggccactgagacgtttctgcctccctctttcttcctccgctctttctcttccctctcgtttagtttgcctgggagcttgaaaggagaaagcacggggtcgccccaaaccccttctgcttctgcccatcacaagtgccactaccgccatgggcctcactatctcctccctcttctcccgactatttggcaagaagcagatgcgcattttgatggttggattggatgctgctggcaagacaaccattctgtataaactgaagttaggggagatagtcaccaccattcctaccattggttttaatgtggaaacagtagaatataagaacatttgtttcacagtatgggatgttggtggtcaagatagaattaggcctctctggaagcattacttccagaatacccagggtcttatttttgtggtagatagcaacgatcgtgaaagaattcaggaagtagcagatgagctgcagaaaatgcttctggtagatgaattgagagatgcagtgctgctactttttgcaaacaaacaggatttgccaaatgctatggccatcagtgaaatgacagataaactagggcttcagtctcttcgtaacagaacatggtatgttcaagccacttgtgcaacacaaggaactggtctgtatgaaggacttgactggctgtcaaatgagctttcaaaacgttaaatgaaattggatatctaaccaaggacatgtttgataaaattggtctaggcttgttacaacaaaattagtttgtatcttggttattaaacagtatctgggactggtttgggcagaatattaaacttattttgttgccaattatgtttaccgagtataatgttgctattt

SEQ ID NO: 219458 - DNA, 735 bp, Homo Sapiens
gaattccgggattttttttttttttttttttttttccggcccctccaggtttattagtgttgcatcagcaccttgaaatagtccacacggtcacatacgtgacattagaatccgttccccaaaaagctatttacattaatccagggtttcattaaaaaaaactagcaacacatacatcctagaaaccaaacaatgcacaatgaaccgcatgggggtctgcagaaactacagtggtgcttctttggcccacagggtcagattccagaggtgcccagcaagcccagctctcagtcccctacaggccacacacccgcggacggcaggacaggtctcggggagggggcggcctggccctcggaagaagtggcctggtcattttcatgaggaattcattcccggaggaaggcgagaggcactcaggtctttccatctgggaatgaggacagtgtggcaaggctgccagtaccctgcagagacacccccagctctcacccagaggcccctctcctgccccagctctggccgaggcactgaaccaggacactggcttgcatgcccagagacagtggccaaggggaccaacatggaagaggaaggcagcagaccagattgcagggcgggactggcccacagctggcctgggtgagggtggggtctgtctacgtaatagtggacagtggccaccaggcctgaggggtgcctcggtggtgactggtggcttaacctttgagactg

SEQ ID NO: 219459 - DNA, 863 bp, Homo Sapiens
gaattccgggatctagacatgactgaaatggatttgggttttttggtgacctcccttactgggctaatcagcacttgatcggaagtccaggttagtatgtgaagccaggagtactattattattgtgttagcaacagttgcattaactatttcaaaaattactgcctttaaaaaaaacaacctcaagctatatttgtattcataattgacatctggattgggtttatgtttgatgcattgtttggaaaatttgcaatacaaactggcataagaattacttattctgatgatgcacttttatgtatttttcattagaaagtagaactaattttagattttcagcttgatggattttcagtttttcctgaagaattttctttaccattagtcttcaaattggatactgttgtgcagtggtgtactgttatacttcagagaaagggtaagagtacatctagttcagttcctatgaggtagctgtaacccttaaaaatgaaacgtcaactctagggtacatttgacattgaaagaatagttaggaaataacttggttttgatagggtcatgattaagaaatgatatattggttttatttatggaattgttttatagtgcatacaaatcagcgatcagccagcaaatatttttctttgagcttgtgaaagctctgtgttcttttgccttcaatctgttgtcttcaaaacaaacaaacaaaaaaagcttcttgcgcctttccctcccctgttttcttcctttttctttttgcttgtatgcacaaggtaggacttacttcgtaagaaacaaaatgccagtattttcttaagccatgatgtgaaaccaatgaccctgtgaccacatggcac

SEQ ID NO: 219460 - DNA, 824 bp, Homo Sapiens
cggtccccatcttcttggagcgctttaggctggccggcggcgctgggaggtggagtcgttgctgttgctgtttgtgagcctgtggcgcggcttctgtgggccggaaccttaaagatagccgcaatggctgaaaatggtgataatgaaaagatggctgccctggaggccaaaatctgtcatcaaattgagtattattttggcgacttcaatttgccacgggacaagtttctaaaggaacagataaaactggatgaaggctgggtacctttggagataatgataaaattcaacaggttgaaccgtctaacaacagactttaatgtaattgtggaagcattgagcaaatccaaggcagaactcatggaaatcagtgaagataaaactaaaatcagaaggtctccaagcaaacccctacctgaagtgactgatgagtataaaaatgatgtaaaaaacagatctgtttatattaaaggcttcccaactgatgcaactcttgatgacataaaagaatggttagaagataaaggtcaagtactaaatattcagatgagaagaacattgcataaagcatttaagggatcaatttttgttgtgtttgatagcattgaatctgctaagaaatttgtagagacccctggccagaagtacaaagaaacagacctgctaatacttttcaaggacgattactttgccaaaaaaaatgaagaaagaaaacaaaataaagtggaagctaaattaagagctaaacaggagcaagaagcaaaacaaaagttagaagaagatgctgaaatgaaatctctagaagaaaagattggatgcttgct

SEQ ID NO: 219461 - DNA, 743 bp, Homo Sapiens
ctccttagtaccaaatcctctgtttgggattgagcgctgctcctggttaatcattcctactacaaaaaaaaataactcccagggctagttaaattgtaaaccaaggctcagcagtctcacaacacatggaccagaggtgacacacagccatttcctttgccatgtggcccagttgctgctgccatgcctccatttccacactggatgcctacggcagtgagatttcactgccggggtaagagttcagcctggatgattttatagctctgttcctagcacttctcatcatccttccagcccagaatcagcggtcattctgcatattcccaccaaccctctacccccaaacacttcagtgtacctcattttaagagttgctgatccctgattctaggacgtttttacccatagttcttgtctttccaaaatctgaaattcttttttttgctcagaactgggtagccaagggttattttatttttatctttaaaataatcaaggcagtcgctagagtttctccttgtgaatagatcactctagcattttaatgaaaaagaaaaaaatctttctggggtatgttgtatcatagtaatggctcagtaaccacatattttgtcctttccatgtcactgattccttcatatgagactatttggcttgactaccctgtatattgtgtagaaatcaaagttcttatctgtacatttctggtccaatacctgtcttattagttgtccttcccc

SEQ ID NO: 219462 - DNA, 738 bp, Homo Sapiens
cttcggttatttaagcggaagactacttgccatgctccaggacatgaaaagactgaagataataaactttcacagtccagtatccaacaggaactgtgtgtgtcttaagaccgaagttcaatatggtatttttggtactgtcttccttcagcagtgcatattcttttgcaaagttctttggtttgacaagcattagtgacaaaggcagaaaagatttatcagccatgctaaaagagtgaagaattttgatctttagagacactagttttggccaacttaagattttacgttaatttttacatagtatttgacactcatgcaaaataatgtgaaaacatctagatttagtagtttattctgcgccttttgttaaaactgaagattttggaaaatggttgtcactgctcttccagcctatgaatatttttgtgaaatggaaccatggatttatgtctggatcatccatacagaaccaacaattttattcaaaaacaatgtgttcatcaaagtaattgctcacattgtgcagtactatgttgtacagaccacgtgaaagggaatgctggtctagctggcgtggtatgtttataggcgaatttcagcagaaggaagccaaaatagttttttccttttgaaagttttttaaaaattatttcatgggtcttttttttaattaatatgtgtgcattgttacaatgtatgttggatgtcttttgaccctaaatgctttttttgtta

SEQ ID NO: 219463 - DNA, 747 bp, Homo Sapiens
ccgggatagcgccctgaggactcagcgaagggtgggcgccgccgaggcctcctgccgctggcgggtttccgcggagtgccgcccggctccgctctgccgccggcgcggctcatgggcagagtcggccgggcgggccggcattaaactgaagaaaagatgtccctgtacgatgacctaggagtggagaccagtgactcaaaaacagaaggctggtccaaaaacttcaaacttctgcagtctcagcttcaggtgaagaaggcagctctcactcaggcaaagagccaaaggacgaaacaaagtacagtcctcgccccagtcattgacctgaagcgaggtggctcctcagatgaccggcaaattgtggacactccaccgcatgtagcagctgggctgaaggatcctgttcccagtgggttttctgcaggggaagttctgattcccttagctgacgaatatgaccctatgtttcctaatgattatgagaaagtagtgaagcgccaaagagaggaacgacagagacagcgggagctggaaagacaaaaggaaatagaagaaagggaaaaaaggcgtaaagacagacatgaagcaagtgggtttgcaaggagaccagatccagattctgatgaagatgaagattatgagcgagagaggaggaaaagaagtatgggcggagctgccattgccccacccacttctctggtagagaaagacaaagagttaccccgagattttccttatgaagaggac

SEQ ID NO: 219464 - DNA, 708 bp, Homo Sapiens
tttttttttttttttttttttttttgtaaaaataggatctatgttgcccaggctagtttcaaactgctaggctcaagctatgctcccacctcggcctccaagtgccagggtgtgagccacatgcctgggctgtgatttttttttttcttttaatcaaactactgtctggaagtaaaacatgaaagttgagtaattttctcaagcacgtagtttgcttgctaacaagtaatggattaattagctttacgttttcactcttgtctcaaggtttttactgggtaataatttgtaataagttattaggcacaaaccactggtcaggaactgtacacgcattttaaaaaatcctcagtatccttaggagttacaattggcatcttacagatgagaaaatcaaggttagaaacagttactgtcatttgtccagatcatacagctacaagcaatgaggatcaggattcaaatccaggccagtttgactctaaagtccttgctcatttcaccagagccagctattcaatttttatgttttttcttttgctgtaactgcctgttcactaatttcactccttcccttccttgtgtgaagctgaaatttatgtagcacatagttccaactgctttgaaggagctaaatttagtattaatacactgactaagttgatacaggttactgtagatactttaagcagacacaataaagtcaag

SEQ ID NO: 219465 - DNA, 824 bp, Homo Sapiens
ctttttttttttttttttttttttttcccatttcttaatttattaacaatgtatacatttgaaaaaatatatacaatatttcaaaacaagcccttcaagactatatttaagcaatgacatccaaggaagcagaactcaggtaccatgtaatatttggaaaatatggtaacttgaagattaagatttctcttccttgctggttactctgaagtctccaatatacaaaggttgctcctaacgtggttttcttattgagccaagcatcttgatgggtcaatcccagtttcattttctccagtactgggcaaacttgtgaatctgttccaccactgcagcaaaaagagcatggacactctcatcaatcagactctgcatgtaatgcacagcctcttcatccgacaggtctaagcggaatttatcctgaacctttttcacagttttatctggttcaagtgcaatatctggaatgtttgcatcaaccatcaaggaaaacaagttcaaaatcagattagaataccttcgcaggtggaggaaagccgtgtaacactgtttacggaactcttggtactgctcactctgtgtgccccccattccttctaccatttctttattcagcttcattggtggaggaagaggctttggatcccgacccaaaatatatccaaagtctatgtggaagagtttgcctgtttttgttagcaaaaggttatccaggtgcctgtctccaactccaagtatataggtgatcacgcaatatccagcacagcttttaacgtaagtgtccatgacctcagcactaatcccatttggcccattctcacttg

SEQ ID NO: 219466 - DNA, 780 bp, Homo Sapiens
caggacagtacagcacaggcagcgacagtgcgagctttccccacaccaccccgtccatgtgcctcaaccctgacctggagggaccacctctagaggcctataccattcaaggacagtatgccattccacagccagatttgaccaagctgcaccagttggcaatgcaacagtctcattttcccatgacgcatggcaacaccggattcagtggtatggatacctcagtgtttatttctgtaaggtgtagtgcaagagagaggccagtcccaaggtctcagcttgacatctgtttaaaacaaacttcgttatccagcatcctgctggtttaaacttgcctgtctactatggctaagcccaaggaggtaatgtgtttgttaacgtggttttcatttggggtcagttattctaaaagaaaaaaaaagccctggaaggtttgggggtgaggtttggggatgcttgtcaggcaaagggtaggctgatatttctttgagcccatcctgactgctgcccccttgatctgatcagcaccccctttctctccaccagcaattcacaggcttgggtagagaccatccatttgtgccaaattgtgtagtgttttttttgtttttgtttttgtttttattttgtttcgtttttggggcttttctgtataaggaataacttgtccgatagggttaggatgagaccaccaaactcattttcacttgtatcttaacaggcattgaatccagctctccagaggtgaaaggctattggggtaatgattaaaaaaaaaaa

SEQ ID NO: 219467 - DNA, 808 bp, Homo Sapiens
attacttaaatttgatgtcttttattgcatgaacattacggatattgatgacaagatcatcaagagggcccggcagaaccacctgttcgagcagtatcgggagaagaggcctgaagcggcacagctcttggaggatgttcaggccgccctgaagccattttcagtaaaattaaatgagaccacggatcccgataaaaagcagatgctcgaacggattcagcacgcagtgcagcttgccacagagccacttgagaaagctgtgcagtccagactcacgggagaggaagtcaacagctgtgtggaggtgttgctggaagaagccaaggatttgctctctgactggctggattctacacttggctgtgatgtcactgacaattccatcttctccaagctgcccaagttctgggagggggacttccacagagacatggaagctctgaatgttctccctccagatgtcttaacccgggttagtgagtatgtgccagaaattgtgaactttgtccagaagattgtggacaacggttacggctatgtctccaatgggtctgtctactttgatacagcgaagtttgcttctagcgagaagcactcctatgggaagctggtgcctgaggccgttggagatcagaaagcccttcaagaaggggaaggtgacctgagcatctctgcagaccgcctgagtgagaagcgctctcccaacgactttgccttatggaaggcctctaagcccggagaaccgtcctggccgtgcccttggggaaagggtcgtccgggctggcatatcgagtgctcggccatggca

SEQ ID NO: 219468 - DNA, 776 bp, Homo Sapiens
cgtgcctcaaatcctccggccttgtgctgccctgtctcggcactgcttgccttaggagatcaggagtgttcctagccactgggagatgggatgcctgccactggcagctctgccgtccatcctcaccatcccaccgtccccccaagacagctctccatcccatcctctgcctcccttctagcctcaacctaactcagggctcccccgtctcacacctgggttgcaggaacatcctcttcaccaacccccctcccatccctcctcagggctgcctagggcagctacaaaaaccaggccagcctctgaaaggtgctccacatctcattaaaaaccgtgaaatcgcactgccccactatcagaatagctcagaggagaaggtctgccagtaccaagtgctggtggggatacggagaagagcagctcccaggcgctgctggtgcaaatgtgctttgttgcacccacggcaggaaactgaccagcttctcatcaagttaaatacgcatctaccctatggcctagcatttccactcttgcttacacatccaggagaaatgagtccttacatgcacaaaaggatgagtaccgtaatactcacatcagcaaataaacaatacagctgtgtgtcagtagtagaatgaataaattgtggtcgattcatacgttagaatacagcaatttaaaaacaactgctacacacaaaaatgttggtgaatctttcagacacaatgttgagcaaaaatagccacagaagagtgtaaggctgtacgattttattt

SEQ ID NO: 219469 - DNA, 798 bp, Homo Sapiens
cactctaaagggactggcttcctactatgagatttcagttgatgatggtccatgggaaaaacagaagagttcagggctcaatttgtgtactggaacaggatcaaaggcctggtcattcaatattaacagggttgcaactcaggctgtagaagatgttttaaatattgcaaaacgacaaggaaatttgagtcttccattgaacagagaattggtagagaaagtaacaaatgaatataatgaatcactgctctacagtccggaagaaccaaaaatacttttcagtattcgagaaccaatagcaaatagagttttctcaagcagtcgtcagcgttgtttctcctcaaaggtttgtgttcgttctcgttgttgggatgcctgtatggttgtggatggaggaacttcttttgagtttaatgatggtgcaattgcttcgatgatgatcaataaagaagatgagcttcgaactgtgcttcttgaacagtgaaggatttcctcatgacaaattttgattactggcgagaatatttttacttcagaaacagactaccagtcgtaaagtgacattttttggttattgttgagactgcttgcccgtgggctcagaagtgagatttgcattattcttctgttggattctgatagaaaaaaagacattcactgtataagaaaatggatggactgaaccaattagaattgataccagtgaaatttttatattgcttacaattggtaaccaagagtgctgatacctttttaaatttagaggggcaggcttaaataaaggactaaatatttagg

SEQ ID NO: 219470 - DNA, 818 bp, Homo Sapiens
tttttgaaagcaacttttattgaagaatttggagggaaggttccatattatattataatagtaaaaatactaaagttgaatgttgtaaaaaaacgccgtggtgcagcggcagcggcagcgtctggccaggaggcgtggaggggcccagggatggccacccccacagggagtcagggagggcctggggcgacagcggaaaggttaagcgtcgaaaaggtcaagtgctaccgtggagagatcatctgagggggaggctcccggtgggacagtcaccaagaactgtgacacagaaggggaagggggagggctttcctgtcacaaagattaaaaacccccaaaatgcatttgaacaacataatacacaataacaaatttaaaccttgctcctctgtcccactgggtaaaccctggcccatcccccatccctggtcccatcccaggggcccagcctccgatgacgtcctcagagacacggccttagtgctggggggctgctgtgtgcctgccacccccaggagagggtgctggccagcataccatagtgaggttgcatctggtgccaccaggttgaactgaggcccagggccccagagagatgacagatagctggtgacagacagcccagggcggctggctgacagagtgaggggacacatgggcaggacctgcccggccccccaatgccacattgcgcatagctgcagaagtccttaacatttccctacgtgaatcggattgttctgagggctgaggccacacccggagaacaaactggatgaaataaattaaaacccgcaggatagttttcttccctaccc

SEQ ID NO: 219471 - DNA, 802 bp, Homo Sapiens
taatagggcccttagctctcccgtagtcagcgcagtttagcagttaaaagtgtatttttgtttaatcaaacaataataaagagagatttgtggaaaaatccagttacgggtggaggggaatcggttcatcaattttcacttgcttaaaaaaaatactttttcttaaagcacccgttcaccttcttggttgaagttgtgttaacaatgcagtagccagcacgttcgaggcggtttccaggaagagtgtgcttgtcatctgccactttcgggagggtggatccactgtgcaggagtggccggggaagctggcagcactcagtgaggccgcccggcacacaaggcacgtttggcatttctctttgagagagtttatcattgggagaagccgcggggacagaactgaacgtcctgcagcttcggggcaagtgagacaatcacagctcctcgctgcgtctccatcaacactgcgccgggtaccatggacggccccgtcagccacacctgtcagcccaagcagagtgattcaggggctccccgggggcagacacctgtgcaccccatgagtagtgcccacttgaggctggcactcccctgacctcacctttgcaaagttacagatgcaccccaacattgagatgtgtttttaatgttaaaatattgatttctacgttatgaaaacagatgcccccgtgaatgcttacctgtgagataaccacaaccaggaagaacaaatctgggcattgagcaagctatgagggtccccgggagcacacgaaccctgccaggcccccgctggctcctc

SEQ ID NO: 219472 - DNA, 781 bp, Homo Sapiens
cctggttgcctctccagagtccagttcaccagatcgcccctctcaaggccgccttgaggcagacaaacgcctcggctcacgtccacatccagggcgagctggtggagtccaactgcggggcctcgccgctgaccctctcccccatgtcgtccgccaccgacccctggcacctggatcacctggattcagccagtgcggattttccatataatccaggacaaggccaagctataagaaatggagtcaacagaaactcggctatcattggaggcgtcattgctgtggtgattttcaccatcctgtgcaccctggtcttcctgatccggtacatgttccgccacaagggcacctaccataccaacgaagcaaagggggcggagtcggcagagagcgcggacgccgccatcatgaacaacgaccccaacttcacagagaccattgatgaaagcaaaaaggaatggctcatttgaggggtggctacttggctatgggatagggaggagggaattactagggaggagagaaagggacaaaagcaccctgcttcatactcttgagcacatccttaaaatatcagcacaagttgggggaggcaggcaatggaatataatggaatattcttgagactgatcacaaaaaaaaaaaacctttttaatatttctttatagctgagttttcccttctgtatcaaaacaaaataatacaaaaaatgcttttagagtttaagcaatggttgaaatttgtaggtaatatctgtcttattttgtgtgtgtttagaggt

SEQ ID NO: 219473 - DNA, 795 bp, Homo Sapiens
  misc_feature (773)..(773): n is a, c, g, or t
aggacaccagaccaaccgcctgcaggaggctctgaacctcttcaagagcatctggaacaacagatggctgcgcaccatctctgtgatcctgttcctcaacaagcaagatctgctcgctgagaaagtccttgctgggaaatcgaagattgaggactactttccagaatttgctcgctacactactcctgaggatgctactcccgagcccggagaggacccacgcgtgacccgggccaagtacttcattcgagatgagtttctgaggatcagcactgccagtggagatgggcgtcactactgctaccctcatttcacctgcgctgtggacactgagaacatccgccgtgtgttcaacgactgccgtgacatcattcagcgcatgcaccttcgtcagtacgagctgctctaagaagggaacccccaaatttaattaaagccttaagcacaattaattaaaagtgaaacgtaattgtacaagcagttaatcacccaccatagggcatgattaacaaagcaacctttcccttcccccgagtgattttgcgaaacccccttttcccttcagcttgcttagatgttccaaatttagaaagcttaaggcggcctacagaaaaaggaaaaaaggccacaaaagttccctctcactttcagtaaaaataaataaaacagcagcagcaaacaaataaaatgaaataaaagaaacaaatgaaataaatattgtgttgtgcagcattaaaaaaaatcaaaataaaaattaaatgtgagcaaagaanaaaaaaaaaaaaaaaaaaaaaa

SEQ ID NO: 219474 - DNA, 782 bp, Homo Sapiens
agcgtttacgtccttgcttcctctgagcagaggcctccatcttagtatcaacatatttaaagaaattgatggtgttcatcaagctggggcctgtggcagttgttgcctgagcaccaagtaacccaagccacctatgtgacaacttctgggcccaggagtaatttctcagcattgagggtaaaataggatggagtgctctgttgatcatttgggagatgtaggttacctgatttgtgccttaggatgcagcgtgaagcagaagtccatattgcaattatgattttagaaggaactaagcattttactcacacccacagcagcaagaatgacctcctgcagcagatattccacctgtaatagcactttggaactgtgggcaaaaccaaaaggctagtgtttccatttattccatgttggtgtatggggttgaactggaaaattccctgaggcaaaactcactggccaaattttgagagggtatagaaaatgactttagagatgagtggttttgtgtatgtgtctgatgatattcagtctgatgttccgcaattttaaaagttataataaaataccatttttttaatctggaaggacattgatatatgaattcttagaatttgctattaaaaagggtagcccccattccacaagctggttttgagggtgatcttgctctaaaaaacctcattcatcataggctcagtctgacaggttctgtacggggctatcatctttctcctcctctgctaaatgcctctttcttccagctgctcactgggtca

SEQ ID NO: 219475 - DNA, 784 bp, Homo Sapiens
aaaaagcaaggtattattccaaaatacatcaaaatataaattattcaggaatgatcttaacccaagtctctatagagaaatctggacaagtggagaccatggcatagcttagtgctgcagagacatctgccatcctgaagttagtgtttaacgcagtctcaatccaaatttcagttggatttttagaagtaacttaatactctaaaatttatatggaaaaatgaaggttcccaaattgcttagaggtaaccaaaagggaagattgaaaaagggacttgccctgccagatagtcacgctgcaaagtcacagtgattggaacagttttgatattagtgtccaaacaggtacaggtgtcagtgtgatgaaatagagggattaataatggggaagggagaggaagggctggttcaccaaaaggaaaagtcaggcaagatcctccctaatctacattctaaaacaactccagctggattaaaagacaataagaaaaacatgtgcagtgctttctgtggaccaggccctgctctctacactctccatgtgtggtagctcatggattattcttaggaaccctataagataggtactgggattattatccctgcttttcaggtgaggaaactgaggcactagagttaagtgatgaggccggaggccagagtctcatgatggttaataaaagaaatacagaatgtctttttaacctgtgtgcagaaagggacttctgtatctatctcatctgtctgtcatctatctatctatctgtctgtctgcctatctaat

SEQ ID NO: 219476 - DNA, 724 bp, Homo Sapiens
cttttttttttttttttttttttttttttaagacaggggaatactttattcaaaacccatcacagaaatggacagcttgggtctgtaacaaagcattcatgttttagagcataggtcagtaattgtatatgagagcatacactgctacatacaaattaactgatcagaccacaacttttcaatgtttaaaacagaataagcttccctgtaaaagcagcacctttgtgacgttttaactttagtattcctctccttcttcctcaccctctccttcaacagaatccacaccaacctcctcataatccttctcaagggcagccatgtcctcacgggcctctgaaaactcaccttcctccatcccctccccaacgtaccagtgaacaaaggcacgtttggcatacatcaggtcaaacttgtggtccaggcgagcccaggcctcagcaatggctgtggtgttgctcagcatgcacacagctctctgtaccttggccaggtctccaccaggcaccacagtgggaggctggtagttgatgccaaccttgaagccagtggggcaccaatccacaaactggatggtacgcttggtcttgatggtggcaatggcagcattgacatctttgggaaccacgtcaccacggtacaacaggcagcaagccatgtatttaccatggcgagggtcacatttcaccatctggttggctggctcaaagcaagcattggtgat

SEQ ID NO: 219477 - DNA, 755 bp, Homo Sapiens
gaattccgggatgcaatctactctgagaaatggaacacaaggagttacctatcactttcacttataattccaaaagatgactacaaccatgtccatgctcagattcaaacagttttccatatcacttttgggtggtaagatgatttacagttttttttttaattggcagcaccactaaccattccttacattcttttttgtatgtgtggttttctttttatttaacccgcagccgacatcgtagtttcttgttttgttttgttttacagagctgttgcatgacttatgttaccatcctaaaaaacactatattaaacatggaataaattgtctttttatgaattaggctttttgaacatcctgtgttgggatttttttgtttttcaattggcaacaaaagctctgtagggctgcagacatttaaagttcacataatcatctgtaagacattatgtattttgtggaaatactagaatttttttcctgattttgccattatatggatttgctattttttgattaatgcaaaagtatatgactttgttttttatgtgatacaccataaatattaaagtgttgaatactaacagtgctgactacaagaaggatgtagtattttggctttctgcattacaacgtcttctggaggaagggagcaggatgggtttcatttgtatctagtgtgtgtcttaacatctttctaaatcggcagtgtaactgcatagtttaacttcctgtctgtctccctcatttta

SEQ ID NO: 219478 - DNA, 774 bp, Homo Sapiens
ccttgcatcagggctgctgggttggaggggctaaggaggagtgcagaggggaccttgggagcctgggcttgaaggacagttgccctccaggaggttcctcacacacaactccagaggcgccatttacactgtagtctgtacaacctgtggttccacgtgcatgttcggcacctgtctgtgcctctggcaccaggttgtgtgtgtgtgcgtgtgcacgtgcgtgtgtgtgtgtgtgtgtcaggtttagtttggggaggaagcaaagggttttgttttggaggtcactctttggggcccctttctgggggttccccatcagccctcatttcttataataccctgatcccagactccaaagccctggtcctttcctgatgtctcctcccttgtcttattgtccccctaccctaaatgcccccctgccataacttggggagggcagttttgtaaaataggagactccctttaagaaagaatgctgtcctagatgtacttgggcatctcatccttcattattctctgcattccttccggggggagcctgtcctcagaggggacaacctgtgacaccctgagtccaaacccttgtgcctcccagttcttccaagtgtctaactagtcttcgctgcagcgtcagccaaagctggcccctgaaccactgtgtgcccatttcctagggaaggggaaggagaataaacagaatatttattacaaatgttagaatatatttcttatactaggaatctcatttgcatttgcatagactatacacat

SEQ ID NO: 219479 - DNA, 768 bp, Homo Sapiens
cgggatcagccaaccttgtgcacttcccaccaggcttccagcccattccctgcaagcctttgttctttgacctggccctcaaccatgtggctttcccaccccttgaggacaagttggaacagaagaccaagagtggcctcactggatacatcaagggcatctttggattcaggagctaaccaggctcttcctcgggggcgggggagattctgactcttaatctgtattgtgagaaaatcccagcaagttccatgatattaaatccaggtctgcattggcccggggcaagagtttaacatcttcggccctgcattcctacatcttgtgtctgtacacgttcttaagcagcgtgtcaggagagcaccctgttgtcttctggtaaatgtgtgcagggtcatcctgtctcctgtacctcctgggaagggggccgctgctgtctggtgccctgtgagctgtgattgattgcctttggtcagtaatgcgttcaggagtccacaccaggcacagatggggccttgaaacgctttgtcatgcttcttcagtaccatggatttgaaatgaactcatccttgctgtgagcatccaggagcccttgagaagtttatctatgactatgaaactggcaacgtcaccccagaattacggtcagccttattccccttcacctcccagtgaacgctaagaagtttcagacaagcagagagctctatttttagaagaaatatgttacactcagaaatgatgaaaccaaatcttatattaaaaggc

SEQ ID NO: 219480 - DNA, 676 bp, Homo Sapiens
agcgtggaggtgtgtggcccggccctttcgcagcagtggaagttcacgctcaacctgcagcagtaggagggtccgggaggccctgccgtcctgtctcctgcaccattgggtggagtctggtgatcacattattgattatgtttcttaaactttccgcgaaactaatatacctcagtattccatcatggtctgaaagtcaaacttcggcaaggcacggacgactgtgcagacacagcagcggcaagaagcgagaactgccctccccctcctctcggtgcagcccagccgggcccccttccccaggccggagcgcccctcttccttccagctttcacttctgccggctccgcaactgagtgacacccagcgacaaccgactggggagtggtagaagcaactgaacggatgcgtgcgagctgaggacagggcgggaggagggggcacacatgccccaggggagcgaggagaactcttgaaatctccattttcaatcccttcgaaatcacgtatggtttccacaaagccgagtcgtgtcacgtggcaggtttacgtcaatagtccctctctctgctcctccattcgcaagtgtcttcctgggccagactcccctccacctcatgtacttgctatattgaggatgaagttttctatggtgggacactaaatataaagctat

SEQ ID NO: 219481 - DNA, 843 bp, Homo Sapiens
acatcattgcgtgtacagaccttttgcatgggtgagtggatgaaatggagaacagagtgagtgctgtgaacggtgtgaaatagaagccaacttctagtatgctgtcttcatctctgcaataaactaaacgtaaataatgtaactttgtataatttagtagtatgtacttggattgtttctttttgaaaagtgaggatttgtattttctcatctattctttttggtgttaattaacttgagggatttcttttttaagtttttaatatcaaaaattgctattgtatagtttgcctaaaaggaagttggagtgaatatcatctttgaaggacactcaaatttataaggtagaagcaatttcccagatataggctgaacagaaacatttactttgccagaaggagcctttaggagtatatgtgggctaatcagaggttaataatgtcctcatctcctactctccatttaaaaaacaaacttcattgtagtaaattcaaataggaaaaaatgggggagtagttaagcaaaatcaacagtcatcctactatgttgaaagaaccaatgttaatattttgataaatatcatttgtccttttactttgctaaatatgtatatttttataaaaatgggctcatattgtgcataccattttgtaacctgcttttttcacttaacaatatattgggaacatcttttccaggtcatgcatagtcttctgcatcatttttattggtttattattctgctgtatgactcaatcataattcatttaatcttctattggatattttgactatttacatcttttcacagttataaacagcacttcactgaatcccatgtac

SEQ ID NO: 219482 - DNA, 611 bp, Homo Sapiens
tttttttaagggaatcaatgtctgtttattaaggcagatgctcataaaagtgactttcagtaacattttcagtataaaaatggatttacatttcatttctggaaaaccgttttgtacagtctgaccatggctaggagtcccagggacagcagcctctgctcagggcagactctgtgattcactgtctgtcctgctgctaccccacgtgggggagaacacgtgggctgagaaaaaaaaacagcatgtgcaaacctgacagatgtcaagggtcccaacacagttccttcagcgaaaataaagcccagttttaagatgtgcagggaagtgttgacactgaacaggcagctgaccaagccctgcagggctctgagcaggcaggcgagtcccaaggagagtcagtgacagcacatggggcaagggagctggacagaagaccccagagggtgcggcacctgggtgagagccctggaccgcacaccaaggcagaggggtgcccctgaaggactctgggcaggcaatgacaggatctgagggtgtccagacgcagatctccactgcctgagggagagtgatcagccagggggagaggccagggactgctacctgcccag

SEQ ID NO: 219483 - DNA, 777 bp, Homo Sapiens
tttttttttttttttttttaggtggtgggagactgtttaaattatcggccttccctgggccactaggtggttgccggcgcagggctaggcaggcggtcatcggcacgtgtgcaactccacgagccgctggcactgccggcacttgacgaagcagcaccagtggaatttgcagctgcagcgttcagccagctccacctgcgccgtgtggaagccgcggccacagcacagcagctcacagccgtcgatggccttggacgtcttgttgcatgtgcggcccctcgtgcccagcacgccgctgcgcatgtcctgctcacagaagtcggggctaggctccaagtacaccaggtcctcatctgtgtgcggcttgaactgtgcgttgcgtggcaccagtgccctggaggagcccacgcggcgtggctccacctcagtggcaccatcaaacttctccttcagtgcgtgacccacctggcggaagggcggcacggctcgccagcacgtctttacctcacaggagcctgacaccccgtggcacttgcattccacccgcatgtgtgtcaggatggccttcctgccggcctcattgttgtggaggttcatgagggctctgctggacgaggcccccttgcttctctcccgcacatccacaaacgactgtgagaaggccacaccgtaggcgatgttgtcagagcatcctgaccactggaagccctgtgggctgaccccatgcactgtcctgtcacagccgcacttctccagctccccactgctgcacgcccg

SEQ ID NO: 219484 - DNA, 766 bp, Homo Sapiens
aaatatcatttaattgctaaagagatggaacataatacagtgtgtgctgctggtactagtcctgttggggaaattggtgaagagaaaattttgcccaccagtgagactaaacagtgcacagtattggatacctaccctggtgttagtgaagctgatgcaggagaaactctatcttctactggtccttttgctctggaacctgatgcaacaggaactagtaagggtattgaatttaccacagcatctactctcagtttagttaataaatatgatgttgatttatctttaactactcaagatactgaacatgacatggtaatttccaccagtcctagtggtggtagtgaagctgacattgaagggcctttgcctgctaaagatattcatcttgatttaccatctaataataaccttgttagtaaggatacagaagaaccattacctgtaaaagagagtgaccagacattagcagctctgctcagccctaaagaaagtagtggaggagaaaaagaagtacctccccctcctaaagagacactgcctgattcaggattttctgccaatattgaggatattaatgaagcagatttagtgagaccgttacttcctaaggacatggaacgtcttacaagccttagagctggcattgaaggacctttacttgcaagtgatgttggacgtgacagatctgctgccagcccggttgtaagtagtatgccagaaagagcttcagagtcttcttcagaggaaaaagatgattatgaaa

SEQ ID NO: 219485 - DNA, 865 bp, Homo Sapiens
ccgccgattccggagccggggtagtcgccgccgccgccgccgccgctgcagccactgcaggcaccgctgccgccgcctgagtagtgggcttaggaaggaagaggtcatctcgctcggagcttcgctcggaagggtctttgttccctgcagccctcccacgggaatgacaatggataaaagtgagctggtacagaaagccaaactcgctgagcaggctgagcgctatgatgatatggctgcagccatgaaggcagtcacagaacaggggcatgaactctccaacgaagagagaaatctgctctctgttgcctacaagaatgtggtaggcgcccgccgctcttcctggcgtgtcatctccagcattgagcagaaaacagagaggaatgagaagaagcagcagatgggcaaagagtaccgtgagaagatagaggcagaactgcaggacatctgcaatgatgttctggagctgttggacaaatatcttattcccaatgctacacaaccagaaagtaaggtgttctacttgaaaatgaaaggagattattttaggtatctttctgaagtggcatctggagacaacaaacaaaccactgtgtcgaactcccagcaggcttaccaggaagcatttgaaattagtaagaaagaaatgcagcctacacacccaattcgtcttggtctggcactaaatttctcagtcttttactatgagattctaaactctcctgaaaaggcctgtagcctggcaaaaacggcatttgatgaagcaattgctgaattggatacgctgaatgaagagtcttataaagacagcactctgatcatgcagttacttagggacaatctcactctgtggacatcggaaaac

SEQ ID NO: 219486 - DNA, 735 bp, Homo Sapiens
  misc_feature (15)..(15): n is a, c, g, or t
cgggatgaaggacantggtggagtctaggctgctgatcagtaagctttacctagcacctgagcacctttctcccctcccctctttcctcacccttttctagatgtaagacagaaagtaaatgtgactgggacttaaccaaggtcttggtaaagcctgcatggcaccgtaagaagctgaaaatactgtttgttcccgcaatcactgatttgaaaagttcccaacacaggcagctgctgtgtatatgggattagagccactacatagaatagtctcttacagattttcataaatactagtcacaataagggtatttttcttgggggtggagtaagggggagactgatgctagtccttgttgtattttgttgggctgtccttgtgtattttcaccccagcctgtagtcctcctcacttcaaccccagggatttttggggagcaagggtagccaatggcagagggggttggggctgggactctggaggctcctccccttctttctcttccttccgcctcccccgtgcccccagctgctcttgtcactgtctctgatgggtatttgcctggctttgttgcttctctatctgtatttagctgcagtgatcctttagctggttggctcagaaaaaaaaaaatgtgctttaggtgccctgtaatcctgggcatcaagggaatccatccttcccctttttgatatgttctccccgtacttccagatttattgttatggctccca

SEQ ID NO: 219487 - DNA, 843 bp, Homo Sapiens
cgggacaactctgggaactctgttgtcagtggctgaggccgaagacccactcaaaagaggaaatcctggagctgctggttttggagcagtttctgactatcttgccagaggacatccagacctgggtgagggagcagcatccagaaaacggcgaggaagctgtggctctggttgaggatgtacagagagctcctggacaacagcaacaggtgtgccctggggctatgaagagaccaagacgctcctggctattcttagtagttctcaattttatggaaaactccagacctgtcagcagaacagccagatctacagggccatggcggaaggactctgggagcagggttttctgcggaccccagaacagtgtcgcaccaagttcaaaagcctacagttgagttaccgcaaagtgaggagaggccgtgtgcctgagccttgtatctttcatgaggaaatgaatgctctttcaggctcctgggcctctgcacctcctatggcaagcgatgctgttcctggccaagaaggaagtgatattgaggctggagagctgaatcaccagaatggggaacccacggaggtagaagatggcactgtggatggtgcagacagggatgaaaaggacttcaggaatcctggccaggaagtcaggaaactagacctgccagtgctgttcccaaacagacttggtaagactcccttggctctgatggtcaaaggatggcaaagtccactttagaggccattagcctagcagttgagtaggagctgtcactgatcctggcatcatcatcatcttgatgtgtgaccctatccaagttttggttttcatggagttaaaggtta

SEQ ID NO: 219488 - DNA, 823 bp, Homo Sapiens
gggatggaacctattcagttaataatggcaatgatacttgtctgctggctaccatggggctgcagctgaacatcactcaggataaggttgcttcagttattaacatcaaccccaatacaactcactccacaggcagctgccgttctcacactgctctacttagactcaatagcagcaccattaagtatctagactttgtctttgctgtgaaaaatgaaaaccgattttatctgaaggaagtgaacatcagcatgtatttggttaatggctccgttttcagcattgcaaataacaatctcagctactgggatgcccccctgggaagttcttatatgtgcaacaaagagcagactgtttcagtgtctggagcatttcagataaatacctttgatctaagggttcagcctttcaatgtgacacaaggaaagtattctacagctcaagactgcagtgcagatgacgacaacttccttgtgcccatagcggtgggagctgccttggcaggagtacttattctagtgttgctggcttattttattggtctcaagcaccatcatgctggatatgagcaattttagaatctgcaacctgattgattatataaaaatacatgcaaataacaagattttcttacctctcagttgttgaaacactttgcttcttaaaattgatatgttgaaactttaattcttttatcaatcccagcattttgagatcagtctttattaataaaacctgttctctttaatcagcttaaaatccaaagtgtcatatttactggtcctggagacaaacttgttcaaaagaacatcaacgtgcaatg

SEQ ID NO: 219489 - DNA, 816 bp, Homo Sapiens
gggaagagcatctgctggaaccggcagaagctgaaaggtctcagaggaggaggctgctggttccagcaaatgaaggtgatcccactgagactctgagacagtgcttcgatgactttgcagacttggtgccctttgactcctgggagccgctcatgaggaagttgggcctcatggacaatgagataaaggtggctaaagctgaggcagcgggccacagggacaccttgtacacgatgctgataaagtgggtcaacaaaaccgggcgagatgcctctgtccacaccctgctggatgccttggagacgctgggagagagacttgccaagcagaagattgaggaccacttgttgagctctggaaagttcatgtatctagaaggtaatgcagactctgccatgtcctaagtgtgattctcttcaggaagtgagaccttccctggtttaccttttttctggaaaaagcccaactggactccagtcagtaggaaagtgccacaattgtcacatgaccggtactggaagaaactctcccatccaacatcacccagtggatggaacatcctgtaacttttcactgcacttggcattatttttataagctgaatgtgataataaggacactatggaaatgtctggatcattccgtttgtgcgtactttgagatttggtttgggatgtcattgttttcacagcacttttttatcctaatgtaaatgctttatttatttatttgggctacattgtaagatccatctacacagtcgttgtccgacttcacttgatactatatgatatgaaccttttttgggtggggggg

SEQ ID NO: 219490 - DNA, 836 bp, Homo Sapiens
cttggggaaaaaggaccacatagtccatcgaagaagagtccttggaacaagcaactggctattgaaaaggttattttgtaacatttgtctaactttttacttgtttaagctttgcctcagttggcaaacttcattttatgtgccattttgttgctgttattcaaatttcttgtaatttagtgaggtgaacgacttcagatttcattattggatttggatatttgaggtaaaatttcattttgttatatagtgctgactttttttgtttgaaattaaacagattggtaacctaatttgtggcctcctgacttttaaggaaaacgtgtgcagccattacacacagcctaaagctgtcaagagattgactcggcattgccttcattccttaaaattaaaaacctacaaaagttggtgtaaatttgtatatgttatttaccttcagatctaaatggtaatctgaacccaaatttgtataaagacttttcaggtgaaaagacttgattttttgaaaggattgtttatcaaacacaattctaatctcttctcttatgtatttttgtgcactaggcgcagttgtgtagcagttgagtaatgctggttagctgttaaggtggcgtgttgcagtgcagagtgcttggctgtttcctgttttctcccgattgctcctgtgtaaagatgccttgtcgtgcagaaacaaatggctgtccagtttattaaaatgcctgacaactgcacttccagtcacccgggccttgcatataaataacggagcatacagtgagcacatctagctgatgataaatacacctttttttccctcttccccctaaaaatgg

SEQ ID NO: 219491 - DNA, 703 bp, Homo Sapiens
caatgttcctgttcctgtcatgctaatgccttatgacttcaaagcctacagcaagatcaaggtggacaatcttctcttcaataaggagaacctgcccagccgctttaagtttaaggagtattgccccatggtgttccgaaaccttttggagaggtttggaattgatgatcaggattaccagaattcagtgacgcgcagcgcccccatcaacagtgacagccagggtcggtgtggcacgcgtttcctcaccacctacgaccggcgctttgtcatcaagactgtgtccagcgaggacgtggcggagatgcacaacatcttaaagaaataccaccagtttatagtggagtgtcatggcaacacgcttttgccacagttcctgggcatgtaccgcctgaccgtggatggtgtggaaacctacatggtggttaccaggaacgtgttcagccatcggctcactgtgcatcgcaagtatgacctcaagggttctacggttgccagagaagcgagcgacaaggagaaggccaaggacttgccaacattcaaagacaatgacttcctcaatgaagggcagaagctgcatgtgggagaggagagtaaaaagaacttcctggagaaactgaagcgggacgttgaggagattctcgttctgtccccaggctggagtgcagtgcagtggcacgatctcggctcactgcaacctccg

SEQ ID NO: 219492 - DNA, 676 bp, Homo Sapiens
cagccatcaggtaagccaagatgggtgcatacaagtacatccaggagctatggagaaagaagcagtctgttgtcatgcgctttcttctgagggtccgctgctggcagtaccgccagctctctgctctccacagggctccccttcccacccggcctgataaagcgcgccgactgggctacaaggccaagcaaggttacgttatatataggattcgtgttcgccgtggtggccgaaaacgcccagttcctaagggtgcaacttacggcaagcctgtccatcatggtgttaaccagctaaagtttgctcgaagccttcagtccgttgcagaggagcgagctggacgccactgtggggctctgagagtcctgaattcttactgggttggtgaagattccacatacaaattttttgaggttatcctcattgatccattccataaagctatcagaagaaatcctgacacccagtggatcaccaaaccagtccacaagcacagggagatgcgtgggctgacatctgcaggccgaaagagccgtggccttggaaagggccacaagttccaccacactattggtggctctcgccgggcagcttggagaaggcgcaatactctccagcttcaccgttaccgctaatataagtaaagtttgtaaaattcatacttaataaacaattt

SEQ ID NO: 219493 - DNA, 734 bp, Homo Sapiens
ggaattccgggatgcaccggctcatgtgaggctcgcggcacagcgttctctgggctccccagaagccagcctttcgctcccggacccggcagcccgagcaggagccgtgggaccgggcgccagcaccctctgcggcgtgtcatgggcccgcgccgccggagccgaaagcccgaggccccgaggaggcgcagcccgagcccgaccccgacccccggcccctcccggcggggcccctccttaggcgcttcctcccatcaacacagtcggcggagacaaggttggctaaaggagatccgaaagcttcagaagagcacacacctcttgataaggaagctgcccttcagccgcctggcaagagaaatatgtgttaaattcactcgtggtgtggacttcaattggcaagcccaggccctattggccctacaagaggcagcagaagcatttctagttcatctctttgaggacgcctatctcctcaccttacatgcaggccgagttactctcttcccaaaggatgtgcaactggcccggaggatccggggccttgaggagggactcggctgagctcctgcacccagtgtttctgtcagtctttcctgctcagccaggggggatgataccggggactctccagagccatgactagatccaatggattctgcgatgctgtctggactttgctgtctctgaacagtatgtgtgtgttgctttaaatatttttcttttttttgaga

SEQ ID NO: 219494 - DNA, 642 bp, Homo Sapiens
ccttgtgggaccagtcccacaccgctggtccctgccctcccctgctcccaggttgaggtgcgctcacctcagagcagggccaaagcacagctgggcatgccatgtctgagcggcgcagagccctccaggcctgcaggggcaaggggctggctggagtctcagagcacagaggtaggagaactggggttcaagcccaggcttcctgggtcctgcctggtcctccctcccaaggagccattctgtgtgtgactctgggtggaagtgcccagcccctgcccctatgggcgctgcagcctcccttccatgccccaggatcactctctgctggcaggattcttcccgctccccacctacccagctgatgggggttggggtgcttcctttcaggccaaggctatgaagggacagctgctgggacccacctccccctccccggccacatgccgcgtccctgcccccacccgggtctggtgctgaggatacagctcttctcagtgtctgaacaatctccaaaattgaaatgtatatttttgctaggagccccagcttcctgtgtttttaatataaatagtgtacacagactgacgaaactttaaataaatgggaattaaatatttaaaaaaaaaaaaaaaaaaaaaaaaa

SEQ ID NO: 219495 - DNA, 946 bp, Homo Sapiens
cgctaccctcccgccgcccgcggtcctccgtcggttctctcgttagtccacggtctggtcttcagctacccgccttcgtctccgagtttgcgactcgcggaccggcgtccccggcgcgaagaggctggactcggattcgttgcctgagcaatggctgccatccggaagaaactggtgattgttggtgatggagcctgtggaaagacatgcttgctcatagtcttcagcaaggaccagttcccagaggtgtatgtgcccacagtgtttgagaactatgtggcagatatcgaggtggatggaaagcaggtagagttggctttgtgggacacagctgggcaggaagattatgatcgcctgaggcccctctcctacccagataccgatgttatactgatgtgtttttccatcgacagccctgatagtttagaaaacatcccagaaaagtggaccccagaagtcaagcatttctgtcccaacgtgcccatcatcctggttgggaataagaaggatcttcggaatgatgagcacacaaggcgggagctagccaagatgaagcaggagccggtgaaacctgaagaaggcagagatatggcaaacaggattggcgcttttgggtacatggagtgttcagcaaagaccaaagatggagtgagagaggtttttgaaatggctacgagagctgctctgcaagctagacgtgggaagaaaaaatctgggtgccttgtcttgtgaaaccttgctgcaagcacagcccttatgcggttaattttgaagtgctgtttattaatcttagtgtatgattactggcctttttcatttatctataatttacctaagattacaaatcagaagtcatcttgctaccagtatttagaagccaactatgattattaacgatgtccaacccgtctggcccaccagggtccttttgacactgctctaacag

SEQ ID NO: 219496 - DNA, 846 bp, Homo Sapiens
cgggatccctgaggtcgggagtttgagaccagcctgatcaacatggagaaacctcgtctctactaaaaacacgaaaaaattagctgggcgtggtggcgcatgcctcattcacgtacatgggagagtctacaaagtcacacgtattcataggttaagccacatgctgacaaatgtcataagaagaccctacacttttaccttggccgatccctcccctcagtgcaagctctgtgcaagagtgaacttgaacttcactcagtgcaagagtgaacacacactttgtgccggctttaaagaacccagcacaaagccagtctgcatggcctacagacatattttgctggacaatgattacttgcttttctttttgtttttcttgtatttgcctgtttgattggctcctgacataccagaaaatcactgtcaaaacattagcttaacatttgttaaggaaacaaaaagacttcggtgaccacaccttataaaccaaacagttttgtaaatcactttggaaaatttcactaaaaaaaaaaatccttaacaatataataagtaaagaaaatttaaaaccacaaaacatcactgtgtttgtagggggaggtctgatttacagagtaaccacatagtaattataattattagaatgtccagttttcaaaaaacgttacaaggcatacaaagaatgggaaagtgtggctcattcaaaggaacaaaataaagtgacagaaaatatccctaaagaaacccagacatcaaacttaccagacaaagactttaaaacaactgtcttcattatactcaaatgtcaaaaggaaaacataaacaaagaaataaaggaatcagaaa

SEQ ID NO: 219497 - DNA, 754 bp, Homo Sapiens
ccgggacgagctggagtttgagaaggaagtgaagaactcctttatcacggtgcttattgaggttcagaacaagcagaaggagcagcgagaactgatgaaaaagaggcggaaagagaaagggctgagcctgcagagcagccggatagagaagggaaaccagatgcctctcaagcgcttcagcatggaaggcatctccaacattctgcagagtggcatccgccagacctttggctcctcaggaactgacaaacagtatctgaacacagtcattccttacgagaagaaagcctctcctccctcagtggaagacctgcagatgctgacaaacattctctttgccatgaaggaggataatgagaaggtgcctactttgctaacggactacattttaaaagtgctctgccctacctaaccttgccctttggagcagcctcgctgcaggaggtcactgagcaagagtcattccatcacagggactgcatgagaccatgtaacctccgacatgtatttaaacgtgtatagcttaacctggattaaacacgagcaagcgcgcggggtcctttgccgttggcttctagtgctagtaatcattggatgcatgatggggcagggccggtgatggtgcctcccccttgctggtgtcaggagaggggaaggcagccgctttcaccgctcattatgtagtctggctacagccctcaaaaacagcttatactcttaagactaattttgaaataaaaccttcatttaatta

SEQ ID NO: 219498 - DNA, 877 bp, Homo Sapiens
agctgagcttagaacaatatttttgaagtatgcaagcattgagaaaaacggtgaatttttcatgtcccccaatgactttgtcactcgatacttgaacatttttggagaaagccagcctaatccaaagactgtggaacttttaagtggagtggtggatcagaccaaagatggattaatatcttttcaagaatttgttgcctttgaatctgtcctgtgtgcccctgatgctttgtttatggtagcctttcagctgtttgacaaagctggcaaaggagaagtaacttttgaggatgttaagcaagtttttggacagaccacaattcatcaacatattccatttaactgggattcagaatttgtgcaactacattttggaaaagaaagaaaaagacacctgacatatgcggaatttactcagtttttattggaaatacaactggagcacgcaaagcaagcctttgtgcaacgggacaatgctaggactgggagagtcacagccatcgacttccgagacatcatggtcaccatccgcccccatgtcttgactccttttgtagaagaatgtctagtagctgctgctggaggtaccacatcccatcaagttagtttctcctattttaatggatttaattcgctccttaacaacatggaactcattagaaagatctatagcactctggctggcaccaggaaagatgttgaagtgactaaggaggagtttgttctggcagctcagaaatttggtcaggttacacccatggaagttgacatcttgtttcagttagcagatttatatgagccaaggggacgtatgaccttagcagacattgaacggattgctcctctggaagagggaactctgccctttaacttggct

SEQ ID NO: 219499 - DNA, 830 bp, Homo Sapiens
ctgggcgaccggcgcgtcgtgcggggctgcggcggagcctccttaaggaaggtgcaagaggttggcagcttcgattgaagcacatcgaccggcgacagcagccaggagtcatgagcgacagcggcgagcagaactacggcgagcgggaatcccgttctgcttccagaagtggaagtgctcacggatcggggaaatctgcaaggcatacccctgcaaggtctcgctccaaggaagattccaggcgttccagatcaaagtccaggtcccgatctgaatctaggtctagatccagaagaagctcccgaaggcattatacccggtcacggtctcgctcccgctcccatagacgatcacgtagcaggtcttacagtcgagattatcgtagacggcacagccacagccattctcccatgtctactcgcaggcgtcatgttgggaatcgggcaaatcctgatcctaactgttgtcttggagtatttgggctgagcttgtacaccacagaaagagatctaagagaagtgttctctaaatatggtcccattgccgatgtgtctattgtatatgaccagcagtctaggcgttcaagaggatttgcctttgtatattttgaaaatgtagatgatgccaaggaagctaaagaacgtgccaatggaatggagcttgatgggcgtaggatcagagttgatttctctataacaaaaagaccacatacgccaacaccaggaatttacatggggagacctacctatggcagctctcgccgtcgggattactatgacagaggatatgatcggggctatgatgatcgggactactatagcagatcatac

SEQ ID NO: 219500 - DNA, 836 bp, Homo Sapiens
ccgggatctgattaccttgaattggatacaattaaaaatctcgtcaaaaaatattcacagttcataaactttcctatttatgtatggagcagcaagactgaaactgttgaggagcccatggaggaagaagaagcagccaaagaagagaaagaagaatctgatgatgaagctgcagtagaggaagaagaagaagaaaagaaaccaaagactaaaaaagttgaaaaaactgtctgggactgggaacttatgaatgatatcaaaccaatatggcagagaccatcaaaagaagtagaagaagatgaatacaaagctttctacaaatcattttcaaaggaaagtgatgaccccatggcttatattcactttactgctgaaggggaagttaccttcaaatcaattttatttgtacccacatctgctccacgtggtctgtttgacgaatatggatctaaaaagagcgattacattaagctctatgtgcgccgtgtattcatcacagacgacttccatgatatgatgcctaaatacctcaattttgtcaagggtgtggtggactcagatgatctccccttgaatgtttcccgcgagactcttcagcaacataaactgcttaaggtgattaggaagaagcttgttcgtaaaacgctggacatgatcaagaagattgctgatgataaatacaatgatactttttggaaagaatttggtaccaacatcaagcttggtgtgattgaagaccactcgaatcgaacacgtcttgctaaacttcttaggttccagtcttctcatcatccaactgacattactagcctagaccagtatgtggaaagaatgaa

SEQ ID NO: 219501 - DNA, 857 bp, Homo Sapiens
cgggatctgcctccatgtgagttaattactttgctctggaactagcattattgtcattatcatcaccattctgtcatcatcatctgattaatattgtggattttccccctctgcttgcatcttcttttgactcactctggaagaaatgtcaagaagagaaggttcgatcctactcagcaaggccccatctgaatcagctgcgctggatggacaccgccttgcactgttggattctgggtatgacatactcgcagcagtgttactggaactattaagtttgtaaacaaaacctttgggtggtaatgactacggagctaaagttggggtgacaaggatggggtaaaagaaaactgtctcttttggaaataatgtcaaagaacacctttcaccacctgtcagtaaacgggggagggggcaaaagaccatgctataaaaagaactgttccagaatcttttttttccctaatggacgaaggaacaacacacacacaaaaattaaatgcaataaaggaatcattaaaaaaaatagtaaatgattttttttccctcagcctgctggcacttaatatcttctaaatgatttggcatgatttttttttctttactaccgatgacaaactccagtggcatgaagatctaattttcaaaagggtaaaaactgcatggcatatatacaacaagctagcaagccaattctcagcaaaacctgcaacagaattcctaaagtgaagatgacagatgaacacaaagaagctgcctgggcctcttcacttaaacatgtccccacaccccatcctctcggagccccacttcttaccccccacctcccaccctctataatccccactccccattgg

SEQ ID NO: 219502 - DNA, 607 bp, Homo Sapiens
ggaattccgggatggcatggtggctcacacctgtaatccaagcactttgggaggccaaagtgggagcatcacttgatcctgggagttcgagaccagcctgggcaacatggtgaaaccctgtcggtacaaaaaaatacaaaaatttgcctgtttatggtggtgtgttcctgtactcccagctccccaggaggctgaggtgggaggttggctttaacccaggaggcagaggttgcagtgagctgagactgtgccactgcagtccagcctgggtgacagagccagacactgtctcgggaaaaaaaaaaaaaaaaaaagacacatcactataaatagcaaaaaaaacaaatctaacttattaatactaggaataccaacattattagggcacttgcaggttattcttttctaggccaagtacttcacttccatttgtctgacatggagattgagggagaaatgtatttgtgtgttcattttaatgtaagatatataaaaattaaattactggatttacctgtccctgaaactggtgttataaacatgacctatcttaagtgattttcccacaatcaaactcaggaacaatagattatttctgttttactcc

SEQ ID NO: 219503 - DNA, 830 bp, Homo Sapiens
atttgctgttcaacatgtttttgaatatacattctataaaagattatttgaaagacaaaattcatagaaaatggagcaaaactgtataaactgatttgtaactaacactggaccattggatcgatattacatgctgtaaccatgtgtctccgtctgaccattcttgttattgttaaaatgcagaggaatctggaaatatttatatccacggagtccttggatccagtgctacgtcagtaaatagcaccagcattttgcaattgctgatctgctgaaatgtacacattctgtctagtttggtctatcttttaaagcctgatctggtgtgaataatcaactaggaaatctaaacttggataacacgtggtgaacaactgcctttagctggtccagattaatcatttcaaagacatccattttagatcacaagcaggaagtcgatagtctcaaaggcactttgtttctcccaagtaggccaccaggcagcctctagagttgctttacccaaatccttctccagccatgacttggtgactctaagcttgctcccacctgccccctccacttccctcagatgatgaggagccagggctaagggggcagccttctctcttcccagtgatgcacatccttcacattggctgctttgttctggaatatggatatctcagcctggatgccgaggaagctgctggatgcttaatggtgctagaggctcaagtgtgtttgaaaccaagagccagttgtcccccatgcagaaagaaatcctgtgtgagcctctggtatgagaaataaaatctgccagttttataacattcactttctgcctc

SEQ ID NO: 219504 - DNA, 848 bp, Homo Sapiens
agaagttaagatcaagctcatgagtgaattggtcagcaatggcgtccagatataccagttcccaacggatgatgacactattgctaaggtcaacgctgcaatgaatggacagttgccgtttgctgttgtgggaagtatggatgaggtaaaagtcggaaacaagatggtcaaagctcgccagtacccttggggtgttgtacaagtggaaaatgaaaaccactgtgactttgtaaagctgcgggaaatgctcatttgtacaaatatggaggacctgcgagagcagacccataccaggcactatgagctttacaggcgctgcaaactggaggaaatgggctttacagatgtgggcccagaaaacaagccagtcagtgttcaagagacctatgaagccaaaagacatgagttccatggtgaacgtcagaggaaggaagaagaaatgaaacagatgtttgtgcagcgagtaaaggagaaagaagccatattgaaagaagctgagagagagctacaggccaaatttgagcaccttaagagacttcaccaagaagagagaatgaagcttgaagaaaagagaagacttttggaagaagaaataattgctttctctaaaaagaaagctacctccgagatatttcacagccagtcctttctggcaacaggcagcaacctgaggaaggacaaggaccgtaagaactccaattttttgtaaaacagaagttccagagcacagaaggtcatcatcacaagcaaactttattaaaaaaaaactagaagtgtgctttgattttgctgttatttgttttatcacttctatatttggtgaacagccacagttactgatatttatg

SEQ ID NO: 219505 - DNA, 822 bp, Homo Sapiens
cttttttttttttttttttttttttttttcaagtacaacagcatttaatggtcagaaacagttgtacagtattacagtcagccacagaagctgtgttgggggacaagacccaatccttccccacaccaggcaaagcagtattggacatgagttggcatgtggctgggcccacgtccttatcccccaggcctgaggggagaccaccttctgatgataaccaacccctagctaccactctgtattcatcaggggaggggtataaaccccacatgcaagaagaacccttgcccccagtgtcaaatgggatggggatgctagagttatagtaaaggggaaaccctatgtaagctgttaacagagttcacaggggtagggataacccctgttctccagctcccaaatgtgctcactttcccagcttcttcatccgttcatcaatgctggcaaagttcccctcaactgtggccaggttttcacgcatggttgtctgcacctgggtcaagagggtggtattgtccttcaaggaattagcaatcatctgctgggtggtatccaagtgtgtcaggagctgaccaaactgcatggcttgctcgtgcagctgcttgatggtgacaagtctctgcaccagctcagggagggtggaggcaatggggctccagcgctgtatagtttcatatagctggtgcaccttgctttgtgtatctgcatcttctacagaggctttatgcttggcaatctcgttcacctttcccaggacactctgtagccgagcctccacttgatccaaaactgcaaggtctagggcgctcacctttgcttgca

SEQ ID NO: 219506 - DNA, 829 bp, Homo Sapiens
catagacatgcacacacacacacacatgcacacagacacacaagcacgacagtcatatgcagacacccaccggctcacagcatgcacacagatgcagacacacacacacagacatgcacacatatacccacacagacacacacacatactctcacagaaacatatgcaaccacacaccagagacgtgcacacacatgcggatgcagacacacacacacagacatgctcacacacacacgctccagggcataccacacacatgcacacagacacacacacacaagcaccgtagacagtcccatttgcacacacatacccaccatggaaacgcccaggcagaaacacaggtgcacacacagccatgccctctgtctagaaagagatgctgcagtctggaaaaggttagcagggtgaacaggaggagggctcacctgctgcgaagtggatctgcactgcctgcggtccggggggttggaagtgggcggccagctcgataatgtctgggaggtcaaacacagtcacctgcatacgagggtactcacgggccagctctcgggccagtgcaccggtgcagcctgcggggaagcaaatgcatgctctgtggctgggtcgtctatggaactctgacgactctccaaagctcaactggggcagaagtaatgttcaagggcatggcattgattcccatgctggaagggaaagccagtggtggggagctcgctggtatcccagacaagactgtacaagcaggtgagtgtgggggcacagacctgcagggaaatccttccagcccaggggtggagggctgtactcccttctccttcctgcc

SEQ ID NO: 219507 - DNA, 831 bp, Homo Sapiens
cgccgccgaggattcagcagcctcccccttgagccccctcgcttcccgacgttccgttcccccctgcccgccttctcccgccaccgccgccgccgccttccgcaggccgtttccaccgaggaaaaggaatcgtatcgtatgtccgctatccagaacctccactctttcgacccctttgctgatgcaagtaagggtgatgacctgcttcctgctggcactgaggattatatccatataagaattcaacagagaaacggcaggaagacccttactactgtccaagggatcgctgatgattacgataaaaagaaactagtgaaggcgtttaagaaaaagtttgcctgcaatggtactgtaattgagcatccggaatatggagaagtaattcagctacagggtgaccaacgcaagaacatatgccagttcctcgtagagattggactggctaaggacgatcagctgaaggttcatgggttttaagtgcttgtggctcactgaagcttaagtgaggatttccttgcaatgagtagaatttcccttctctcccttgtcacaggtttaaaaacctcacagcttgtataatgtaaccatttggggtccgcttttaacttggactagtgtaactccttcatgcaataaactgaaaagagccatgctgtctagtcttgaagtccctcatttaaacagaggtcaagcaataggcgcctggcagtgtcaagcctgaaaccaagcaataccgtcatgtttcagccaagcccagagccctaagattacaaacaactatggccggaacctcctcagctctccctctgcagagttccctaccctaag

SEQ ID NO: 219508 - DNA, 773 bp, Homo Sapiens
tggaggacggcgcggaggagctggaggatctggtgcacttctccgtgtctgagttgcctagtcgcggctacggcgtcatggaggagatccggcggcagggcaagctgtgcgacgtgaccctcaagattggggaccacaaattcagtgcccaccggattgtcttagcagcctcgatcccgtatttccatgctatgtttacaaatgacatgatggagtgcaagcaggatgagattgtaatgcaaggaatggacccaagtgccctggaggctctgatcaactttgcctacaacggcaaccttgccattgaccagcaaaatgtccagtcattgctgatgggggcgagcttcctgcagctgcagagcatcaaagacgcctgctgcacattccttcgagaacggcttcacccaaaaaactgcctgggtgtgcgccagtttgctgagacaatgatgtgtgctgtgctgtacgacgctgccaacagcttcatccaccagcactttgtggaggtgtccatgtcagaagagttcctggccctgcccttggaagacgtgcttgagctggtgtctcgggatgagctgaatgtcaaatctgaggagcaggtctttgaagctgcattggcctgcgtcagatacgaccgggagcagaggggtccctacctgcctgagctgctgtccaatatccgcctgcccctctgtcggccccagttcctttcagacagagtacagcaggatgacctggtgcgttgctgccacaaatgcagggacctggtagacgaa

SEQ ID NO: 219509 - DNA, 796 bp, Homo Sapiens
attttgcagaattgcacttaatattgaaatgtactgtataggaaccaacatgaacaattttaattgaaaacaccagtcataaactattaccacccccactctcttttgatcagaaatggcaagcccttgtgaaggcatggagtttaaaattggaatgcaaaaattagcagacaatccattcctactgtatttctgtatgaatgtgtttgtgaatgtatgtgtaaaagtctttcttttccctaatttgctttggtggggtccttaaaacatttcccaactaaagaatagaattgtaaaggaaaagtggtactgttccaacctgaaatgtctgttataattaggttattagtttcccagagcatggtgttctcgtgtcgtgagcaatgtggtttgctaactggatggggttttcttattaataagatggctgcttcagcttctcttttaaaggaatgtggatcatagtgatttttccttttaattttattgctcagaaatgaggcatatcctaaaaatcctggagagctgtatttaatgcatttttgcactaattggtccttagtttaattctattgtatctgtttatttaacaaaaaattcatcataccaaaaagtgtaagtgaaaaccccctttaaaacaaaacaaaaaaatgaaataaaattaggcaaattgacagacagtgagagttttacaaacatgataggtattctgctcggcaatttgtaagtttacatgttatttaaggataaaggtaaatcattcaaggcagttaccaaccactaactatttgttttc

SEQ ID NO: 219510 - DNA, 770 bp, Homo Sapiens
ttcgttgggcggtgctggtttttcgctcgtcgactgcggctcttcctcgggcagcggaagcggcgcggcggtcggagaagtggcctaaaacttcggcgttgggtgaaagaaaatggcccgaaccaagcagactgctcgtaagtccaccggtgggaaagccccccgcaaacagctggccacgaaagccgccaggaaaagcgctccctctaccggcggggtgaagaagcctcatcgctacaggcccgggaccgtggcgcttcgagagattcgtcgttatcagaagtcgaccgagctgctcatccggaagctgcccttccagaggttggtgagggagatcgcgcaggatttcaaaaccgacctgaggtttcagagcgcagccatcggtgcgctgcaggaggctagcgaagcgtacctggtgggtctgttcgaagataccaacctgtgtgccatccacgctaagagagtcaccatcatgcccaaagacatccagttggctcgccggatacggggagagagagcttaagtgaaggcagtttttatggcgttttgtagtaaattctgtaaaatactttggtttaatttgtgactttttttgtaagaaattgtttataatatgttgcatttgtacttaagtcattccatctttcactcaggatgaatgcgaaaagtgactgttcacagacctcagtgatgtgagcactgttgctcaggagtgacaagttgctaatatgcagaagggatgggtgatacttcttgcttctcatgatgca

SEQ ID NO: 219511 - DNA, 710 bp, Homo Sapiens
tttttttcagttacacagctttattggcccccagcagccacagttcccccaagggggctttgggacagggagggcccgggcgtccagtgcaaactacagtacgtgagtcaggccctgaggggggtgcccggggtcctccttccctaccctgccaggagggccccgctggtgggagacaggtgtatgggctctgtgggctctgtccctggctgaatggccccagactggttgcagctgggcttgaggggctgacaacaggaagtaccatcatcactgccagagctcaagatcccacacccgacatgacataaataaaaaaataaatagtgttgtatctttcccctcatcccctccctttataaaaacacaaagtcctcagagctggggcgtttggccctgaggagccgccctgtgcgagggagccggagtgtgggctgggcgagctgggagcagaggtcgtccaggctgtggtcctgagcatggccctcggccagggtgaacatggggtaccgctctgtggctgaggaggagctgaggaccctggtcagctctgagcagagtgtctcaaactccttcctgtctccagcatagaagcccacggtacagcttgggtccatcttggcaaaggccatcttgcggggcgaggtgcagtggaaggactccagggggaagtcggcctggctgacatccacagtgggctggcagtagtg

SEQ ID NO: 219512 - DNA, 776 bp, Homo Sapiens
taggtttttaaaggctttattggggaatcgtagaggggtggggaccgtccttggaggcctcaggacaccatcctccatgttgctgggcagttgaagtccccaggggcccctgctcagaagcgtgtcaccagtctctgcgggggcctcatctgtgactcctggaggggcccagcccggggtaaccactacccccccatccctcgttgctgttgctcctgctccaggttccgctgcaggacctgctgctggttggcaatgacacgccggatgccgttgacaaagttgccctggtcatgggggatgaggccaatgaagattttcttctctgaagagtacaggagcataagcacgcggatctcacacgatgctttgtaggaaaagtgcacgcagccggcgaagccattgtccatgatccggcacaggctcttcagtgtctccaggtccttggtgaagtggaactggaccaggcgcgagttccggaacagcggcactagggtggtcagcagctgctgcgggatgagctgcatgtacagcttccttggccactgctcggtcctcaggatctccccctggttcacgtagacgtgggatggcagccacctcttggaccgactgttgggctcaggcctgggctcctgccactccatgacaccactccatgccagaaacttgttgttgacgatctggactgggcctgagttgacaccaccaggtcccactgcctgcttgcgggtggtgatgacctgccggatggcactgacgaagccgctctggtc

SEQ ID NO: 219513 - DNA, 757 bp, Homo Sapiens
agggtctcggcctccaggttcccgccccatcggggcccgggcgagcatggggggcaagcagagcacggcttcccgctcccggggccccttcccgggggtctccaccgatgacagcgccgtgccgccgccgggaggggcgccccttttcgggcactaccggacgggcggcggggccatggggctgcgcagccgctcggtcagctcggtggcaggcatgggcatggaccccagcacggccgggggggtgccctttggcctctacacccccgcctcccggggcaccggcgactccgagagggcgcccggcggcggagggtctgcgtccgactccacctatgcccatggcaatggttaccaggagacgggcggcggtcaccatagagacgggatgctgtacctgggctcccgagcctcgctggcggatgctctacctctgcacatcgcacccaggtggttcagctcgcatagtggtttcaagtgccccatttgctccaagtctgtggcttctgacgagatggaaatgcactttataatgtgtttgagcaaacctcgcctctcctacaacgatgatgtgctgactaaagacgcgggtgagtgtgtgatctgcctggaggagctgctgcagggggacacgatagccaggctgccctgcctgtgcatctatcacaaaagctgcatagactcgtggtttgaagtgaacagatcttgtccggaacaccctgcggactgacctgcgggcttgcttgctgactcctct

SEQ ID NO: 219514 - DNA, 806 bp, Homo Sapiens
ttctagtccagtctacatcagcttgttggtctttttggcactgtcattgtccagtaccagcacattcttggctccttgccacatctctggcctcaatgtgggaggcaaagacagtgagcatttccagagtggtgagatgggtgcagcacataatgaggcgatgaccacacagcatctctgaacagcatgtccacacagggctcgaagtcattatgctgcatgtccacctcatgtccacaatagctgagcagttgagattggtggagtggaccttctcattactcatcatctagaggaaggtcctcatcatctctacttctcaaaggggtagaattgaacctgaacctgcttgacagacaagagcccaagcctaaccaaggtggctgccatggtgacccttgccctgaaagccatttccattaatttaaaaattgtaggtatataggaactataataacaggcttaaaattaaaatttgctctgtttgttgggtcacacgtgtaatcccaatactttgggaggctaagccgggacgatcacttgagctcagaagtttgagactagcctgggcaacatagtgagatcccggtctctaccaaaaaaaaaaaaaaattaaaatggtgggacagggcacaagtaaaaagtcgcctcctgcccctgtcttccacccacccagtttccctgacaagtagccaatattaccaattcctcttgtatcttttctaattctatgcatatacagacacacttttcacttaataatatctctaacctgtccacattccatctaccattattttcactca

SEQ ID NO: 219515 - DNA, 443 bp, Homo Sapiens; identical to SEQ ID NO: 61518
  misc_feature (335)..(335): n is a, c, g, or t
  misc_feature (429)..(429): n is a, c, g, or t
  misc_feature (435)..(435): n is a, c, g, or t

SEQ ID NO: 219516 - DNA, 406 bp, Homo Sapiens
  misc_feature (349)..(349): n is a, c, g, or t
  misc_feature (385)..(385): n is a, c, g, or t
tgaaggatgaggcgttattccaaaaaagagggaaggacagctggacagcaggagcagtgggagctgcactaaagtttcccttccttcacagactcgtggtgagtgtggccttttagggtcagcagagtctgagcaaacctgagggtctcaacagccagaccctcccaaccctgtactcccatcctttgttgctttgcagcaggagctgagtgattgggcacaagaatatgtggtgatgactggtttgttttgttacaaagcctgggttgttaagtgccacaggggttttaaaaatggaggtggtgttttgaccttggtttttctctgggctctaaaagccagccactcnttgtttctctgggacaggggtctttttaattcaccntagttgttatgtttccagttt

SEQ ID NO: 219517 - DNA, 1000 bp, Homo Sapiens
atatttatactcacattttctcaactatccccaaaatgtcttacgtctttttccctccctgaaaacattgatttgtatatgttcttttgtcccttttaatctagaacagtcctcctgttctttgtttttttcatggaagagtgcaggtcagttctcttgtagaccagggcattttggatttatctagttgtttcttcatgtttagattcaagttaaaaggttttggcaagagtatagcataagtgatacctcacattgcatgacatcaggaggcttataaagtcatgttgtccttaggttatgctaaatttgatcatttggttaaggggaagtctaccagatgtcttttgaaaaggtatatttttctctttgcaattaataagtaatatgtgggtcctgtttcctaacaggttttcacccagtagttttatcattcttgccttaatccgttattatattggatttacaagatgttgatttaagaaattctattatttcttaaacatttattaactggcttttttatatataaagaagagctttttattccccaccaccaccttttttctttttttccgattatggctgtgaacttacgcatttttaaaataaatatattataatttattattgtcattattcattttgatgcacaaattgtttcaaatttaacaagagaaacttctcaagccaattcctgtgtctttgtctttgagtatttttggtttattgtatcgtaagatgttccaagctctcattgtgcctttttttttttttttttgcctcagatctggaagcagccattctccagggtaccctagctccttttagtattaatggtatttagaaactaagatgtatgggttgggagcagtggctcacacctgtaatctcagcactttgggaggctaaggcaggtggatcgcttaagctcaagagtttgagaccagcctggcccgtatggtaaaaccccatctctactgaaaaaaaaaaaaaaaaa

SEQ ID NO: 219518 - DNA, 464 bp, Homo Sapiens
  misc_feature (107)..(107): n is a, c, g, or t
  misc_feature (140)..(140): n is a, c, g, or t
  misc_feature (256)..(256): n is a, c, g, or t
  misc_feature (357)..(357): n is a, c, g, or t
  misc_feature (421)..(421): n is a, c, g, or t
  misc_feature (436)..(436): n is a, c, g, or t
  misc_feature (449)..(449): n is a, c, g, or t
ttgtaaaatgaggtctctttctcaaaccaacaattttgtagttgttaggataaaggaatcaaatataacatctcaagcaaatggaccttcttggacaagttcctggnctcctctttaaatgccaactgggtgctaaggcnctgtttaggtgttttgggcacatcatctcactaaatcctcacaccaccacatgtcagtgatggtttctattttacatacagaagttttggggactctaaggtaacccatccagggnttaccacagtgggaactggggggtttagggcttaggacttcaccgcatttccaaatccttggctcttaggcttttacaccaactatcttctaccctaatgntcaaagggcacagggctccttattgtgaggtcattttcccccatactatatgggctttttgggnttggggctacacagnggcactatttccnaatcttaccttaaat

SEQ ID NO: 219519 - DNA, 480 bp, Homo Sapiens
ccttagtttactaataatgtgattattcacttaagcaaaagccagtttcattcattacttcagcaaatgtttgttgaatgcttattattttgcccattactatgcaaagtattaggcatatagagatgaatctatggctcctgctctgccaggcacctttccaactactgttatacttattgcccttcattttgcagtggaattttattcatctctcaaaacatagctcagatacttggtcaagcttttcctgacccaatggactaccgcctatttggttcttcctaggattttgttcatattatataacagaatctagtaattttctccctgaattcagtcatcccttttaccttttagtaaaggaatcaaccccatatatctcccatccttgatatttagttagccagccacttggacactcaactggagactttatttctcagccttttttacagctaggtatggccatgtgatttc

SEQ ID NO: 219520 - DNA, 471 bp, Homo Sapiens; identical to SEQ ID NO: 60202

SEQ ID NO: 219521 - DNA, 469 bp, Homo Sapiens
agcttactttgcttgagctatttttcaatgagtcacctcttcctatgaaattgaaaactggtcactttcagaagctattctgcctatcaatgtagcaataagtttttaaaaaagaacaagaaatccacttaagtaattaattggatagtaaattgtacatacagaaactagacaaatggaaaactgccatattcttttcagtagttagggtactggtctactggtacagactgataatatatactgtacactgtaaccacggcaacctgaagttcaactcttcgaatcccaagaaatgtaaaaattgttttttggatttaaaaacgttaagctgagaaagagtaacactttcaagttttcattttgtggtctctagaattcattcccatgttttctccaccaactcttaggttgtgataacctgccccaaagttatctacccccatctgacatgcattgatacatcctg

SEQ ID NO: 219522 - DNA, 415 bp, Homo Sapiens
agcagaatttttttttcagaacttctagcagttctagtggtatgccaggggttgcgctgctgggaagggctcatgagctacactacacccaacctggtgcccctctcaaaactggagcccggcaggcttctttccagctcaggcaggtggggaagaaaagagcacgggggctggccgggagcagccagggtcagccccttctcttggaaacaagggaggcagtttgtctcccttaccagctccctcccctaaccacttatccacagccatccgtcatgaccttttcatgctcccacttctgacagcttccagatacagtgagtcaaacttcactggaagcaaactatcacaccaactgtcaaaggcagaaaacattgcctgattgctgtcctacatcaacgccagcatataaatc

SEQ ID NO: 219523 - DNA, 462 bp, Homo Sapiens
tttttttttttaatgaaaataatttttattttttggagaatgggattatgataattttctttcttttgattacattaatgcttctataatattctttgtacaatcatatttttaagtcatgctgaaacattcatcaatatgagatttcataaggtttagttttcgctgcttcaattatttaaaatgaggcttccactactttccttttagatttgaggactaatgtgttaatgttgaatgtttattaaatgataaaaaatattactatgcagaatgaaatctcaaagccaaaatttgaaagtaacctggattcagcctaaggatgttttatttttaaataataccatgcagaattaattcatatcagcaaaactgtagttcatatggacacttattccagcaatatcatgtaggagattcctgagtgcagggtaatttgtgtagtatgatcagatctcatgg

SEQ ID NO: 219524 - DNA, 364 bp, Homo Sapiens; identical to SEQ ID NO: 62054

SEQ ID NO: 219525 - DNA, 491 bp, Homo Sapiens
tttttttttttgggagaaaagataagtttaatcaacatagtgaaatgcctcttacagcaaacaaaactcaacacttcaatgcatattacaaaacacttaaaatgtccaagcagctttatgagaggcacaactttccaaaaggaaatggagtgattgtaacagatttgaactctgatactttaagtggtcagagagagcgtgtgtaccttgttacattagaatcacagaatccttgaggggaaagagaccttaagcaagttagtctaatcaagcttcacagaaacaataaaaacaggaaaatgtggtagagcagctcacaatcggctatgaatacatttgtgaatcaaatacatttaccaatatttttctctaatttttttgagatattgaaatttttcgctgaacttaactgcactattaaatgataattgtcaatgggtactcatttaaaccaatttttaaagtactttcaacttttaaaaaataactct

SEQ ID NO: 219526 - DNA, 630 bp, Homo Sapiens
  misc_feature (576)..(576): n is a, c, g, or t
gtagagagagggtcttgctatattgcctagggtggtctggaactcttgggctcagtgatcctcctgcctcagccttccaaagtgctgggattacaggtataagccaccacacccagccaattattttatttcaataaagactcagagtcaaaatcagcctccctgcacggtcactccagaaggcaaataattactggtatgctattctctgcaaggccagatcctgtgcgcagtgctcctgtgtgctgcagaaatctatctccaggtccatgttagccatataacatagaagccacagcacagcaaactgtataatgcagaaatatgttaacataagaatggaaaagaaaataatggagtccatttttaatgccaggttagggtgaaaatcataattctaacaagcttgttaaaggagggaaggtgaaggaatgtcacgttagttcagatcctatccttgcggacaatttagcattttaccctttacaatcaccacttagaaggtcattaggtacccctacccgtttcttgttgatttattctttgaagatgtcgtctcatgatgactgatcccangaatctctcaagtggagaccaaagtactacctgcccggccggcacaagccctga

SEQ ID NO: 219527 - DNA, 508 bp, Homo Sapiens; identical to SEQ ID NO: 58921

SEQ ID NO: 219528 - DNA, 422 bp, Homo Sapiens
gtctgtgccctttggtgtttccagtttgccagtttctctagcatctggtctaggatgtatgcagcaaaaagaaaacacagggaacttacctccatgttgattccttggttccaagttccctagagaatacatcatcttcttttcaactttctgggtcttcttatgttttgtttatatattttttccagagatgaatagggaaaatacatctaccctgtttactacttctttctggaagtagaagtcctcaattctagtattttatttttttaaaaatctattgtgatttcttaatgtacaatcacactataagaaaaagaaataatttgatcacttcttttacaatatgaatagcacttatttggtggtcttctctgagttgctaaaacatcaagagcaatactgagtaataatctaaataa

SEQ ID NO: 219529 - DNA, 461 bp, Homo Sapiens; identical to SEQ ID NO: 34207

SEQ ID NO: 219530 - DNA, 428 bp, Homo Sapiens
tcagtaagactatttattctacttcaagagtccttacagagcactgttgccacatgttgccagccagccttttcctatccaacgtttgtgtatgtgtctgtgagtgtgaacgtgtgtaccaagtgtcattgatcgtcatgtattcttttcatcagcctccatcagttgtttgattctttcaacaaatcttcctttagtaaacaagacctattggagtactgctcttttaagactatgatgagaaaattcaataaatcttgcttacaacaggtttccagctttacctcttctcagagaaaataatatactgtctctttcttaaactttttcttcttctgcccctgtagctcttgtttttagctgttcagttgtttggattaaatcctcaagtctcttgtctttttctgattctttacatttttgctctg

SEQ ID NO: 219531 - DNA, 515 bp, Homo Sapiens
tttgagatggagtcatgctctgtcacttaggctagaatgcagtggcgcaaacttggctcgctgcaacgtctgcctcctgggttgaaatgattctcctgcctcagcctcctgagtagctgggactacaggtgcatgccaccacgcccagctaagttttgtatttttattagagatggggtttcaccctgttgttctgttaaatcttttcaccttttaagtttgtccttctcctctccaatttgcaatagtggggtgtggctcacactgaaatactgtatttcttagagctacttattcctggagcctggcactctgggggcctggagggggtgtgtctagaaagcagccctctctaagttgagagtaactatgaaaattgtgggttataaggttttgagcagctctgggctacccgtcctctattatatctacagtggagtgtggcgaaagaagagaccaatctgagagtgaattcataatgtgggctttcaacagttacatctcgacatctgatc

SEQ ID NO: 219532 - DNA, 448 bp, Homo Sapiens
tttaaaaagttgtcataatgcaaattttattttgattagtttttgtgactcctttatcttaaacccagcgatgcttgccacttcccaaggtgtaaaaatgtgaagattaaggtaaactgaatgtcgaggagtgtaaagagatggcaaaacacagataaaaacatccaaaaagcctctgggggcaggtcaagcttatgattcaacagttagaaaaccaaaattacttggacatccccttctacttaaagtgatatactggaattgaaaatattaactgttagttttagaaactaagattacttgaagtaggctcattccagaatgcttttcttttttccttcctgaaacaattacatcaaacttagatatcctaatgtttatttttagatatactccttaaaggcatttatgttcacccttttcgaggatgagaaatttacattaacta

SEQ ID NO: 219533 - DNA, 507 bp, Homo Sapiens; identical to SEQ ID NO: 59923

SEQ ID NO: 219534 - DNA, 495 bp, Homo Sapiens
gaaaagaagaaataaaactgcctttatttgcagataacaatcacatacatagaaaatcctaagggatttacaaaaaaagctgctaaaactaataaggagatttaacagtattgcaggacacaaagcatttctgtatcctaacaaagaataattaaaaactggaatttaaaaaattatttaggctgggcatggtggctcacacctataatcccagcactttgggaggctgaggtgggaggattgcgtgaagccaggagtttgagaccagcctgggcaacaaagcgagaccccgtccacacaaaaaacaaacaaagccaggcatggtggtatgtgcctgtaatcccagctacttggaaagctgaggcaggagcccaggaaagctgagacttggaaagctaagaccttgagcccaggaattcaaggctgcagtgagctatgagcatgccactgcactctagaatgagtggcagaaaaaataaaacatctatgcactga

SEQ ID NO: 219535 - DNA, 534 bp, Homo Sapiens; identical to SEQ ID NO: 62006

SEQ ID NO: 219536 - DNA, 479 bp, Homo Sapiens
tttgtagagacaaggtttcaccatgctgcccaggatggtctggaactcctggcctcaggtgatctgcctacctcagtctcccaaagtgtcgggattataggcatgagccacagttcctggcccaaattcttttttcccccccatagaaagcagaaaaatattttattccaaaagacggcagaaataataaattcatcctgaaaatacagtaaggtgtaattctgttgagacagctcttccctctgaaaatgctctcctactgactgccccactggagtattacttgtcttgcagcagtttctaaacacttcattggttcccatgtgagaaggcaggagccatcttcaaatgcacagattccaaggaggcagtaacatatctctcagaagaagacaatcttctatctcagaagagtacataatcattttctggagtcagcacagttcagtttaagtagggacataattcgttaaagtgta

SEQ ID NO: 219537 - DNA, 490 bp, Homo Sapiens
  misc_feature (348)..(348): n is a, c, g, or t
  misc_feature (456)..(456): n is a, c, g, or t
  misc_feature (467)..(467): n is a, c, g, or t
aaaagacaaaagcaagtatttatgaaagtccatcagattcctcagtaaagctgaagtcacacactagagacaggtggtctgaaggataattgaaggaaggtaacctgttgggtccaatctgttcttcagtgagcagatcgagagctgaccttacatttagagcatgtttagaataccagatgtaatccagggtgtgcctgcactcccctgaggtccggatcttccaggtagtgtatgggggttctgactgcccatcagcactcagcagcttgtaggcgctgttcaggttgaggctggaggaagcaaagtgtttgtagacctcttctgttgggctctgcattgaaagtnccccacacacaattaaggggggaattcttgggctccttgggtgatgtttttgccaggtttctgaaaggaaggtcacagccttgagctgattcgaaaccgtttcccagnccagttgcgtngctttttaggatggggtaacctt

SEQ ID NO: 219538 - DNA, 537 bp, Homo Sapiens
  misc_feature (403)..(403): n is a, c, g, or t
  misc_feature (529)..(529): n is a, c, g, or t
ctgttccttcttcagctggttcacaactgattttcttttccgcaactcatccttcagagctctgatcctaccttcaatatcactctggtcagatgtagtttctgactgtgtcatagataatgactcatctgaccaactataacagtgctgatgggacttgataggcaggtgacattgtcctccagtcctatgacttcctttgctagactcctgctttgacacagatgtgcagcttttgggaagtgaatgtttactaggagaggtagaagattctagttcctgtgaacaaatcatttcttcagtaagtatactgtgatctggactccctggctgctcctgtcctatagactcggatggtacatattcaacagcagggctgcctaattcttctggaatggagctntcactgtttagatgagagtacagaggtactggagattcctcttcacttgctatttctttctgttctgttctctggtcctccagttctttcttaggagttttgggttttattaattctttgtcccangcagccaa

SEQ ID NO: 219539 - DNA, 527 bp, Homo Sapiens
tttttttgatggtgaatacaaccaggactttatttcatctggatattcatacatgaaatgtgaagtcttgctgacattaggtaaatgtaacctgacacaattgaaggtaaagccatatctgtagataatgctaagaaacacctcattcattagatgactagcacctagggacaaaggggaacaaattagctagagccctagagtgctctgaagctaggtcttactgcgtttaaaacagaacaaaaaacctccttcctagaaaagtccttcctaaagtgctactggaatgagttggaatatgaattcatgctacagtttttaatgaaatttaaactgtttttaaagagtacttgaagaaagtttgaaaaaaaaaaaaaaggcagagaaggatgataggtgagaaaggctatttctaggagtcaaaaagagaaactcttgggatcaagtcatgccttccaccatctttctcgagatactcctaataagaaatcccagatctggcaagtgagaaaagtggccctgggaag

SEQ ID NO: 219540 - DNA, 464 bp, Homo Sapiens
ttgaatttttccacaaagatagtttttttaaaaaagcttgagaaaggtgctttagttagagcaggcactcttgctatcaatcatcctgtctccacagctactgagaaaatatccactcatcatcattatgatttgagatggggtcttgctctgtcacccaggctggagtgcagtagtgtaatcatagctcaatgtaaccttgaactcctaggctcaaggcatcctcccacctcagcctcctgaatagctaggactataggcatgtaccaccagtccagctaactttttgtggtttttttggtagaaatgaggtctgtgttgcccacgctggtcttgaacgcctggcttcaagcgatcctcctgccttggcccctcaaagtgctgggattacaagcatgaaccactgcaccgagccagaatatccaattattattggtgagaagaaaattattccaaagtgcacc

SEQ ID NO: 219541 - DNA, 400 bp, Homo Sapiens
  misc_feature (278)..(278): n is a, c, g, or t
ttttttttttttttttgaaatggagtttcactcttgttgcctaggatggagtgcaagggtgccatcttggttcactgcaacctccacctcctgggttcaagtgattctcctgcctcagcctcccgagtagctgggattacagaagcctgtcaccatgctcgggtaattttttgtatttttagtagagatggggtttcaccatgttggccaggctggtctcgaactcctgacctcaggtgatccacctgccttggcttcccaaagtgctgggattacanggtgtgagccactgcgccctgccgacaatttactctttcctccaaagttatactgcttcctttctgtttcttatttttattgcacaggctggaaatttccacaaaaaatgttacataatagc

SEQ ID NO: 219542 - DNA, 638 bp, Homo Sapiens
  misc_feature (382)..(382): n is a, c, g, or t
  misc_feature (449)..(449): n is a, c, g, or t
  misc_feature (533)..(533): n is a, c, g, or t
tttttaagaaaaaaaaagtttattttttttcaaattatgaaaattctgaatgcaaaatatgatatgaagaaaatgcataaaagtaaaactaatgaaataaaatgcacccttaatactccatttcctagaattaatagctggtatatatatatatatatatagtatttcaaccagatatatatacatatatatacatatattattttctgtgctttgatcttatcttcataaacatcattaccaatggcatcaggtttttaggtggaggacttcaggcaaaatttccacacttgagtaaagattgaacagtagttatttgatatccttgtccttggtgaccttatttaaggaactgctggatggcggttggtggaagtgtcanaagaaagaggaggggccacagttggtgaggtgattctaaagtttgcaggcgatgactgtgctcctgngtgggtttcatccttcttggtgaaggaactgctggatggggttgttggtggcatctgaggagtcttgagatggctttcaggtanggttgtgctggcctctgaagggtttggatgctgacttctgtcctggggtagtgccctggttcctggagtcatggcttctctggtttggagtgactggatctggat

SEQ ID NO: 219543 - DNA, 489 bp, Homo Sapiens
tcagtttcaaaacaacctttattctgtttgaagatctaatacaatgcattaaagcaacttaaaacaagacatagctccattgaatctataacttgaacgaaatgtcaaggaggcacactacccccaccccccaccccagttgccttgtgaaggcaaagttacaactgaccgtgacatcctccctctcgtcaaaagaccaactttattttaacaatgtcatataaacagatttttaaaaacattgaacagattgtagctttaaaaaatacacaggtataaatgagtttttttttgttttgatttttttaaatacatatatatatgtgcgtatatatacatatatgtatatacatatatatatacacatatatatatatatatacacacacacatatatatatatatatatatatatatatatatatatatatatatatatatatatatatatatacacacacatatatatatatatatatatatatatag

SEQ ID NO: 219544 - DNA, 400 bp, Homo Sapiens
tttaactttatcaggatacttcatagggggaacttttcactgttcagatgaaaagccatgctattctttttcctaaaagtcaggagaatatctgaaaacactggggtccccaaaacgctgtacatttcacatgtaagtgagagaatgttcaagtctttattagtattaacttagcttcagagacttgtcctagagttttagaggcaaattggaaactatttcctggaacaacgcctcacagcatgccttttgatacctggattatattacttaaattctgaagaaatctccgctttttccccccttctgtgcatttttgatgctgagctgtttccggttttcccacactcttgcctgtcacaaagaagaaaccacaaaaatgctgcaaagcaaagtctgt

SEQ ID NO: 219545 - DNA, 425 bp, Homo Sapiens
  misc_feature (235)..(235): n is a, c, g, or t
  misc_feature (282)..(282): n is a, c, g, or t
  misc_feature (299)..(299): n is a, c, g, or t
  misc_feature (301)..(303): n is a, c, g, or t
  misc_feature (336)..(336): n is a, c, g, or t
  misc_feature (417)..(417): n is a, c, g, or t
taaaaaattctagtttttatttatgaagttaattccctcaaacattaagctaagtgtgaagtgcagtttttagtaagcttgcttattagttaaaaatggacaataaacatttacattcataaatatttcttttttttcttttttttttcattttattgttattttactttaagttttagggtacatgtgcacaacatgcaggtttgttacatatgtgtacctgcgccatgttggngtgctgcacccattaacttgtcacgtagccattagggatatctcccnaatgctatccctccccncnnnccccctcccctctggggttgtttgtttttaagnggttgcatgcaggccagggggcagtgggctccacaccctgtaatccccggcactttggggagggcccagggcagggcaggntcccctga

SEQ ID NO: 219546 - DNA, 521 bp, Homo Sapiens; identical to SEQ ID NO: 60390
  misc_feature (2)..(2): n is a, c, g, or t
  misc_feature (5)..(5): n is a, c, g, or t
  misc_feature (379)..(379): n is a, c, g, or t
  misc_feature (404)..(404): n is a, c, g, or t
  misc_feature (458)..(458): n is a, c, g, or t
  misc_feature (466)..(466): n is a, c, g, or t
  misc_feature (473)..(473): n is a, c, g, or t
  misc_feature (490)..(490): n is a, c, g, or t
  misc_feature (505)..(505): n is a, c, g, or t

SEQ ID NO: 219547 - DNA, 356 bp, Homo Sapiens
  misc_feature (23)..(23): n is a, c, g, or t
  misc_feature (307)..(307): n is a, c, g, or t
  misc_feature (334)..(334): n is a, c, g, or t
  misc_feature (348)..(348): n is a, c, g, or t
tgagctcgaaattcaattttcangtttctagtgtctcaatgttctgcagtgatcagataattttcccttgaatttataagtgtgatgtaaattacactgtgtttcaggcagtggagacgttattttctctaggctgactaactccttgtggggaactgggagtcaggagtcttgacttgagtacccgccttgccactgtgtacaagtcacttcccatcccagggtttcaatattcatatctgttatttaacacaaaagggaggcagaaaagtagggagcttgttctaagggattgcaaaccggaagngccttcaaggaaccgaaccaaacaggngacacaacgagggncccagggt

SEQ ID NO: 219548 - DNA, 462 bp, Homo Sapiens
  misc_feature (267)..(267): n is a, c, g, or t
  misc_feature (276)..(276): n is a, c, g, or t
  misc_feature (387)..(387): n is a, c, g, or t
gagcgggtctctctatgttgcctaggctggtctcaaactcctggcttcaagcaatcctcccactttggctccccaaagcgctgccatcgcaggcgtgaggaacccagcctggctgtaacacggcatcacactgtgagttatgtttacctgttccctacctcgacccacccagatctgacaccctcttggcattggaatgcagaaatggatggagaccctgtccctgccctcccagtatgcacgagacacatacgccccgtgaagggnaagatgggngtctgtcttgcttattacagcatcccagagccatacacacagtagggtgcataataaatcttgtagggaaagaaaaaatgcaacggagggggcgggggattagggtgactntcgctttatcacagcagggagagggaacagtacatgcaaatgtgttgaatcactcggggctatgtttcagagaac

SEQ ID NO: 219549 - DNA, 366 bp, Homo Sapiens
ttgtttttttttttgagacagagtctcgctctgttgcccaggctagagtgcagtggtgtgatttcttctcagcaggtgcagacacttctctgaagaccaacagcagaactgagtctcaggatgggtaaaggcttctgtaaacctccagatccacagccccaactactttcccttcaccctggctgaataccacatcttgaggcaatcaattactaaaaggctgctcacactctctttttccgtaatgagactacttcagcccccttttatttggctactctaaattctccttttatagggatacaacagccctcaatgacttcttgaggaaaaagaagataatcacaaattcagtttcaacaagca

SEQ ID NO: 219550 - DNA, 572 bp, Homo Sapiens
tttgaagagcaatggtttattgagtcatgtggtaatggcaggttgtctttaaaaaaagaaagaagcatcaaggagagaagccccacagggcaaagagagacatttcactcagaggccaaagtctggggggtagaaagaaggaagcttgacccaaacaaagtttcatttacagtatatacagtcaggccttgggggcaggagctgctggggagcagagagggaccctctatcgctggcttcagggggtgccttgggtcccttcagtagctggtgggcgtgagctgcaggaagcacatttggcttggcaggagctgtcaggaaggggaagcgggtttcctgcgattctgccttgttctgccctgggtgaagccgcacaccacacctcacctcccaggggcccaggccctgtggaatgtctgttttaagctccctggggctggcctggctgacggcagctgccaaggggatgccgcactgcaggaggacctggggtggtgctataccttcacagcagcaggcaaaagaggtcagctgacagcctggtggatttttgaaggacttcgttcagccct

SEQ ID NO: 219551 - DNA, 361 bp, Homo Sapiens
aatttttgctcagggtggtttggctattctgggccttttgtggttccatataaattttagggttattgtttctatttctgcgaagaatggcattgatattacagggagcccacgtagccctttacattgtaattggcacctccaccaggccataagaccccaggtcccagcccagagcatgtcccagaggaagactcagagaagctcctggaatgtgtgtgcacggctccttggtattgcttgggccttcacccctttgtgccacttccttcccaggcacccacccacagaacccacacatccccacgggccctgggctcaggcaaaggatacaggccaggccggcaaggaggccgcaaag

SEQ ID NO: 219552 - DNA, 474 bp, Homo Sapiens; identical to SEQ ID NO: 61276
  misc_feature (388)..(388): n is a, c, g, or t
  misc_feature (452)..(452): n is a, c, g, or t

SEQ ID NO: 219553 - DNA, 572 bp, Homo Sapiens
  misc_feature (348)..(348): n is a, c, g, or t
  misc_feature (499)..(499): n is a, c, g, or t
  misc_feature (504)..(504): n is a, c, g, or t
  misc_feature (513)..(513): n is a, c, g, or t
  misc_feature (551)..(551): n is a, c, g, or t
  misc_feature (556)..(556): n is a, c, g, or t
  misc_feature (568)..(568): n is a, c, g, or t
gtagaggcagttccttttataaaaagcaggaagccttgtgtagactccaatgtataaaaaatagataagcatatacttgttgctgatagaagtagtagcacctaatgtccctgtgaagaatgtactgaacaagtttaattactacaagttgattttttattgagtgcaaagttaaaaataacgtattctggagctatatgttacaaaaaaaaacatgtacatgggaaatcaaacttctatgccagaatgtgggatgaggaagggaagcaaggccttccctgacccacccactccccaggaattcagtgccctgcctgggggcagctttttcccatagggccctggggnacttatcttgaggatatccatcttgtcctacttcgctctagggaatggggaaattctttgagggggcagggttatttttttgccctgcccatggttggatatcccggcattttccctccttattcttaccaacatgtctaggcacacaggnggggngcttcaggnacatggctctttaagggggaccaattaatcttaggttngattnccctagggcttncttt

SEQ ID NO: 219554 - DNA, 435 bp, Homo Sapiens
  misc_feature (15)..(16): n is a, c, g, or t
  misc_feature (392)..(392): n is a, c, g, or t
  misc_feature (405)..(405): n is a, c, g, or t
  misc_feature (420)..(420): n is a, c, g, or t
  misc_feature (426)..(426): n is a, c, g, or t
tttttttcttttgtnnttaatttacataaaattttattaaaactatattatagtttaatgtgtaattaatgtaaaacattaataactttatgtttcacttaaggtaaattcttaaaaacctttcatagtagttaagtgtacaccactatggatgtgtataaactgtgtccattgtgtggacttgtgatcatcatttttaaaaagacctacatgcataaagatatacagaatgaggttgaaacttactttgggtcaccataaccaccacaaagtttttctcatcaattttatattctttgaggagcaggtatcatcattgagggattttgccctaatacattaggaggaaaaaaaaatccatttaggggcataatctttctccttacacttcnggtttaaaaccanctttctactcggaantatggnatatttccg

SEQ ID NO: 219555 - DNA, 613 bp, Homo Sapiens
tttttttttttttttttccgttctgtgcatattttattgaataaataaaaattttattggtttggtttttaaaacctataaacaatattcttagtttgatcacttaaaacatacaactttatgtaaccaaaatgcttaaaggattttgttcactgagtgttggctatttatacctatacatatgaaaatctgacctgtcaaaactggttttgcagtagccagatttgagatatatgtggatttctaaaaggttaacttgtcaaattatgagatctaatacaacacccaggtattaagggaaaaaatgattttgcaaccccaagttgggacttaacataagaaatccttatggtgttgccaacgttaaaaattctattgagcactttcatttttcagaataaaacaggataagcaaataactcacaacagtacctcatagtcttctataaatagctaagctatactttacagctataagaacgtgatatttgtatttccctgagagcgtagtttgctttgagttcaagggcatggtgtatgtgtatatgtgtgtttcccgaagccattgagaccagaataaatgaaagctaagacgagaacatgaatctgttgg

SEQ ID NO: 219556 - DNA, 491 bp, Homo Sapiens; identical to SEQ ID NO: 61587

SEQ ID NO: 219557 - DNA, 496 bp, Homo Sapiens
tttttttttttttttttacatattgtgaaaatgtctattaataaacttaagaaaatacattcaagatctctatacagaaaactacaggtatttctgagaaaaattaaaggagacaaatagaacttatgctaaggttacagactggaagtcactgctgttaagtgtcaattctcttcaagtttgtctacagacttcatgcaatctcaattataataccgacaggctttttggtaggaactgacaaggtgactctgaacatttattagaaaatgcaaataagctagagtagtgaggccaatttttattttattttattttttaatccagaaaagcatcaccaggattttttttttttttttttaagagacagggtctcattctgtcaacctggctggactgcaatggtgtgatcacaactcactgcagccttgaactcctggactcaagcaatcctcccacctcagcctcctgagcagttaggactacagatgggtgc

SEQ ID NO: 219558 - DNA, 528 bp, Homo Sapiens
  misc_feature (449)..(449): n is a, c, g, or t
tttttttttttttttttaacacttaaaaatacaagtttattttctccatattgttaagtctaattatgatttatttcaaaatcatgaaaagcagagcctagcataccaaatgctaggtcagatttgctctggaaacttactttctagattattttttggacttacttaaaaaataattaatttccattaatatagcactaatagcctccaaattatactgcagaattcctatatgtaaccttttttaaaaaaataattcatcacctgaaaaagatatatttactacagttaagtttttaagtcaagagttttctctgggaattgatatattttatctataatgtctccacttctccatactttcatcaaagtgtcactgaagcagctaaatgcagtcctgtggggctaggtctacaacatctgcttaggtttattttagtggacatggntccagtctaagagcaatgggccactgttctaggtcctaatgtacagccataaagccatagagatgaggtatttcgattt

SEQ ID NO: 219559 - DNA, 450 bp, Homo Sapiens
tttttttttttttttttgctacaaatcaggctttattgagtgcctactatgtgccaggctgggactaaaggcagtgaacaaaatagagttgctggcctggtataacttgtgttttatctttatctttgtttccagtatgcatttatctctgtctatccaaccaatcattcttccttcaagctttttattaaagccattaagagtaatatcaaagacttttgcaccaacttaataccatcttcctatccacccacacatccatccatcctccatccaccctcctacctactaatccctcctttcaggtgagccagctcttgtctccaacttttatttttaagagacagggtcttgatctgtgacccaggctggagtgcaacggtgtaatcacagctcactgcagcctcaaattcctgggctccagcgatcctcccaccttagcctcccgag

SEQ ID NO: 219560 - DNA, 428 bp, Homo Sapiens
tttttttttttttttttaaatttaatatttttttattgcttctagattttgaatcatacagaaaagctttctccaggttatacaataatccatctgattctactatggtcatgtaaaacactttaaaatcattcataaatttaattttttttattgcttctagattttgaatcatatagaaaagctttctccaggttatacaataatccatctgattctactatctatatgattttttcaacattcagcatttagctcgctcatccatttggaaattattctgacatatatacaagctaacagacgtttcacatcttttttttttttttgaaacaaggtctcacaatgtcatgcaggccggggtgcagtgacatgatcacagctcactgcagcctcaaactcccaggtccaagcaacccctcgtgccg

SEQ ID NO: 219561 - DNA, 482 bp, Homo Sapiens; identical to SEQ ID NO: 60535

SEQ ID NO: 219562 - DNA, 443 bp, Homo Sapiens; identical to SEQ ID NO: 62008
  misc_feature (86)..(86): n is a, c, g, or t
  misc_feature (196)..(196): n is a, c, g, or t
  misc_feature (370)..(370): n is a, c, g, or t
  misc_feature (383)..(383): n is a, c, g, or t

SEQ ID NO: 219563 - DNA, 440 bp, Homo Sapiens
  misc_feature (8)..(9): n is a, c, g, or t
  misc_feature (11)..(11): n is a, c, g, or t
  misc_feature (387)..(387): n is a, c, g, or t
  misc_feature (440)..(440): n is a, c, g, or t
taggtttnntnaggttttaattggatttccctcacttgcaacaaggaagacctgaataatattgcttctgtctgcatgtccaaatactttcatttttcaagaagcaatgttataccaacgtcagaacaaaggaacactttatgctgatccttgcagtttccattattagagacccaaaggaatcagaccaggagatcgttttgctttaaactagtagaatctgacctaaggcaaatatcacttgagaaaaaggagaaaacacatttcttccttcaacagcgtcatctccattcttggcagagagagatgtgaatgaccaacagccatgccattgcatagtttcatctttcatggtaattttttcatatttgaagccaaacatttggngccaaagcctgataacccagcgagtcaagtgctcatggtcactattgcttgtn

SEQ ID NO: 219564 - DNA, 593 bp, Homo Sapiens; identical to SEQ ID NO: 50435

SEQ ID NO: 219565 - DNA, 491 bp, Homo Sapiens
gcctcagcctcccgagtagctgggactacaggcgcccgccaccgcgccggctaattttttgtatttttagtagagacgggtttcaccttgttagccaggatggtctcgatctcctgacctcatgatccacccgcctcggcctcccaaagtgctgggattacaggcgtgagccaccgcgcccggccccaccaagtttttataatctagtagtgacaactctcttaccagcagggcttctgggtaatacagattcaagccttgtttaattctgatgatttatctttgggttcattgatggttggtgaattctccatagactgtggtcttgcagttaaaacttctgaatgagaatacagcccattaattggaaaagaaccagaagtcattggctgatgtgtttcactttttgatacatatgggcttgaggttgattgatgaaaaagcgaaggctttctgtattgagaaggcttagggtcactctgaaactcttc

SEQ ID NO: 219566 - DNA, 639 bp, Homo Sapiens; identical to SEQ ID NO: 45703

SEQ ID NO: 219567 - DNA, 532 bp, Homo Sapiens
acgccaaggtgggtcacaccagtccttctgtcctcacgttggcagacagagatctctaccctgaagtctttgtaggggcctgggcatctttgggagcctgagctgaaactgaagctggagctgcagcctgggccttggtttgatccttggctttggcctttggcccacacaacctgagacccttggcaatgcgggcacaagcacacttcccaagcttggggtgggtaatgtaggcaaattgattgagcttgaggctgacaccctttggcatctgggcttaacctcctttggctttatgaggaccttgatagcctcagtacgtgcactcacggccttggcattgttggcctgcatcttctttaggcccttcttgttgcacttcttggcaaagcccatgttcctcaggaacttggggtccacccccttaagagattcatatctttgcaatcggggtttcttgatgccattctgtgccattttcgggactggttgtgtgtggtgtggttcttggacttggccttgccatatgcaa

SEQ ID NO: 219568 - DNA, 316 bp, Homo Sapiens
  misc_feature (20)..(20): n is a, c, g, or t
  misc_feature (134)..(134): n is a, c, g, or t
  misc_feature (225)..(225): n is a, c, g, or t
  misc_feature (273)..(273): n is a, c, g, or t
  misc_feature (283)..(283): n is a, c, g, or t
ctctactgcctaaggtgganccagtgacacattcatagctcactacagcctttgactccctgggcccaagctgggactacacgcatgcatcaccatgcccagctaatttttttcctgattttgtagagatggantctcaccatgttgccaggctggtcccaaactcctggcctccagtgatccttctgcctcagcctcccaaagtgctgggactacaggcgtacncaagttgcctggccaaatgaaatttttaaaatttagagctttaaagantaacaagganttgaaaaactttaaaaatgtctattttgtaact

SEQ ID NO: 219569 - DNA, 413 bp, Homo Sapiens
  misc_feature (295)..(295): n is a, c, g, or t
  misc_feature (318)..(318): n is a, c, g, or t
  misc_feature (356)..(356): n is a, c, g, or t
  misc_feature (372)..(372): n is a, c, g, or t
gatcttgctgtgtcactcaggctggagtgcagtggtacaatcttggctcactgcaacctctgccttccagtctcaagcaatcctcccacctcaaccttcagagtagctgggactacagacacaggccaccatcattgactaatttttgaattttttttatagagatgggtttcgccatgttgcccaggcttgccttgaattcctggactcaagcaatccacccatctcggcctcccaaagtgctggaattacagatgtgagccaccaaacccagctgaattagaatattctaagnacttcatacaagtaggatcatanagtgtctgtccttttgtgtctggcttttttcacttagngtaatgttttctaagnccatccacgctgtaggatgtatgagaattcgttattctgac

SEQ ID NO: 219570 - DNA, 363 bp, Homo Sapiens
ttttgtatttttagtagagacggtgtttcatcgtgttagccaggatggtcttgatctcctgacctcgtgatccacccgcctcggcctcccaaagtgctgggattacaggcgtgagtcaccgcgcccgacctacagttgctttttagaaatgaaaggcttctaggtcaagtgtttcctgcctgagattctgtgtgtagagttagctaggccagaaatgcactgggtccaccagttggcacacagtggctttgagaataaggacactccaccgtagataccttccaagggcctctggtgacatgaacagcaaggggggcatccgatacaggacattctaacccacagggcactcgcacatgggta

SEQ ID NO: 219571 - DNA, 486 bp, Homo Sapiens
tcagggtggtatgactgtagttattagatttagaaacccataaaccttaccaagtcaggaaaagaccgaaaagctcattggtatcccagttacaaaaatattccactttaaataatatctttgtggaaaagcaagaaaatggctgtaagaaagggacgagaagatacctttgctcctctgagcaaggattcaggcatttttgagtagtggagtggagatggccgggagaattattgttaacagcaacagctttctaaaacctgcacccaactttaaattccaggctactccccaggaaacgtgtggagccagtgaacggaagaaaaacaatggaaggaaggcttgaaaagtccattacaaaactacagtcctttgaaaaagatttcaaagatattaaaatgaaaactgattacattaaacaataacttaaacttctgttcttctgttaaaaggttgacatctatcaattttgggtaagcttacaat

SEQ ID NO: 219572 - DNA, 558 bp, Homo Sapiens
agactagggtgcagtgatgcgatcatggctcactgcagcctcgaactcctgggctatatgcgatcctgccacctcagcctcccaagctgagactatagacccacaccatcacgcctggctaattctttttttctaatacatggggttttcttacattgtcctggccgatctgcaactcctgggctcaagcaatccttccgaaagtcctgggactacaggtgtgagccaccacgctcagcctttttttccttattactgtactagggacatttgtggcttttccacaatgagacttagtagagaaatgacagcttcccttggccctatcctgaaatacactaactagctcttctctgccagggctaccgttttctccctaacctttgcagatgtatgtatccatataaatgtttctatttcaacaaactgtagaaagtatacagtctgtacagctccccttataatgctattacctgatgatcctgactacaagttggaattatctgcatacttggcaaaattcaagtgtggctgcctatgcctcgagagaatgagcag

SEQ ID NO: 219573 - DNA, 458 bp, Homo Sapiens
tacaacatcttttaagcttcttctattactcactaaattgtggtaaagacttggatgaaccaatcctcctctcagtatttgcatttcactagtcccacctaacactgtggtgactaggtacccagggtcacccagctctttaggagccgggcaagaatgagatgctagtttcttgactacacatccagaaaacctactggacttgaacttggcaaagagaccaattgatgtttttcccttcaacacaggtcttacctggttggtcatttccttaaccaaggatcaaggacaaaaggccagacagctctgtggaaacaacaccaggatttcagtgagggggtgtcatcaggatagaaggcacacaggaagttccccttgaccaagaaaataaggcaactctttattatgaagttgttctgacacccttctatggatcagtccctggaacctccttcgca

SEQ ID NO: 219574 - DNA, 417 bp, Homo Sapiens
tcattcaaatataagagcaggcacattgtcaacctgttcaccaggacatcctcagtgcgcagaatgaatttgggtgataataggagctctgtgtatatttgttaagtaaatgaaccagcccagtgagctggactgataaaacaatcttcagagtcaaaagcactgaacggtgcaatcagtggacctgcagtctcattttgacttcactgttgaaggccagaccttgccttcaaatcattagttccttcctctaaattgacatgtgagaaagaatgcaccaaaagaggccaaaaccacttcctagcaaaaggcatgtgaggacagcccaagtgagaagactcatttctgtgctgacacctaacagtctttactgtgcattccccatcgctgatgatggagactccaccacaatgcctg

SEQ ID NO: 219575 - DNA, 487 bp, Homo Sapiens
ttttaattttaatacatctaataattcaaatttaaaaggtgtatttatgacaccacaataaagagcttttcaaagttaaccaaagacttacaagggtatatactgaaaactatctccccatccctgaccctagtttcccacacccccagaagcaaccaatagctaaaatatttctgaaatgtctatctgaatttttgatttctgagttcaagtaactagacattcctgtagtcagtatcttgttttatctttccattgtatgtatttacaaatatctgtatgtacatcctcccctctcctacctttctacacaaatgttagaatactttatgtgctttgaggtggactttatctttaatttattccagtgatcattccatttgagtaactaaagagctcctttaccattctgtatagccacagggtacctccttgtatggatgcaccttaatttataccctattttgtccatctacattgcttctaa

SEQ ID NO: 219576 - DNA, 621 bp, Homo Sapiens
gagtaactagtttggtttattctgcatcctgcatccccggatgaagcaaacttttgtctttttccatctggaactcttaaagtggtgagatcatcaaaaggattgactgaagcagcaagcagaaaagcaccttcattcacaagatgcaactggtgagtgctgcaggggccatgcaggtggctacagcttgcaaccatccagccaccgtgccagggtatcggagtactggcagtaccgggaccaggtgggccatgctcccatcccttcttttccttttacaatggtcttggcacatttaattgtcttctctaaattaggattcagtaaagcggaacatgacatatggcagcggttcctgccatggtcgccacaccagtcactgccacgcatctgaaagaggccaaagccagtgtagccctcacgtgtgttctcgtagatggccatggggttgaacttgctctcgaagtaggccaggcacacccagttctcaaggctatagccctcaaaataatccaggcctccatcgtggagtttcttagccactgtgcaacgccccaagatgtaagcaccacttggaaccaccaggtagcccaaggaggagagaaccacggatgccctcat

SEQ ID NO: 219577 - DNA, 553 bp, Homo Sapiens; identical to SEQ ID NO: 60715

SEQ ID NO: 219578 - DNA, 442 bp, Homo Sapiens
ttaaattaatacatgtcaagtgcttagagtaatgcatggcaaagatagcaagggcttttgagtattgaccgcatctatccaacagaactatttctcaaggagcacatagacaacaagcctgggtcataacgtcattttcattcacattgcacctgaagtgagtttttatgtcttttaggtaccagggtatgatgcaaggagctgggctttagttataaacacttgaatccaagtccaaattgccaaatttgccgtttcactttaggcaaatatttcacctctctgtgcctcaaattttctaacctgtaaagttggaataatatctacttcacagggctatttaggccaaaaattacacagttaaactctcagcatcatgcctggttcatagtagacacaccataaattttaattccttttcacttcttcccataaggcaaac

SEQ ID NO: 219579 - DNA, 503 bp, Homo Sapiens
tttggtggttggttttccatccttttgctgggcaggtttctgctaatagcttcaacctcaagagtcccattatacagacactaatagcacctactatgtgtcagtctgtagtgcctactatgtgccaggcattggagataatataatgatgaacaagataaacatgacatttggaaaagagagtctggttcccactctcagcccaccccaaagagaggccagaattgggcttccaaagaaatcagatgcccttgcatcacctccctgaagaggacgggtgaagctttggtgtctgcagagaatttggctggacaatcccccagttttggaacgatgggaaggagctgccatctgtgtttaagatgagaagtgggggagtggctggatatcagcagaagccaagatgaagagaaggtttttgtgagttcctatgcatagtggagacctgttctagtgagggtccctggggctgagcctgtgggtcagtggaatgatgctgagag

SEQ ID NO: 219580 - DNA, 529 bp, Homo Sapiens
cagactctgtaaaaggtttatttaaaatcatattaaattacacagcctcaacccagttaatctatccagtaaaccagtgcagcaaacagctttcctctgtcaggagagtgtgtacctctctgacttcgtgaagctggccggaatactgactcttggctcttcgggcggctgcaggcgacttgtgatgcgtgattgtgacaacaccgggggcccccacactgaggtgtctctggctacagggagacgcagaattgggtgttccatgtgggagcaaagtgagacttcggcttcgggagcttggagcactcttagaattcatttccatgtggtatttggcacaagctcgaagctgagtcacccagaattgtttctcttttgcatcagcagctctcagtttaaacatctctccattagcagagtacaccaccagcatgtggggagcttcatcgctcagggacactatggctccagataaagacaggactcctcgaggcttctggtgtttgctttgctcattcacaaaatactg

SEQ ID NO: 219581 - DNA, 557 bp, Homo Sapiens
tttcttatcaatgctttattgttgaaaacaaaattgaaattctctggcacataaaacaattatttctacaaaaggaaagcctacaaatcttgataatttatacaaataacagtttctcaaaaaataaaattttaatttagtaaacttgtcttgtgctctatatttttagcactgtctgcaataatccaccataaatccctgagcggagacattttttgatcatgttctaacgcccacccccccttgccccaaccctcccccccgaagttggtcagttactaagtccagccctgtagtgaaaagtgtcagggacatttagttattaatgatccgtgcattttatgacacaggcccaattattaacgctacttgggaactggtgtcacaagaagtgcctcaactgtgcattcagtgaacctattaagaaccacgtctttgaaaggaagaacaacaacaattaaaagataaaatgttaagactagaaagtcatcataggtcaataactatgtaaataaatacaaatgttagacactgaattaatctctatagccttatat

SEQ ID NO: 219582 - DNA, 337 bp, Homo Sapiens
gaattcgagagtgctttattccctgtaatgtgccatacaaatgcaaagcacgactaagaatcatcttcgatagcaggtgggtctttaatctactaaaaaatcttcctagggttcatgtaggtgtctgcggatgttgctacgtccacaactctagaagccagcataagaaaacaaaaaacaaaagccacagtgctaaaagggaagtacagaagtcctcgaatatagttgccatcggaatacccaggagtccctctcagaaagaccctcctatacctctgtgatacctcctaatagccattcacgccaagtggggaaccagctgatcccaaaagcccct

SEQ ID NO: 219583 - DNA, 474 bp, Homo Sapiens
tttttttttttaagagcttagcttttctttttattgcagttattagtgaaagttatacttcaaactgaagctaagcaacactaaaaccattaatatttttaaaatcaaggattaaaaacaaatacaacatagaactctccagtaggcagaatggcagaaaaaagagtagtggttctgtcacagaacatttcgtgacagtttggctcagaaagaatcatgacaatttcttttgttgttgttgttatttgcctcccaacaggaaacaatgacactttctttaacacaaaatattatatgagctgcttaaaaaccagcttcttcaagcttctcagtctcactcataacttgttcgtagtataataatttctgtggggaagatagtttaactgaagtataatattttttgtggggaagatagtttaactgaaaaagaaaatatattaccaaattgtaaatactgaaaacaagggcttt

SEQ ID NO: 219584 - DNA, 453 bp, Homo Sapiens
aactttgcattatgaattttatttttatatctacataagcatgagggaaagaactgtattttcagataattaaatccagaagagttacaaattttcattcgtcccaaagattttgtctgggtatttcttccttagctgtcgtcttgcagacaccatcgaagcatagatgatgcagccccaggagattaaaacgatggcaagcagcaacactgaataaatccagtccagcgtgcgacgacttactggcttcatggtaaggaggcggcagcagtccgcgggagctggcgggagctgcgggccttacagtaacctcccaggcggtggctgccaggcgccagcagccatcttttagccgggcacgagcgcccgcccactcgcttcgtgcagcgctgtcgctggcctcttccgcccggagttggggggcggtatcacgtgatcgggggccttgcccgc

SEQ ID NO: 219585 - DNA, 533 bp, Homo Sapiens
gacggctcaacggaactttaatttggtttctctttttcctaagtcagcttcctatgtgttttacatacatgtaaaatcacagaccctgcgcatgtggtgggagcacatcttttcacattttacagaagagacaactgaggctcagagaggttgcctctgttaacttgcccaaggtcacccagctaaaaactaatgaatacgcggctagaatatgattccatgtagggttctcccctgcataatttaggtcttaggggaatgtgagggtggggatgaatgctcaatttctttatatctttcctgttggagagtgtttgcattaatagcaggaggactctgttcaggactcttttgaagaaatctgtaaaacaagtactcatcccggaattcatactcattggtaatatgttggatgactcccccttgtaccagcctgtctccgtatatcacagcttcaccacggtcggaggcaaggccgacttcaattagccagctcaccaggtcacagccacagaaagttccgttgaagccgt

SEQ ID NO: 219586 - DNA, 558 bp, Homo Sapiens; identical to SEQ ID NO: 62025

SEQ ID NO: 219587 - DNA, 371 bp, Homo Sapiens
atgtttaaaatatcttatttctggctttcctgttaataaaacatattgtactttctgtggctcttattttctcttctgtttccttttgtggtttttctaatcagatttggaaaggcccataaaaggatatacattttcaattctaaggtaaataacttgttctcaggaagcagctctttggtttcagaatttcagggctgatttcaggcaactggcagggagcaggcctcgaggttgggttctgtgcaatgtgcaaaagtaatcaattaggagcaagtaagaagcggtttctagaaatgtccacttgagggtgctgcgtgcccaggtggcaacagaaccagcatcataggcacaccgtttacaataaattc

SEQ ID NO: 219588 - DNA, 452 bp, Homo Sapiens
  misc_feature (430)..(430): n is a, c, g, or t
gtatttggaatttttattgtcaaaagtaaccacagacatttaaaaagtagtgatgtatacagatgggttacttattaagtctactaacaatattcgttgcacttaaggattatagaccacccacaataattccacagatttctctttaaatgcttcaaatgttacttacagggtacgctgttccaatggttaatactaatattcaacaaccaaaaatgaagtagatgaggggaaacatatcaatcacactgaacgttcaacatctgataatataactcagaaaggagatttctcaagggtgaagaatgagtcttacctgacacacattagataatgaacaagctcaagtcttaaaatcctgatttattttaaactagtgcttagacatgactgtggttcaagtttggcagacaggtttaaatgtcaaatncaacactagagacaataccatt

SEQ ID NO: 219589 - DNA, 492 bp, Homo Sapiens; identical to SEQ ID NO: 60174

SEQ ID NO: 219590 - DNA, 448 bp, Homo Sapiens
  misc_feature (435)..(435): n is a, c, g, or t
tttttttgagacagggccttgctctgtcgcccaggctacaatgcagtggcaaaatcatggctcactgcagctttgacctcctgggccccagcaatcctcccgcctcagcctcctgaatagctgggaccacaggcatgtgccatcagactcagctaataattttttaaatttttttgtagagaagaggtctccctaatgtttcttagactggaccctgtttatcaagctttgacaaggcaccaaatatcatgccatgcactctgcatgttatcgcaattagtctttataatcctatgaacccacttttcagatgaggagaaaagtatgcaattgaggtaaagtaacccgcctggggtcacatatttaataaacctcaggtgtgaatgaattcatggaggcttgctttgtagtagaaaccactatcatctgggcagntagattctcactt

SEQ ID NO: 219591 - DNA, 435 bp, Homo Sapiens
ttttttgggtctcatttaatttaatcacaaaacaaacctcaggtatagctgttattctccccattataataatgataataatgaagaaaccggggcttttagagagtgacctggccaagatcatacagccaggaaatattaagggtaggaatgaggagtttagtttgggcgtttaattaccaaactatcctggcttctgctacgaactacttttacaaagacagaatcttactgcataggttaaacgacactggaatgacagagcaagtcgtagttctaaacatctcactcattcaacaagcatttaagtgattctagaccgtcagaggacaactgcaaaaagtacttgaagaataaatatttaataataatgtaattataattataatctgtatatctaaacagtgcctttgtaaaaaccctttccatcatctt

SEQ ID NO: 219592 - DNA, 465 bp, Homo Sapiens
catttaaaggcctatagtacaatttggctacttatgttagaatactttgaaaccaatcagaaattcattaaacagaagaaaaattcctgattctcatcggaaatacagataagcacaactgtaacttgtttgacaggaagactgatgcagcataaatagcccagagatagtattctaattagcattccctaatcgcacaaagagcatctacgggaccccagtgtggcgtaagggctgaccctgtattcacagagctagaaagtgagctcagaaataacagcaggaatactaacaaaaaaacaagaaacctccccaaacagcatgtgactgaacaccaaatgagcagtgccagtgtgtgcaagacagagctctatgggcttggtgtggtcaagaaaggtttcatggagaatggtgtgaaggctgagaaggccttgaagaggtttgaatagagaactaagggcattc

SEQ ID NO: 219593 - DNA, 483 bp, Homo Sapiens
tttttttttttctttgttgggctgttctgaattgtagataatctttcagtgtttgtggctaagccggtttgctgtgcctgccctgggttatttttcataagatgtctggaggagagactttccaaaacatgcaactcttccttagacgtggtttttgccaaatcttgtttcaaaagtaaccctggatctgacaactctgaagctggcaaaaccctgacagctttgcttttttccactattatttctctcgggactaatcgatcacttccaagagaaactctcccgtggtggtcgaagtcttccgcagagctgcagttcctgcgtttctgttgggttttggccactcgtggactttgttttggacatggtgatgctgactcacagctacagacggggctcctgcttataagccctgtctttaaccgctccccaagatgaggtttttgctggccactagtgtcttctggctgggtctgattaact

SEQ ID NO: 219594 - DNA, 412 bp, Homo Sapiens
  misc_feature (7)..(7): n is a, c, g, or t
  misc_feature (348)..(348): n is a, c, g, or t
  misc_feature (362)..(362): n is a, c, g, or t
  misc_feature (378)..(378): n is a, c, g, or t
  misc_feature (384)..(384): n is a, c, g, or t
  misc_feature (412)..(412): n is a, c, g, or t
ttaaaanaaaacaccagaaacccctctgtgtagggcagaggttcttaagcagtgaggggcacctgcaggatctgttccagcagacagctgccccaaatcctggctttctgggtcaagagggctgggtggggcccaggagctgcctctcgaacaagttccagggaggctgctgaggtggggcctgcctttcagaagcccgggtctggtggagagactgggagagtcctgagtgactcgtctgcatttgcagcacctgtctgaagagaggcatggagattagagctttcttctctccctacaaccccatcctctttctgagcatttcccagctgcacgtggctgtgaggnaacacgggggcctncagtattttcagggantggctnttattcaatgtgttttctctttttagcn

SEQ ID NO: 219595 - DNA, 293 bp, Homo Sapiens
  misc_feature (5)..(5): n is a, c, g, or t
  misc_feature (229)..(229): n is a, c, g, or t
  misc_feature (268)..(268): n is a, c, g, or t
  misc_feature (276)..(276): n is a, c, g, or t
tttangaaacaaatatttaatgaatgaatgaatcctgcatatgaggtatgagaccaacatggaccagactgcttagaaaaggggtcgtggactcataaaattttactggaactctctgtacggatatctacaattcctgatgttcagcattgcttatttaattcttccaaagcatttttgcttgactgattcctctactattatgactggctggctattaaaaccaggngaaagtggacagaaatctaagtcaagtaaataacaatgngatatggngaagtagacaggttcaa

SEQ ID NO: 219596 - DNA, 551 bp, Homo Sapiens
tttacattatataaggtttcttaaggttctaaaaaggtttttgttaagattttatctttagtcaaacttatattttacttatagaaccaactgccttccctttctctttgcacctatttgaatactgcaaggaaatagattcattctgcttagatgagtcaatcttttacaaactaagttaaagatattcttctgggctcttcctaacagatgcgatctgactttagactttcctgagtcaatccaccctttcagacactctacctctgattcagtgacaagttttattttgtgtcctaattccaaaagtatttcacttattcaaagactttaaagatcaacctcttgggttaacctttcttctagtgaagaatgacaatgtccttctgacccagtccggtgctgggtgctctgtgagtcgcatcacgtcctcccctgccctcaatggtggtgcccccatcacttttgacgtcatatccaagttggttattatggatggctaccgctctctaagagcaggaatgtcccttcctttccatcaagcccagcaa

SEQ ID NO: 219597 - DNA, 473 bp, Homo Sapiens
ttttgtgtgtaaaataaactttattgtcagaggtttctaaacgctcatccttcaaggaaaacggacatatgctgaagagctgataaacagtctacagcagtgtttttctaacttaatcttgattacaagtccttgccattttcctccagctgctgttgactccagttatatataggttgggggaaaggggattatctatggatgtacgcatcactgtctcttgggcagttatcacatttgcaggctgaagggatgtgatttttataatcaaactatccatttggaatacaaatctggagtggctgtaaaatttgcttctcggagatggagctttcaaatttggactttcaattgttctgttgttttagttgttctcgtcaactggggaactgtttgtgactaagctttgttaaaagtagagaagagcttttcatagttccaacatcagttgttacctctagaaacttgattca

SEQ ID NO: 219598 - DNA, 455 bp, Homo Sapiens; identical to SEQ ID NO: 60709

SEQ ID NO: 219599 - DNA, 727 bp, Homo Sapiens
  misc_feature (420)..(420): n is a, c, g, or t
  misc_feature (603)..(603): n is a, c, g, or t
ttttaaagtttaccataattttattgtaatatcagaatcacataagatacagagttaagcagaaaactgatgaattttcttcagatgatctttaaaaatctcaaaagccttgaagtttgctatcttctactgtcttattagaaggataaaaaactttgaatgaaaatccacttcttggaaaagagccagggtttatgcagaggcattcggtatttgtcgtagtgaaaggatcatatttgtctgcaatgacaagtagatcgggcacaggatacactctcaaagcatagtcatatgcccaatacactgggcagacataaagaggtaggggagtcagatgtccttgggataagatagtctttacaaagtgattaggaatagccaaattgctgctaggaaaacggacgcagtttctgcacattntatttactaagtcttcacggaagacagtaatttcctgtgtacagtactgaattctgcaaggattagtagtaaaaactgaaaatggtaccctttgtctgaattcattagtgatgctttcagcaagtggtggccttggtaagatggaaccaaatccaggatcctctggaccaggtaccaacacangacgactactgtggtgaatatctgggtattcacatattatattctgccaagtttttaggggatctttccaagcttgaacctggatttttcccatatgtgcagatgaaaaattaccacacaggat

SEQ ID NO: 219600 - DNA, 590 bp, Homo Sapiens
ttttagttcagaatttttttttaaaacatatggggtctcactatgttgcccaggctggcctcaaactcctgggctcaagtgatcctcctgccttagcctcccaaagtgctaggactacaggcgtgagccactgtgcccagcctggaatgttttaacaagttaaatgttcaacacatttgaagtaaaaaataacatttcagaacattaaaaactcataaacttataaaaatacaagtgttaagcatacattgccattctaatataaatcagggaaaaaagtgaaacattttaaaagaaaccatataaaaatgaggaaaatttaaataatcaccaaaaaattgagaattctgatttcttcaaaagcataattttgcataaaaattgcattactagtatcacaactgagctgtgagcatattttttattactttatcttttttaaaacggtctttattttttagaccagttttaggttcacagcaacactgagcagatttcccatattcccccaccctgccaccaccagagggtacctctgttataactgatgatcctacactaacacatcattatcacccagagtccatagt

SEQ ID NO: 219601 - DNA, 494 bp, Homo Sapiens; identical to SEQ ID NO: 60264

SEQ ID NO: 219602 - DNA, 553 bp, Homo Sapiens
ttaccagatccctacaatggtataaaggaagaacatcaacatttaggtttagattcactagaacaactgctaagcatggaactgtctccaaacttttaaatataatataaacttttttttcaaagaggaaaggtttcctgtgcagaataaataaatgcagatattgggtgagggtgagaaggagaaaagggttagagcccagcttgctgaaatgtcccttagtcctacccttaatctgtacagcagccctgggtctcagcaaaacacaactagaaacccactgccaaaatgggcactcagataatacataattgcaaaacactatctttttaatactgtaatagctacctaacactatcaactcaaatctgtgatcttaaactcagtattgatataataaactaatagttaaaccaaggcatactttaaccagtgagtctagatttgctaaatactaataaacttctcagttttgaagaatggagaacataaccttctttcactgatttactattttggtcacacaaaaatacagtgttttttaagcatagtg

SEQ ID NO: 219603 - DNA, 516 bp, Homo Sapiens
tttttttttttaagttcaacaagaaaactttattatttaagaatttctttataaaactgaactatatgttcatgcattataattccaggaaactaaagaacataaaattacctttaaaagctaatgtggagaatttcaggggaaaatcagtattaacttatagttttattattgatataaaagaaaacttcaaatactgtacagtaaggggtgctgtagaacactataatacactattaccaattattcattactcaaatgtaatatatacagtaatcacgaaatcggaaaataatgggcaacagccagtgccttaagggtgaaataacatctatactattttattgagcagttaaagcacttgctatttttctaaatatttacactattactgcttatgtttacaaattctaagtatcatttccctccaaaaagtagactttccagttcttggcactaattcttagtcaaataagcctgaaaatactggcaaccttttcagtcttgcattgctct

SEQ ID NO: 219604 - DNA, 430 bp, Homo Sapiens
ttttttttgctgaaagctcaagattaataatacactttaaaggatttttatccctcatcagagacttatacagtgcatctttttttggctggagtgggaagttagggggaggctagctggaaggaaagaaaacctgagagctgctgggagcatttatagcaccacagcagcaacactctgaacagcaatgaacaatgcggaaaggatgccgcaaacttccaataaagcttttgcctaaaataggaattctttttccagcatacttgatttatctggtgtcagaattccaaccacctatattccctgaagaaatgggactccaagccctgtaattattctactgggctctacgtgagaatacagtaaggaaaaagtctcagtcattgtgacagggtagcattgacatggtggatggtagaacaatgggaca

SEQ ID NO: 219605 - DNA, 559 bp, Homo Sapiens
ttttttttaacattcatccctaagcgctctgctctctactaagagctctttggatcaacattagattttaatcacatttttagcctcaaaaaactgggaagcaataaaaccaagttgctgatctctatttgcaatgtcattaaaataatccttaacaattctggtttaggtaataaatgcttataattttttttctcctagatatgggtcacctccaggtagattacagagataacaggctgcacccaagtgaagattcttcactggactccattgcctcagttgtggttcccataattatatgcctctctattataatagcattcctattcatcaatcagaagaaacagtggataccactgctttgctggtatcgaacaccaactaaggtactgtcttgcaaaagttagtctcttgaatgatgaatctaggaaaacttacactcatattgaaattgcttgaaaccttgtgtcttaaccagtgaagtttttactttgctcttcatagcctcaaatccataccaggctatagtatgaatcaaatacatagtacttgccca

SEQ ID NO: 219606 - DNA, 501 bp, Homo Sapiens; identical to SEQ ID NO: 60600
  misc_feature (308)..(308): n is a, c, g, or t
  misc_feature (388)..(388): n is a, c, g, or t
  misc_feature (482)..(482): n is a, c, g, or t

SEQ ID NO: 219607 - DNA, 1000 bp, Homo Sapiens
acacaatatatttatgtatcaaaacatcacattgtactccataaatacatacaattattatgtgtaaaaaatttttaaattaaaaatgagacaagattagctgagtagatttaaaaacattacccaatgttatgctgtctataaaaaactcaattcaaacataatgatatagctaagtaaaaagtaaaagcatagaaaaagatatatcacataagtattaaattttaaaaaggaagagtggctatatgaatatcaaggtagacttcagagcaaagaaattaccagacacggagaggaattttacatgatgataaaagatcaagatcaatctaccaacaagagatagcaaacctaagtgtgtatgcaccaaaaacagatctttcaaatacatgaagcaaaaactgataaagccaaaggaagaaattgacaaatctactattatagttggagacttcaacactcttttctcagtaattgatagaactactagatagaaaatccacaaggagccaggcgtgatagctcatgcctgtaatcccagcactttgggaggccaaggcaggagaattacctgaggcctgaagtttgagaccagcctgggaaacttaatgagaccctgtctttacaaaataataataattattttatttttggctatcaatcatgccacattatttttaattacatacaaagatctaacatgccatccagggaccattttacccactgctttgattggttgccaatctcttgtctctctcttcagcaatggtgaggcagataccttttccttggggaagagaaatccatggtatgttgcccttgcaaacaacaaaaatgttggaaagtcaagtggcaaagctgttgccattggcatctttcatgtgaaccacgtcaagagatccagggtgcctctctctgttggtgatcacaccaattcttcccaggttggcacctccagtcaccatacacaggttaccagtgtcgaacctgatgaagt

SEQ ID NO: 219608 - DNA, 447 bp, Homo Sapiens
ttttaactaatgagtaaagctgtccttcataggtttaaaaactgtgtatttcttttcctataaactgttgtttatattttttgcctgtttttctcaatttgtaggagtttgcacattagccattggtagtaaagttatcaaaaattttttcagcttgccacaagtcttttttattattttaaaattatcatgcaataagattgattgttttgggtgtcctgtatgaattttaacataccttcagcacaacccacacagctccccttgcactgggtctgtggtccgctggcgtcacgtgtgtctagttttagatgaaagtccagcttggtgagtccctgtgggcgctgagagcagaggcgtggcgggacggagtcatcctgggagaggcaggagtctcttcccaggcatggctttggagctggatcccagtcagcagaaggagtcaga

SEQ ID NO: 219609 - DNA, 493 bp, Homo Sapiens
ttggtagttattgttgttcttaaagcccttcctcatggacagctaactcttttctatattaaactgctacacagaaattcctcaattcatctactggtatctaagtctccagtctatactttcccaggagaaaattcacacattttcccatcataaaaagtttaaaagccaccaacagaaaagctaaggttcacttatatttctggaaattaacagtattattccaagcaacacatgtattacaaataatcaaaaatgtcagttgaccaatctgctcattataaaatgaacttacaaaagtgcatagaataatatatgactctttaaaaccaacagctcacactaaagttattcctcatacatgtatgaccacagttaaagcagcactatctctgctctcttcaggaaaggaggaaagctaagacgcacttcaaagatctagtccagaaaggttagtaaaagagtaggctgcataaccatagagagcattatc

SEQ ID NO: 219610 - DNA, 479 bp, Homo Sapiens
  misc_feature (463)..(463): n is a, c, g, or t
ttttaaagtaagggatcatgcctcatcaaacagtaatgaaacaaaggcctcgagccagcttctctaagaaatataaatcaaggtcctaaatcacttcactaatacttgggtgggaaagttgaaacgatatgtgcttcttggtagctgtgattctaattttctccaaaactgagttatctgccatcacacaaaatttgctaacagcctcactcattattacagattcatgtcactgcttgtgagagatgcttgctttcctcttctatgctcacaaaatcgcagccttgggcaattaatcctgataacaccaagagagacccaaatacttgctatatcatttaatgactcttggcagaaagcaaaaacacttcacttgaacatggtattataaaaatatgtattttactaactttcataggaaatttaactatttgatgaaatgcctttgtatgttacctgattntcatttgtacttaaca

SEQ ID NO: 219611 - DNA, 511 bp, Homo Sapiens; identical to SEQ ID NO: 59801

SEQ ID NO: 219612 - DNA, 472 bp, Homo Sapiens
tgctgatgtccaagttatttattaacagaggggtcatcacagttgttggttatattcacagactcagctgtgactataaatgctctccaacctgctcagggtctttaatgaatggaagtgggctttgtgagactaaaaacaatttggaaagttcatgaagattacactgaggccctattgagaagctggaagtgggagcaataagatggccctctgagagcaaaaacataggagcaataccaggtatagatgggcagaccagcagagatgcctcatgggaccacaaagcagcaaggccatcagggtctcagaagaaagagagctggcctgatgtgggaacagggcaaggagagtccctgggggatacattggcagaacccacacaagccccggcagggctggtgcactcatgggagctgggagaagagtgttaaaccaaacaggtcctgccctcacagggctgacagtctag

SEQ ID NO: 219613 - DNA, 557 bp, Homo Sapiens
ttttcagtcatcaataacatttttatttcaggtacagctgcaactaagtagaacaatgaatttttttagactagtttcatttcaggatggcttctgttatataacaaagtactccatagcaatttttaacaaaatcatgaactcaaatctgtagcaacttttaaagatgtacttatttccaaatcagattacaacctaaggttacaacagtccagactgcatccatttttttccagtagtagaaagaatgtatgataaactcattctacaaacaccactcaggaactctgcatcactaaggtcactttaaattgcactgtttacaaattacaccctttaccaaaaacgcagcaatttttttttacaggctttaatgtttctgattatatttcagttacgttttggattgggaggatgggtgggggctatttccaacagcaacacacacaatatatccatttagcagacttctaaaaaaatcactaattttgcctgctcttttcttctcacccgtcaggtaacttggctaaatttatatctttgcaggtttttaaaaa

SEQ ID NO: 219614 - DNA, 444 bp, Homo Sapiens; identical to SEQ ID NO: 145355

SEQ ID NO: 219615 - DNA, 564 bp, Homo Sapiens
  misc_feature (509)..(509): n is a, c, g, or t
aagagtcggggtcttatatgttgctcaggctagactgctgtggctattcacaggtgtgatcatagcacactacagcctcaagtgagcctcctgcctcagcctctcaagtagctgggactacagttgtgtaccaccatggtgcctggctataattactctttttatgattccttttttattccgaatcttgcattttttttttctatctctttttttccatcagcctcatgaggaggttattattattattttttggacctttcaaagaaccagatcttggatttactatcctctggctttcatttgcttgagtctttatagtttgcaaagtttccattttcagaagaagaaagagacccaggaacattctgtggcttgctcaaggtcccacagcctgctagcaagtggctgaactggaatttaagctaggcccctgactccaggctgctccaagagatctctgagccaagcttttgaaggcaccatcagtggtgcctgggatctccggngatctcccagcaattttgtcttcttttaagtcacctgtccctttacctgctgctt

SEQ ID NO: 219616 - DNA, 525 bp, Homo Sapiens
aacagaaccttaaaaactgaagttgtataattttttcagaaaccataatagagttgtaaaaacaaagattttaaaaatcctctgaattgtctgtcataatgagaactataatagccagttaaccaaagcttaatgtaaatgtgcttcagaatgctacataaattctgagttaagactataggttgtatttattggaaagtttatagaaggcaataaaatttttgaatctacttactgtttttcagtgtgaagagacaaaacagtagtaagtatgtaaaaaacatggaaggaaagaacttttcataaaaattcatttctcagaataagtaccagaacaatgcaagtattattccagaatatttacaaacaaaaccaaaatccccaattacccaaccacaaagaaatagcaacaagacaaaatactttaaattacattaaccattaactgtatctactattataaatgcttactctcctcaaagaaatgaatttctaaacaaaatctccattatttccatactatct

SEQ ID NO: 219617 - DNA, 434 bp, Homo Sapiens
tttttaaagattctaattttcaacctttatttcaaagtttatttataaaggaaatacaaattttgataaacaaagcacccaattcctacttattttttttcttcgtggaaaaaaaagtatgtgacacatacttgtcatgccctgtattgattaagcttacaaaagatattgacagaaactatacaaatctagaatttagagtgctaggaatgttgccataaggtatgtgtacctacattaatactaaataaattccacctacatgctttctttcaccctttcccagtatcatttcagctttcctcacagtctcactgtcccagaagtctaggggcaatgactctccatcactagtgctgtggtggcacctgtgctcccacatcctgatatcctacccctacggcaatcctttgagaagcacctgagaacaccag

SEQ ID NO: 219618 - DNA, 523 bp, Homo Sapiens; identical to SEQ ID NO: 60659
  misc_feature (242)..(242): n is a, c, g, or t

SEQ ID NO: 219619 - DNA, 490 bp, Homo Sapiens
agagacaagatctctccgtgttgtctaggctggactcaaacttctggactcaagcaatcctcgcaacatcattaatagctgagagtagagacttgagccaccacacctgactatagggtctttttgaaaggaaaattgacatcatcaaaattttaaatatattcagtctatttctcaaaaactcaaagaatactaataaatgtgtactcaggtatatgtacagaaattgctgtaacattataattttaaacaatttaaaacagactgagtttccaaagttagggtacaatgaaagaaaaggtggcttatttatactctggaatattttccaagagttgaaaaggatgaggatacacacacacacacacacacacacacacacacacacacacacacacacacagtttgggtatccctaatccagaaattcaaatgctccaaagtccaaaactttctgacccaccaacatgactgatgctcaaaggaaatg

SEQ ID NO: 219620 - DNA, 498 bp, Homo Sapiens; identical to SEQ ID NO: 60108

SEQ ID NO: 219621 - DNA, 486 bp, Homo Sapiens; identical to SEQ ID NO: 138263

SEQ ID NO: 219622 - DNA, 460 bp, Homo Sapiens; identical to SEQ ID NO: 60622

SEQ ID NO: 219623 - DNA, 566 bp, Homo Sapiens; identical to SEQ ID NO: 62029

SEQ ID NO: 219624 - DNA, 575 bp, Homo Sapiens; identical to SEQ ID NO: 60513

SEQ ID NO: 219625 - DNA, 467 bp, Homo Sapiens
tttataataaaatagtcttttattttgataaacatgtagatagcagtaactataaaggctagtatacttaatatgtacattatatcttttaaaggagaatctggggcatttccttgtgttatatacaataacagaatcatggtcccttcaggttattgttcttttgttttaatacatacatcttgagtttcttctgcatccttgttctccttgacatcagccactctgtcaaatctctgtattcctaagtttcttttctaagagttattttcctgcagaaattctccttttatccaaatcctggtcaagcaggtgtcaaaaggtctgatgctgttagtcagggacatcaattctctcttttcacatctcattacagaggccttaagctcagatacccactggtgatagacagggcaggtcacacattgagagaagaactccttacagtaaaaggtcctcattcagca

SEQ ID NO: 219626 - DNA, 539 bp, Homo Sapiens
tttaatgcacagaaagtttccctggactctctacccagtttcccccagtgataatatcttgggtaacatcctgtatacattcacattggtgcattcctcagagttgtcagattttgctagttttacgtgcacttgtgtatgtgtgtatttgcaattttagcacgtgtagactcttgtaaccactacaatcaagttacagaactacactaccaaggttcatctttttaaaatctttgatgttaccttttttggaacagtgaccatgagaggactttcctcccaaaattttgaaaactactgaaccagaatatagtctgacactaataggtagaaatttaaccaaaggagattatgaagctctgcacttgagttaacaaatcacttctcagcttccagttccatctcagaaggaaggaaagggattaaaatccagagaccagaaatgggagcaaagtacaaggtggtgtaatcattacagaggtttcctgatgtttccaagtcagtcgtgtgtggagctgctaaactctaaagtaatttta

SEQ ID NO: 219627 - DNA, 478 bp, Homo Sapiens; identical to SEQ ID NO: 59120

SEQ ID NO: 219628 - DNA, 586 bp, Homo Sapiens
  misc_feature (519)..(519): n is a, c, g, or t
ttttaagttctccagatgtcctttatttatattcgtattcataagttctcatactacttctggtctttttagtagctcttttagggctgtagccacagaacggtcattctagtgattctgagcagggtggagaggagtgcagcatccctgggcgggtgggtcagtgaagacacgcccagctcacctgatattctgtgactggttgcagaacacaagtccctctcgaaattgtttaggtttgtggggagatatctgcatccaggagctggagcaccgcagtgcttctgaacgcctcttccagtggcacctgcgggcctagtgtccccacacccgcttgggtgacagaggccaatcagttgtcaagcttatgacttccaatcagagtggtggggccctgaaatgacttgctctttgggtcactgtatgtaaagcaatttgcagctagcggcactgggcgggtgaccctgcctgagcccagtgaggagcaggtcgtctgcctgccgtgcttccaggaccgcngctgggctggggctgactacgtggcggcgctggaagggatgtcgtctcagcaatggctggggcgcag

SEQ ID NO: 219629 - DNA, 520 bp, Homo Sapiens; identical to SEQ ID NO: 60240
  misc_feature (4)..(4): n is a, c, g, or t
  misc_feature (7)..(7): n is a, c, g, or t
  misc_feature (342)..(342): n is a, c, g, or t
  misc_feature (443)..(443): n is a, c, g, or t
  misc_feature (477)..(477): n is a, c, g, or t
  misc_feature (503)..(503): n is a, c, g, or t
  misc_feature (515)..(515): n is a, c, g, or t

SEQ ID NO: 219630 - DNA, 339 bp, Homo Sapiens
  misc_feature (222)..(222): n is a, c, g, or t
  misc_feature (290)..(290): n is a, c, g, or t
  misc_feature (296)..(296): n is a, c, g, or t
gggatatgagtataatttaactatattgatatattgcactatggcgaattcaaggccttcagtgtatccatcactggaacaacacatattgtatccaccaagcaacctgaaagattttttaaaatcagcaaacattcttaattgtattatatgtaattaactttttccattatggttagtactttatgtatgtagtttaagaaatattggtgtattcaagancataaattcccctagggcattctctaggaagctctattgttttaccctatcacatttaggatccaacnaatccnatcctacaaatttggttatggaatggatggtggaggtaggggg

SEQ ID NO: 219631 - DNA, 346 bp, Homo Sapiens
  misc_feature (298)..(298): n is a, c, g, or t
tagggcactaaaaacttaatcttagatccagttggtattcatttgggtgaatgaagtggtagggacctaccttaattttttttccaggtttttgtgattgaataagttccagatactcaaagcgacctagatcagtgatgaaatttttgactgcatttgggacctatttctgggatctccttttactgatttctctgtatattcatgagcaaccttaaattattttagactatttaattattatgttctattttctgggaaagttttgtccttcactgttctttttcaaaattttccnggattgttatttcataaatattttttcacagaatcaacgggttttgga

SEQ ID NO: 219632 - DNA, 364 bp, Homo Sapiens
  misc_feature (339)..(339): n is a, c, g, or t
  misc_feature (344)..(344): n is a, c, g, or t
tgtagagacagggtctctctatgtttcccaggctataaaacggggttttatagatgaagaaagagaagcacagagaggacagggaagctggattggaaccataccttaagctcactttactagggtctcagaatccactcccaagggtgatcctgaagggttcactgtcaccctccggggtaaagccacctcttttccccaagcgattcattccccacatgaaactcaacagtccttctatcccttcttcttaacctttcaggagtcacccaagagtcctgcctgcctccgcttacccctccaactcacttcctgctcccaggggcccaaggcggggcnctttnacttcacaggaaactctgtc

SEQ ID NO: 219633 - DNA, 361 bp, Homo Sapiens
tggtcagggcaatcttgactcagtctatcaattcaaatgctaatctctctggaaacagcctcacagacacacccaaaataatgtttagctaaacatctgggcatcctgtgatccagttaagttaatgcataaaattaaccatcacacccctgtatagtcagaaggaacactacagatctgtttttataggttggctcttatagaacttactatttaaacttcacctcctcgatcttgtaggtttaagtttgcacttatcattcatttcactggcaaaccaatgagaacgtgttttattttcttaccttgggattcccttgatttacaaccgttcatcctgagccagaatcaaaaaaaaaaa

SEQ ID NO: 219634 - DNA, 484 bp, Homo Sapiens; identical to SEQ ID NO: 61175

SEQ ID NO: 219635 - DNA, 420 bp, Homo Sapiens
gtgtgtttgtttttaaagtgtggcctgagcctatctacctcgaatccttcctggtagagcaccatgtttgtgcaattttgacattaaaaaaaaaaaaaaaaaaaaaagcaacaaaaaccaacaacaaaacaccacccagactcaagcccccaaatcgcacacacacaaagccacctatgctttggggaaattttcgcagtggttttaaaacatggcatttttttcttcttcacattttctgataatacaatggatgcaaaagtcatgtggccgctctgaatggccacaggactcggtggggagggcagggcggtgggaggattctgctcttttggagggagagacaggttggtaaagccttcctgtcacccttccggtaaaattgtggctgggggaaaaacatgaactatcaacaaaaat

SEQ ID NO: 219636 - DNA, 474 bp, Homo Sapiens; identical to SEQ ID NO: 60132

SEQ ID NO: 219637 - DNA, 124 bp, Homo Sapiens
gggaccatcttcagtgtaactcagggaaatgacctcactctgttgctcctcgtccttggaaacggagctggttgtatctaccgtgcagggatgtagagggcttaaattaagatgctccaagctg

SEQ ID NO: 219638 - DNA, 473 bp, Homo Sapiens; identical to SEQ ID NO: 55893
  misc_feature (348)..(348): n is a, c, g, or t
  misc_feature (360)..(360): n is a, c, g, or t
  misc_feature (385)..(385): n is a, c, g, or t
  misc_feature (392)..(392): n is a, c, g, or t
  misc_feature (417)..(417): n is a, c, g, or t
  misc_feature (471)..(471): n is a, c, g, or t

SEQ ID NO: 219639 - DNA, 258 bp, Homo Sapiens; identical to SEQ ID NO: 60147

SEQ ID NO: 219640 - DNA, 351 bp, Homo Sapiens; identical to SEQ ID NO: 61486
  misc_feature (1)..(1): n is a, c, g, or t
  misc_feature (3)..(3): n is a, c, g, or t
  misc_feature (339)..(339): n is a, c, g, or t
  misc_feature (346)..(346): n is a, c, g, or t

SEQ ID NO: 219641 - DNA, 385 bp, Homo Sapiens
  misc_feature (284)..(284): n is a, c, g, or t
  misc_feature (297)..(297): n is a, c, g, or t
  misc_feature (325)..(325): n is a, c, g, or t
  misc_feature (383)..(383): n is a, c, g, or t
ctatctcaaaaaaaaaaaaaaaataaggtttgagttggagctagtctgatgcagcagggagccctgttttcatcaccacccctctccccagtctcaggtgtggctgaggggccttggggtccctgatccagcctcctctcttgcatgatgatcaccacccctctccccagtctcgggtgtggctgaggggctttggggtccctgatccagcctcctctcttgcatgatgatcaccacccctctccccagtctcgggtgtggctgaggggccttggggtccctgnatccagcctcctnttcttgcatggatggatcaccacccctnttccccagttttcggggtgtgggctgagggggccttgggggttccctggatccaggcntc

SEQ ID NO: 219642 - DNA, 663 bp, Homo Sapiens
agccggaccggacttctggtgtgtggtcaggctggtcttgaagtcgacctcagtgatccactcgcctcagccgaagtgctgcgattacagacctgagccactgcgcccagccttgatcttgaggtaagagggtactgtacagcagttactctatcataacacctaaataatgcctaaagttaaagagttttgatgaagttcttggcagcagtgcttttccccttctgctttccaaaaggaggtaaaaagaagccagtcaatttcaaaaacccctatcctgcttttattttcagctaccttgaaagtgagctgaatcaccatggaaatgtgcaaatgtgaggtttgcatacttggttttaagccctgagtaccatatgctaatcaggcaatcaggattctgtgcctccctgcagtcagttgcatttctatttaaaagtgcattttggtttggaagcccctttctggagcctaactaccaaaaggcagcaactttttgtatcattacaaagaaagctgtgtaagtgcactcccaagcaaaggtgtggtaggagagtagcagccacagaggacccaagcccaagtcttggcctgagttaagttagtgctattgctcccattgacgtgctatgatgtgaagccgttctggtacaggttccttgctca

SEQ ID NO: 219643 - DNA, 387 bp, Homo Sapiens
cgacactcttgagttggagtgcagtggcacgatctcagctcactgcaaccttcacaggcatgagcctccacacccagcctgtgaatttttcaaaagtctcaaaagctggcatttcaacccctaaataatgcagctaaaaaatatagtctgggagcttgaggccagtctgcaataaatctaatttttaaaaattgaaaagtgaatcaaataatctagtgaggaagaaaatagaaactgaaacatgggtgggttaaatgtcttctctaggtctataattgcaacagtttatccaaaataaaacctctttgaaaagcataggatttttaaactgacaatttctcctagtgagcccatgatttagtttctgatgggcaaccaagagtgtcg

SEQ ID NO: 219644 - DNA, 634 bp, Homo Sapiens
ctagcgagcatctcaccatcttacctgaggcctttaacaatctccttagatctgcttcctcccaccaaagctaaatatcctaggactgaaaaatacaattgttttgctaggtagacgagctcttttctagaaactcctcatttgaccatacatgagaactcatccttgacatgtgcagagattcagcagggacccgaaataggagcaaggtggtctgccctatcactctgccatattaacttctctacattccactcatttcccatgatgaaatgaaatgatttctgaacacctactagtgccaggttctgtgctaggtatattacagactttacccctctaattctcactacaatacccttctaccagtgagaaagagtgaggttcaaagaagttacaaaaactggtccctagccatacatctggattcaaacttgggtcccaccgagagtggtactctttccgctgcaccacactgcttaccaagacatggagcacctcagggcacatccatggaaattcttaggtgccatatatatgtgtagattgcataaaccattatccaacttcaacaaatttaaaattaccatctgggccggcgtgtggcttcagatggtggggtctctagagtcga

SEQ ID NO: 219645 - DNA, 1000 bp, Homo Sapiens
atatatagagagagagagagcacaaatttgcaaaggtacaaagaggtatacggtgaaacaggaaacaggaatccctgtccaccagccacccagctgagaaaccctcctggagcgaacatcattattcattttttggtgtctctttccagaaatgttctgtgcatgcacaagtatttacatacatatcttcaaatgcaaatggtagtatactttctagatacttttttacattgcatttaacattagaacatgtagagcagcctcgttccttttaaagactgcaaagtattcggaatggacataccacatttaaaaaaaactagtcttctattgatggacctttatattgtttccaaagttttgctgttttggaaaatgctactgtgaatttccttgtttgttgctttacaaattggcagatttctctgtagaataaattcctacaagtgcaattgccggcttaaagggtactatgtgtgttttacgtattgagagatattggcaaattggccttaaagagttctattgactatttatagttctactaatgatttatacagtattttgttaacacggccttttggtctggaaataattacactgtaagacagtacagttgaaatatcaaagaaattaaaacaaagttaggtatgtcataattatatgaaatatgtgtagacactagtccattttatcatttgctaccataaaatatgcacacatctgttatacaaagttaaaatttatcaaaacatagaaacacagaacatgcatagcataatttgtggttgagaaatgtaaacaagtgtaaagatgcagtattattacgcatataataactgtagtccatgctgtactactgtaataattttgtagccacctcttgttgctgttgtgactcactcagtgttgacactcatcaccttcttgtgaacagttcatctcttcagtaaattgtgttttaacattaaaaagtgatctctcgcaaaaaaaaaaaaaa

SEQ ID NO: 219646 - DNA, 417 bp, Homo Sapiens
  misc_feature (363)..(363): n is a, c, g, or t
  misc_feature (407)..(407): n is a, c, g, or t
tctggctgtgttgtttaggctggcttgagttcctggatttaagcgatcctcctacttcaaccttctgagtggctgagactacaggcgcatcacttgccctgggtatgaagcagtgaaaaattttcagccaggtgcagtgactcacacctgtaatcccagcacttggggaggctgaggtggtaggatcacttgaggccaggagttcaagaccggcctgggcaacgtggtgagactcccatctctagaaaaaagtaaaagaattaggtgtggtggtatgcacctgttagttcgtggccactcaggaggctgaggtggggaggattgcttgaacctgcaagtttgagactacagtgagctgtgatncccactgctgttgcccccagcctggggcaaccagagtgagaccntttctttaaa

SEQ ID NO: 219647 - DNA, 457 bp, Homo Sapiens
  misc_feature (37)..(37): n is a, c, g, or t
ttgttcattctggaggtgagaacagccatcctggganagttagagttgtgcaatttttagagctgtgattcgtaaccgaatagttcatcaaaatcacttagaaagcctttccccaaactctcacgcccgtccctgggattctgactccacaggctcttccaagaactctgctgtgcgagaaacatggaaccactggagagtgctttctgatactctaggctctcaaggaaaccattgccaacctggggaatatctgtcactcaccgtctttcagctcctgaacatccctgggctgaacaaaatctggcttgacattctcgaaccaccaaaaaagctccgcaataaaaaccataacattcggctaaaagacaaaaacaaaaaaccaaagtatgataagcagtttattcacacatggttttaaaactgcatgccaaattaattcgttattaccttcaat

SEQ ID NO: 219648 - DNA, 481 bp, Homo Sapiens
  misc_feature (435)..(435): n is a, c, g, or t
  misc_feature (442)..(442): n is a, c, g, or t
  misc_feature (469)..(469): n is a, c, g, or t
ttttttttagcagaacaacatgatcctatagatgataggtaaagttcactaaagattttttcatccaagcctaagtagaccgtattttactatcaagtgcagataaacaatcccacttaacagatgataacaattaagtagagatgaaattactggaatagagatatacagtaaaacactagtatagctgccttccagctatacaatttagtaatgcaatgccaaaacagaaggatattttgattgaattaggttcatcctaggattctgaagtcagactatgggttctacccacatacccaactgtatgagcttgagccaaatggaccaacctggcttaggacctcggatcttcttctggttaaaataggaggatacccactttagggggaatatttttgagggggttttaaaaaatattttttacttgccccnaaccatncgggggaattgctggcaccttcttttnaaagggttcctt

SEQ ID NO: 219649 - DNA, 496 bp, Homo Sapiens
ttactaaaatttgaaaaacaattcctctgaataaacaatgtgacaggccttaaaagctaaaataacgtctatcagtggcaagtgtttgacaacaaagtatcgcaggaatttttttcctaatcttatattgaatacttgtggatttgctttgttataatactcaagataacgcctaacagtgatgaacttccaatgaaagaaaatgtaaactaagaactattggaagaaaaacacaccttcactgcaaaacatgaaagaatatatacctcaaacccaaaatctttgaagacactttcttacagaaatttatcctacagtacaatatttattcaatgtatcactcaaccaccattaagggaaatcgtggaatgttttgtggaaatctagctcaggaatagtggctatattggtagacattgtcaattatatgttcaataagttaaatagttggataatacactcaacttcattctagctttgtatgtgccttgagtgg

SEQ ID NO: 219650 - DNA, 480 bp, Homo Sapiens; identical to SEQ ID NO: 59685

SEQ ID NO: 219651 - DNA, 464 bp, Homo Sapiens
  misc_feature (413)..(413): n is a, c, g, or t
tttgatttggggtaaagtttaatggaaaagccgtggaaacgttgagttcacaaacaggacttcccgtgcaactgtccagccagacctggggcagctcctggggaccctgcccccttcacacacacccatcccatccatggtgcctgagaggccttcatcttcagttccctccaccagatcagttgggcatgttgggggcagagatggagggttgttgaatcacactaggctctgtaagctgagaagacgatcctgcacagggtggcgtaagccagtccctcctgccagggcaccagctcccgccacctgggatccgctcccggacctcggccgcccgagcctcccgactcgcccgcccaccggcctcgctttccagtgcctgctgtctctttccggggcgcagggacccccangcggcgccacgacccggagctgggtcggaggccatgctggggctcgggcca

SEQ ID NO: 219652 - DNA, 407 bp, Homo Sapiens; identical to SEQ ID NO: 60322

SEQ ID NO: 219653 - DNA, 337 bp, Homo Sapiens
ttttctttcaatagactggagtgaaaccctgactcaatcaaaaaaaaaagaaaaaaaaagatgaaaatgaaaaaagggttaaatatcttcaaatttttaactgcttaataaacaagttataagtgaacagtcaacaaactcgtttgtatcacttcttcatagccttgagaaaatgaaagaatataacacagctaccacttcaaccactgatagtaatatgccacaaggatctgagacaatatgcatccattgtgtacctacaaggatctgagtgaataagcatcccttgtgtccctacaaggaccccagtgaatatgcaccctttgtgtctcagagc

SEQ ID NO: 219654 - DNA, 541 bp, Homo Sapiens; identical to SEQ ID NO: 60553

SEQ ID NO: 219655 - DNA, 536 bp, Homo Sapiens
aacgtttgtttcatattttattgaatttcatttatattaaattaaaaatatatttctgacagattcatgtaacaaaaaggcagaacagttttcaaattgttcagctgggatgatcagtatggaatgaggcaaagcagttcgcattctataattgccttgtacaggtacaattctttcccaagagccaaaagaggatccttgagaactaacggaaaagcctaattacataaatgtaaaatactgtttctccctcattctcaaataacaacaggaatgagggaaaggaaggaggatgggtaaaaggttggaggagaagaaagaataagagaaagtatactaaaaatatgcctaacattaaaaaagttagtatgtgttaggtgcatgatccttcatcaataacatggaaaaaaatcaaaataacattacaccacacacaattggcatatcctattgtgtaagcgagtgcagaggttgaacacatcacaatagtgctgaacacagaatcacaagtaatgtcaaaatgataacttccaacc

SEQ ID NO: 219656 - DNA, 514 bp, Homo Sapiens
aatcagtaaggaaatgaattcattcacctaatccagctttttattctttaccacaatgcctttgctctccatacagaaaaataatttaatcttgaattccaaatgcaaacatcttccctgtctaagccaacatctatgtactacagcatgttctgaaaatgaatttttttattattaaattgtctaaaaagatacatattctaaccattgattttcctaagctaaatctccccctacccccttgtttttttactacctcagtgaaccctgaaaaacaatttgagttgacatgttcttggtaaatgacacagaggacaccatgggctactgtggagttttgtcatagatgactccaaatgttaatgctcactaaaaattcacatcttgtaaaagttctgcttatattattataccatcaatcttttaaccaggtgataacttttacagaaatcatcattataaatactctgaatgaaggccaacaaaatgaccaaggcatataacagactaactg

SEQ ID NO: 219657 - DNA, 297 bp, Homo Sapiens
  misc_feature (119)..(119): n is a, c, g, or t
  misc_feature (207)..(207): n is a, c, g, or t
  misc_feature (209)..(209): n is a, c, g, or t
  misc_feature (227)..(227): n is a, c, g, or t
ttttttttttgaacatttcactttattatgaatttaggccacaaatctcagtacctgttactttgtaacccaaaagacattagatgtttcatttctcattacaattgctgagttatcgngaaacatttttactcctctaattagtaacagcaattaggctcaccaaatcatgtaatgtgttaactatattaacaatataactatatngnctcatttatcactatgangttttaaaaatactttgataactgtaatttaactttgtttgggcattttatatacttaaaacatcattct

SEQ ID NO: 219658 - DNA, 474 bp, Homo Sapiens; identical to SEQ ID NO: 60556
  misc_feature (365)..(365): n is a, c, g, or t
  misc_feature (401)..(401): n is a, c, g, or t
  misc_feature (428)..(428): n is a, c, g, or t
  misc_feature (466)..(466): n is a, c, g, or t

SEQ ID NO: 219659 - DNA, 381 bp, Homo Sapiens; identical to SEQ ID NO: 40706
  misc_feature (299)..(299): n is a, c, g, or t
  misc_feature (377)..(377): n is a, c, g, or t

SEQ ID NO: 219660 - DNA, 450 bp, Homo Sapiens; identical to SEQ ID NO: 58057
  misc_feature (107)..(107): n is a, c, g, or t
  misc_feature (346)..(346): n is a, c, g, or t
  misc_feature (354)..(354): n is a, c, g, or t
  misc_feature (382)..(382): n is a, c, g, or t
  misc_feature (396)..(396): n is a, c, g, or t
  misc_feature (409)..(409): n is a, c, g, or t
  misc_feature (416)..(416): n is a, c, g, or t
  misc_feature (442)..(442): n is a, c, g, or t

SEQ ID NO: 219661 - DNA, 1000 bp, Homo Sapiens
ttgtatgtctgggaacttctggtataggctgaaggtgaaggctgaaaagaacgaaaattgcttcaagttcaataaatttaaataaaatatgctccgtagaaattaaaatgtataaatcaaatatcatatactttttctgatacgatttcaaagttaacacctatactcatacttatgagtgtaaagaatttacacattttattgcaccctaattttttaaaaaataaatttcattgtgcaactgaggtttacaacatgatgctatggaatatagacagcaaaatggtgaagcagattaatatagctatcatttcacatactttaacaagagctgctaaaatccacttatttaacaaaaatctctaatacaattttactaacattggtccccctgtatctctaaacttgttcatcctacatatctgctattttgtatccttgacctatatctccccatttcctctccttccccaccaccagtagtaaccactgtttcgttctgtgtattttagctccttaaaaaaatattctacatatgagtgagattatgcaatattttccttggtgtctggcttatctcatttaacataacgtccttcaggtccatctatgttgtggtaaacagtaggatctccttttttaaggctgaataatgttccattgtacattgtctatacacacacataaacgtatacacacacacataatttctttagccattcctcacccatcgatggacatttaggttgcttccctatcttggctactgtgaataatgctgcaatgaacgcgagagtgcagatatcttcacaaggtggtgatttcctctcccttgggtgtataccagggacaggtgttgctgtgcacccagaatcttcaaaataatatgtaaatcctacttttgctggtatactgtgaactcgtatttacctaaaaaaatgacattaacagcactctttcaagaaagtaatctgaagagaaaatataaaaaaaaaaaaaa

SEQ ID NO: 219662 - DNA, 591 bp, Homo Sapiens
gtataaaacagtagaaacaaggttgactttattccaaacataaaacacttattttgtgttagaagagttatcccttgcctatccagggtgacaccagtgactgcacatgtgttcttgagctgcttttcctccggcaaagactcatgtctcctgtctctttctgtcttgaaaggatatgtttgtcactgaagctgctctctgggatcaacgtcagagttgcatactctggaaaagatctttgcaactctggcctatatgaatccataagccacaaacttgactttttgtacccaccatttgtggaactaaattatatcagtacaaaaagggctacattctaaatagtaaaaaaatatgcaaactgaggtataaataagattatattctgtgtatcagtgactctagaggttaaaaatgactgagaaaatagacagttcttcaggaaaacaccttctttggactcacaccatgtgttttccattcaaattagtaatgttcaatttttcctgcagttgaaccagctattagctttcttgagagtcaaaattctcttcgttttaggatcaaatttgtattgtcttgttccatgaa

SEQ ID NO: 219663 - DNA, 566 bp, Homo Sapiens; identical to SEQ ID NO: 57890
  misc_feature (498)..(498): n is a, c, g, or t
  misc_feature (542)..(542): n is a, c, g, or t

SEQ ID NO: 219664 - DNA, 435 bp, Homo Sapiens
tttttttttacaaaatagccatagtttgcgcaacccgttttggagagggcaagtacaaacaatctgttgttactgccttatataacagcagcctcaacatttgacaaactcctgagaagtactgttcagactcaattaaataggtatgctttttgtgtgtgtgtgtgattagaatgctggttccttatgctttttaaaatttaaaataaactaaaactgagtatatgaaaaacaaatggtatatatgtcctaaaagattttaaccattcacatttctataggggctgaaaacataagtctttaaaaattgatctagccttattacaagcaaaaaaacaaaacaatccaaaaatcctatggaattgtcataactcattttgcaaaacactgccactaaaagctataaagcacctactgggggaaaagcacaatgtt

SEQ ID NO: 219665 - DNA, 562 bp, Homo Sapiens
ttttttttatgcttccctcctgatttattaagaccgacatatttaatttgcatttcttgagggaatagcacctggaaaccagggagaaagaagctgaagcatgcaggtcatgaattattcaatttggtgtcaataatttgtcagaaaaattaaaaaaaatcaatagataaccgtattgtagttcaactgattataatatagaagcaacggataatgaacaccctttcctcaaagtcatttattctcaacctttggaaatgattacgtttttacctccagtgaatcccttcatcacagagaataacagggtaccagcccaagccaacagtgccccataccagagaactcagggaaacaaagaccctaaaggttatgtacaatgagagaatcagactgtgaggctccagctctcttctgtatccctgctcactttacctcagtgcacaccatatcccttcttcctccattgtgaaatgtgcatacacgtgtttgtctgtgaatatataaatatctctatttacacatatatacatatataaaaatgtgcaatacaaagacataa

SEQ ID NO: 219666 - DNA, 300 bp, Homo Sapiens
  misc_feature (5)..(5): n is a, c, g, or t
  misc_feature (11)..(11): n is a, c, g, or t
  misc_feature (60)..(60): n is a, c, g, or t
  misc_feature (188)..(188): n is a, c, g, or t
  misc_feature (217)..(217): n is a, c, g, or t
  misc_feature (290)..(290): n is a, c, g, or t
gtttntttttnctcaagtttttaagataacatcatttggagaagaagccgtcttcatgancttcatgtttgggctctacttcaaagttatatctcagccctcagaagacatgaaaaagacttgtaagatttcatcttgaaacggctttttaaatccatcaacagtaagaaaaaaatgtagatgtaggntggtttataaatgcccttttaggcttgancgattgtttgtagctataacaaggctaccttaacagtcaaaaacaaaatctgggagggaaaaggaaaatgccncccaataagg

SEQ ID NO: 219667 - DNA, 1000 bp, Homo Sapiens
acatctttgcattttgtatattacatgagcaaaaccagggtggattatatttaaaaattttagttatttgttgattgaatttactttgatgtcaatcctccatttcttatatatatgcactttccaaatcctattgatcaaaaaaatgaaaaatctcatcttcattaccctgtaacccaaagccactcctctaatcagaccccaactccctttaagaataaccataagtgtctcctacttggccctcatacctccagcttttaactctattaatccatttattacaatgatatacaatagataatcttctgtaaacactcatttgaccatgcccttcccttgtttaagaacttgcaatgacttgctttttcctagcacagcaaagctaaatttctcccttgaattttaaaatcctccatctgtttctactcttcctatgcaatattattttccattattccttaacaagcttccaccatcctactgagacaggtatattttttgtctctagtaaactaggccctgaagataaaaatttgcataaaatattcagtagcatgttccttattttgctctcaccttctatgcttttacacatgctatttaagtctcctggaatgccttctcctaaactccatgacccaatacacattttttctcccctgtcaactatttcttcatgaatctcccccctcttaatgttgttacatagtctctaaaaataatctaaaatagatgatttagtcatgtggaataagattcagaaggtatcccaggccatgtagttaaagtctcttaacctcagcaacacgcctgccagattccctccttctctgagagatgttctctatataaacaaatattatatatattcttcccttatttctctttcgcccctctttttaatacaaatgatggagggagtatcgaagctgtccctaaagaggtcacaattaagcagaaacctgaaagaaatgattgagcatatcaggtaaggatc

SEQ ID NO: 219668 - DNA, 539 bp, Homo Sapiens; identical to SEQ ID NO: 47615

SEQ ID NO: 219669 - DNA, 424 bp, Homo Sapiens
cccgcacggcgtaacggggtaattggttaaagtaagattgtttcataaaatgcagtaagtgtaattctgatgttttcggttgagcagaaactagatcaccagatttggtatggttttaaagatgttcttttctgttgtgaaaaacagaccttgagcaatgaaagcaaagagttgaccccagtgctctcagctgtaaggaggatttcacctaaatgtagcgtaattgttcctgttaaggagaaaaaaaggaattggtatctagagtgaggttgatcgcaagaaaatacgtatgcagttttgtgagtcagatgactttttttgtctagtattatccagaattatgtaagggacaccattgttggaaacaacgttattaggaatttcccttgagcatagtctaatcacttagcaaaataaatgggtt

SEQ ID NO: 219670 - DNA, 577 bp, Homo Sapiens; identical to SEQ ID NO: 50819

SEQ ID NO: 219671 - DNA, 484 bp, Homo Sapiens
ctgacacaataggctattagtagttaaatttttggggagtcaaaagttatacatgaatttcagctgcacaggaggttggcactcaaattgttcaaggtgtcaactacacgctataaaatataaaatattatatagatagaaccaaagttagctttcaccctgaatatttctttaatgtcctggagaccatgatatttccaatttaacttagaagctgttaaaggcacaatgttaaaacctacagcttgtccaaagtaggaagccaaagtcaatgtaaaggtaaaaaggaaacaaacctcagagagacagagacagagaccaaccaagaccttgtctgtaccttagtattggtggcatatggaaaaaacaatttcccctgagaatccataaccactaatagccctcaattagattagcagtcagaatgcatgctattgtataatctgaagaatttcaagctcagaacttaatttaaggcagtccc

SEQ ID NO: 219672 - DNA, 575 bp, Homo Sapiens
tatatctgcggccatgtaatcagcaattcccccttccctcttccctccaggtgtctgagacgagccacattgtactctgccaactctgtgaattcgactaccctatcccccttccctcctcccaccaggccctggcaacccacattctactttctgtctctatgaatctgactactctaggcacctcatctaagtggaatcatacagcatttgtcctttagcaactggcttatttcacttagcataatatccttcaaggttcattaatgatgcagcatgtgtcagaatttcccttcttttgaaggctgaataatattctgttgtatgcagataccacatttggttagtctagtcatctgtcactgcctatttgtgttgtttttaccttctggctatcgtgaataatgctgctatgaacatgggtgtacacatatctcttagggtctctgcttacagtcctttagcacagaaacccaggagtggagctgttggctcatacgggaactccctgtttacattctgatgaactgccacagttttcacaggggccgtaccatttatattcccagcagcat

SEQ ID NO: 219673 - DNA, 536 bp, Homo Sapiens
tagaggatccccaatgtctctcctacgaacatgggcatttaggcctcctgctgttcttactggttagcacatgtccactgatgcacgccccaataagagcattacttctctttgcttctttttatcctcatgaaaattctttttctatgcacatgattctagatttccatacagatttgtttttggtgtggtatgttattcttctgacctattaggtcttttgaatatgtctttgtgttgctggttaacctgtacaacattccttcttacactaagcatcagtctaaatattctcttcctgctaggcccctcagaaaagggaagtcttgactgactgtgaccattagtttcagttgtcacttccttttagcattgtctttaataaaatttgcaaaagatggttgggcgccatggctcacgcctgtaatcccagcactctggggggccgaggcgggcggatcacctgagatcgagaattcaagaccagcctgaccaacatggtgaaaccccgtctctactaaaaatagaaaaaaaat

SEQ ID NO: 219674 - DNA, 420 bp, Homo Sapiens
  misc_feature (13)..(13): n is a, c, g, or t
  misc_feature (264)..(264): n is a, c, g, or t
  misc_feature (276)..(276): n is a, c, g, or t
  misc_feature (317)..(317): n is a, c, g, or t
  misc_feature (369)..(369): n is a, c, g, or t
  misc_feature (377)..(377): n is a, c, g, or t
  misc_feature (411)..(411): n is a, c, g, or t
tgctgtaacagtntttattgatgatgagtccagggctcctgctgaagccctggtggggaggggcacagagcgagatggggcgtaatggaatgcttgaaggctgctccgtgatgtcggtcggagcttccagactaggcgagggcagggtgaggcctcgggcacacagccggcgcccagtcacccggcccagatggagggcggccgggccctgcacaggcacttgccaaggtggctcacacttcacgcacacttcgtacttgaganttcaaggccgtnttccacaacttccaaccagtgcaaatgactttaggtgcaantttaaatttcagaaggggacggggggaaacagagttcgttggaagctttttngaatcttnttccaggaaaaaagggaaagacagggaaagcttncaggaaacc

SEQ ID NO: 219675 - DNA, 373 bp, Homo Sapiens; identical to SEQ ID NO: 58067
  misc_feature (309)..(309): n is a, c, g, or t

SEQ ID NO: 219676 - DNA, 360 bp, Homo Sapiens
  misc_feature (224)..(224): n is a, c, g, or t
  misc_feature (273)..(273): n is a, c, g, or t
  misc_feature (283)..(283): n is a, c, g, or t
  misc_feature (311)..(311): n is a, c, g, or t
  misc_feature (319)..(319): n is a, c, g, or t
attgtggtcaaaagcaggtgtttccacactgtgaataagtagtttgcattttcaaagttaacaaattggatcaacaacaaagaaaagaaaccaaccatagacagcccaccagcggattgtttaccaaagaagatgaagctcatggcgatggtttgcaaacaccaccagactaggcttgtgtaaattcccttcgtttagtcatcgttcttcagcctgtcacaggntacatttgttaggagggatataaaaacctagctggcattcacatggggntccttgtatncttgtcttatatttgttgcggagttggngtctcttnatgggtcaggtcttcttacaggttgtccccctgctctggtc

SEQ ID NO: 219677 - DNA, 390 bp, Homo Sapiens
  misc_feature (381)..(381): n is a, c, g, or t
  misc_feature (386)..(386): n is a, c, g, or t
catttaaaataaacatcttctggccacttctgtttcaacatcaaaacagttccgtaatatcacgattgcatccctgtgtggacgccaacaattcacgtgcttctgagataaatttgaagaaactacaacatcttgagttgatggaagatattgtggatttggcaaagaaagttgctaatgattcattccttattggaggcttattgagaattggttgtaaaataggaaaataaaatcttgggcaatgggaaggaagctctggaattgggataaaatatgcagggcgatgttaacaattcttaacttaaattagggatccaattgacaattgttgggcctatgttaaggtattttctttactggaatacaagtacccccatnacctnaaat

SEQ ID NO: 219678 - DNA, 573 bp, Homo Sapiens; identical to SEQ ID NO: 50242

SEQ ID NO: 219679 - DNA, 499 bp, Homo Sapiens
taggtcatttctgtatcaagtatggtgttattgcctttaaccaagccctgtccaaggccaaatttattacatgcattaataacatataagaggatagacagagagctgaagaaaagatgtgtgtggcctttaaatatgccaatcatctacagttcggagggttgcttaccgtgacatattgccagctgtgcattatagaattccagatggcatggtactgttggtacttgttttggatttgccctgggaatgaggttaaagaggacaccaaactgtggctgggatccttttgcttgcctcttccagggtagatcctggaaggctctatctcctccaaccaatcagaaagctgccctgacctctcttggggattatgaactcagcacaaattgctctttccccgtgaattcccatgcacctagtaaccctgcactaagagagcagtgaatgcattccctcatgttatctgtgttcgccctccctcagaccccagagctgg

SEQ ID NO: 219680 - DNA, 660 bp, Homo Sapiens
ctgtccagtcagtatgattcaaaaagacaaccaaccttcactgacagaaaagcacagacaataaagacatgcaattgactagcgttttcaaacctgctgtccaaaaaaacaaatctcctgaggagcttgacaaaagcccagactcctgcaccccactcctagaaagaaccatcatgaaggaacatttttcttgaaagctcactaagtgattcttatgtgcagcctcatctgagaagcaccattccacagggtgctgtgatgagctcactgtggaagaagccttcaggacaggaacgtgttagctcagtgcaggcagcaaatccacacacaagtcttcatggggcatgtaaggacttcagtgaccacaaagtttctacctgatgagaatataatcctttaggctgctaaagagcagtggcctgtgccaacaccaccttccatcccatggttagagtccaggattctaactgggagcaaacgtgggtagccagaaagatactacagagacataagcagggactcagtaaacaactcttaaacagaatcaaaaaactttgccatgatcccctgctcctctctaactactgtaccttctctccctccttcctttcacagtcacagttcttgaatgaatagttcattatgttcactgtgcccatg

SEQ ID NO: 219681 - DNA, 739 bp, Homo Sapiens; identical to SEQ ID NO: 46781

SEQ ID NO: 219682 - DNA, 539 bp, Homo Sapiens
caaagatctaattcccatttggcaaatccaaactcagctacatggttttcgagtaccctctgtacacagtcaatgcaatttatcacttctccctaacctctactttcctctctaagcatgtgagtctctcagtgcatacctggctcattcctatctttgtctttgcttgaatcatgtcttctaaccctagtgccctgcctgctttcctctctatccagtgtactttttttttgtttttttttacaaggaccaactcaagtccttgaggtggtataaataaaacaacttgatgagaataagaaaactacactaaagaacactgtccatatagccctaaatcgaacacaagcaatagggagaaacaaagccattataaggtgaagtggaactaaaaccagcagccactagcatcaatatctatactctcagtggagatttagcttaaaaagataaaaaataaacacaaaacacctcattaggctgaaataaatattcttttcaaagaaaggtcacagaattttaaagaaggcagacagcat

SEQ ID NO: 219683 - DNA, 583 bp, Homo Sapiens
tcagcatggaagtggggcagtatatctttgttaattgcccctcaatctctctcctggaatggcatccttttactttgacctctgctccagaggaagatttcttctccattcatatccgagcagcaggggactggacagaaaatctcataagggctttcgaacaacaatattcaccaattcccaggattgaagtggatggtccctttggcacagccagtgtggatgttttccagtatgaagtggctgtgctggttggagcaggaattggggtcaccccctttgcttctatcttgaaatccatctggtacaaattccagtgtgcagaccacaacctcaaaacaaaaaagatctatttctactggatctgcagggagacaggtgccttttcctggttcaacaacctgttgacttccctggaacaggagatggaggaattaggcaaagtgggttttctaaactaccgtctcttcctcaccggatgggacagcaatattgttggtcatgcagcattaaactttgacaaggccactgacatcgtgacaggtctgaaacagaaaacctcctttgtgagaccaatgtggga

SEQ ID NO: 219684 - DNA, 497 bp, Homo Sapiens
cactgaatcacttctgggtaaataatgaaattaatgcagaaatcaagaagttctttgaaactaataagaacaaagatccaacatatcagaatctctgggacacagctaaggcagtagtaagagggaaatttatagcactaaatttaaacgcccacataaaaaagttagaaagatctcaagttaacaaaaataaataaataaaataaatcatatataagcaatccattattgttaaaacaaatcactaactctagagtgaaagaaacccaacctttaagatgaagaaatgtagtttgcacttaatgtacgaagaggtatataaaacagaaatatcagagaaccaccaccagacgcaccttttgattaaaagtaacagtgtaacggcagctaatggatgcacctccaccaaagacactgcaaaagtacccataattgattgattcttatcaatagctgaagccaactaggttttataatccttactgcttgatgtcaaa

SEQ ID NO: 219685 - DNA, 482 bp, Homo Sapiens
  misc_feature (454)..(454): n is a, c, g, or t
ttttttttgtcatggtaaataatcttcaaaagcttataatgaaatactgcagtttcctattcaacgcttctcaccactagtcctactccatggaagcaaaataattttaactctcttagctgttttctctgatatttaccctcatgtttttaacatgtttatactgctactccatcagttatcaattttatacactgtctattgtgacagatgttaatttccccatttccactatctattccccccctccccatctttatgatatagctaaagcaaaatctgccagtattttgtttacaacaagactctttgctgctaaggcaaggtgtggggtaatgactataggcaggttcacaaatatcccagttctctgggggtgggcagggaatggtatttcccctattgccggtccctcactccacaacgggtcaggggtatggacttgctttggggnccaataaacaggaggtacttgtggtcac

SEQ ID NO: 219686 - DNA, 585 bp, Homo Sapiens; identical to SEQ ID NO: 35046

SEQ ID NO: 219687 - DNA, 712 bp, Homo Sapiens; identical to SEQ ID NO: 40307

SEQ ID NO: 219688 - DNA, 1000 bp, Homo Sapiens
cccaagagttatggggaagggggcgcccctccatcagggttggcatcttcaggagggaggactctgggtgttaaagcacagttgagttggtgccaggctgatgggaaacagacgcagcttccccactgtacggaggatatctgcagactcgaagccgggcatttcactgggcccatcacactccccctctcgctgaagccctgtcaggccctggggggtgtgctggcctcctccccatggtgaggtgagaggcacaggtttgtggctgcccaaggccctcagagatggtgagtagcagaagctgggattggaacccatgttcctgcatctgggctggggcagacagggagggatgaggcaagcaaatggatccatggggtagagatggacaagcaactcacccctgggccttggtcagtttcccccccagactgctgcttccccggatgagcagaaggtgtttgccctctgggagtctggagacatgagtgatcaggtgaggtgaactttgctgccatcttcccgaagagccaggggggtttcctgcagcgttggaggccttgggggacatgtgcacccaaagtgcagccacacatttcagattttctggcacactcggttttaaatatcctgctccaactctgtacgctaacaaaataagctgtatgtgccaatagtttgaacctaaaccagtggttcccagatgccagtctgtgagccagctccatcagaatcatcttttaaaaaatacaggctgggcgtagtggctcacgcctgtaatcccagcactttgggaggccaaggtgggtggatcacctggggttgggagtttgacaccagcctggccaatatggtgaaaccccatctctactaaaaatgcccatagtcgtgggaggctgagacagaattgcttgaacctgggagagagaggttgcagtgagccgagattgcaccactgcactccagactgggcgacagagcaagactgtgtctcagaaag

SEQ ID NO: 219689 - DNA, 488 bp, Homo Sapiens
  misc_feature (12)..(12): n is a, c, g, or t
  misc_feature (421)..(421): n is a, c, g, or t
  misc_feature (460)..(460): n is a, c, g, or t
  misc_feature (467)..(467): n is a, c, g, or t
  misc_feature (483)..(483): n is a, c, g, or t
tttttttttctnctctttttatgtttatgacttcctaaggcacactcagccttgatgagataaataaatcctgtcctatgagacaagccccagggttgctcagaaataaacagagcttctaggtgagaaggagcaagctaaaagaacaaatcaggaagtcccagtgaactaggaacttcgtgtgtgtttgtaacggcagaaatggaatcaatttcagaatttcccaggaagcattatgctaagattcatacgcccgggttctaaatctaatattctacatatcctattaatgctttccattataaactaaataccattttagtttacccgtcaagatatattgtgggggattttaaagggtcaaccaattgataaaaggttttgagcatcttgccctgtaatccccagcacttttgggganggccacggttgggtgggatcactttgagggccccagggngttttgnggccagcctggggccnatcat

SEQ ID NO: 219690 - DNA, 365 bp, Homo Sapiens; identical to SEQ ID NO: 54120

SEQ ID NO: 219691 - DNA, 418 bp, Homo Sapiens
tttttttaaatgtccacgtatcatatatttgataaattaaggacttgtaagccagagattattaagaactcatttaactcaataaaatgagaagacaagacagacaacccaaattaaaaatgagcaaatgatttgtatacatttcaccaaacaaagtcaaacaaatggccaataagcacataaaaaaagctcaacctaattagatattatggaaatgcaaattaaaaccaccatgagatgccactttgtacctacaaaaatggctataatcataaagacacaatcctggatgttggtgaggatttgaagacactagttttaaacattcctggtgggaatataaaatgtcacgttggaaaacagtttgactgtttcttacaaagctaactattgatttttcatatggcccagcaatttc

SEQ ID NO: 219692 - DNA, 474 bp, Homo Sapiens
ttagtacagcacatgcaatacataagacaatttttttccctcaaaagtaaaaattctcgtggaacttttagatagagaaataaaaatgtaggtttgaaactggctgcaatcttcatgtatttcaggatatccacagaagctgacttataaaaagcatttatattccttaatttcaacatagatgactaaaagaaaattaagtcaataactaataaagttagtgaaacaaacacttcctacttctagagaagctttcacccacacactataagaccaaaagacatatttaaccttcagagtgcaaataagcccacacatttcaagcagcttgggttttcaaattctgtgcatgttacctgtttcccatgtaccagaaaagtagtaatgtgtggggctatagaggaagaaaatttctgggtaaatgcagccccgtagcgcaccgccaacctgggtgtgtcagtggaaagccataaa

SEQ ID NO: 219693 - DNA, 415 bp, Homo Sapiens
tttttttataaaaatggcacatttattgctacagaacggtcatgtacatgacttcatcgaataactacagatgggaaacaggtaatggccttgaccaagctgggtttgtttttgtcttgaaggaactccagcacacaacctgtttggacacttctacaaatcagaaatacaccaaaaacatgaaaaaatcgaggcactcagccacacattgaaaacaaggtgtaactgtttatctttttttttttttttgaaatgttttccctttttttttttttttaacaatttttttaagtttttaatgctgcagctatgtgtacagtcgcaaaaaatttccccgctgcgacctacaactaaaaacaaaaacaaaaacaaaaaccaaacaaaaaacaaacaaaaaagctacccatacagtttc

SEQ ID NO: 219694 - DNA, 493 bp, Homo Sapiens
tttttttcaccttttaactgtctttattttgatctagtttaaacagataagccaaaattttgccaatgagactacttgccaggtggaaaacgattaatttatagactcctggtacaaaagccaaaacagtaggcgctcagtaactacttcctgaatgaagaaagttatatacttatgtacaaaacatttagtttctccaccaacttgaacttttcataaaggagagcaaacattcttgcagtagaaaaaggaatgtagccacaaactaatattgaaaatcagaaaaatacccactctttaaaaggcagttaatcttaatagctccaaataaccatggcaagaagtcttgttacaatcgctatactcctttcatgtttataaaaatttgattccatctataagaaataaagaacatccctccctcttagtcttcaaattcaaaataggaccttagcagttatttcaataatacataaaatgcatgcctttcact

SEQ ID NO: 219695 - DNA, 522 bp, Homo Sapiens; identical to SEQ ID NO: 47950

SEQ ID NO: 219696 - DNA, 343 bp, Homo Sapiens
tcggtcccaaacgctctcacaatgaaaactaattacacactttgacatcaccatagtcaactatactcttgggaagacaacatgacagaggtggtgtgtgttgagggggtgggtatatgtatacacgatattccataagaatatgtacacctaaggtcagacatacctattggcttaccttcatcctctgttctctgaaggaaaaaaaatgtagaaaggactattaatttagttaattaaaatgaaaaaatgcagttctttgttaggaagggtctccctattttagcgttcttcctttgtaatatgaactgagagaaccagcaatatctgtgagcagcgttgg

SEQ ID NO: 219697 - DNA, 429 bp, Homo Sapiens
agctcggtaccctcactgctagcacagagcctagcacagtgggtctgtttatattgtactgagataatagaaactgtgtgggtatatggttcaccttaaaatccatgccttatttttttttgagctcatgatgcctgtattaccatttgctgaactcaaaatactccaatggtttcctgccaaaatgtaatcatgttatgattgtccaccaagaccatttctaaggtagaaaccttacatcagaagatgttatatgtttctttttctaaacaagttcaggaaaagtatgtcctgatacaggaaatttattcagacttaacaccagcagtgtctctggttatgttacgtaattacatggaaatcatagtaataatatttgcagtgcctaaatttgaagtgctcaatggtgtcatctagcggtgagggggt

SEQ ID NO: 219698 - DNA, 423 bp, Homo Sapiens
ttgtcgctactcacgaattggtcgagacctcatccatttctgcttcgcatcagattacgtggtttgctcacactgacaccaacaaacacctgtcaatccctatgtccctcctgtcttccaaaaatacctagaaattgctgctctatcgacggtagtatttcttgttttctagtgctgctattatttgtctattgtacttggttttgcattttagtcacctgaatgaaatctggaacaaggcggtttcaccatttcaaatctttttttcaccattttatcgtcattcaggttactacaaatggtaagtagaagctctgcaaaagtcaaaactgagtgggaggaaatcattttgcgacaatattctgaactatttcagtccaattaatatttgatactaagcttctacagcatcagatgttactt

SEQ ID NO: 219699 - DNA, 391 bp, Homo Sapiens; identical to SEQ ID NO: 54957

SEQ ID NO: 219700 - DNA, 260 bp, Homo Sapiens
atgacaagtgatttaagatttttagccacagtataaagaccaaaattttataaataaaagacttgtatttgaatgctgacagtcaaaatacaaactctgatgtgttttcgaaggaaaatgaggacaataatatgtacccttccttaacagggctctcatgaggatcaaacaccagatgcagttacacaaaagcatgctaaaactacaaaatggtacacggttttagcaattctgtacctgtattcaaggtgcagttttgg

SEQ ID NO: 219701 - DNA, 507 bp, Homo Sapiens
actgaaatggcaaaatgatagtcacatcacactagggagaaaattttaataagcagacaaaacaaaatgataacattgtccattctttcaaagcactgacatacaaaagtgaaaagatacaacagtgcacactttcagggtacctatgtttactgaagtctaaaaactcctccacctttaaaagtcagcattatttcttgatggaagaaaaatacacagtaactttttgatgtaatactaatattattgggttttctttgcaaattcctttagttcaagtattactaaagaaacataaacatatggacattacaaattcagctaaaaaactaggtagtgctgactatcctgtttaatggtaatatatgtattaggtatttaaatttgattattataacacaaaataattttaacatggaatttctataaagatgtattttgtcactctacagtgcctgcctcttccactgtgttttttttaagatgttcatcaatttacccaatttt

SEQ ID NO: 219702 - DNA, 454 bp, Homo Sapiens
aatggagtttatgtagtaaaagtaacgtggcattctggcttctagtaatggtgcaatactgtagagttaccttcctatagataacaatgataatatctggacaaaatacattaatttttctttaaaggtactggagagtgatcaaaagcagacaaactggaggagagcctattcttaaaacataactatcttgtgaaattcatgagttggtgggtattagtctgagggtgctctgtaatcctcctgctacttggtgaagaataccacaaccttatatgcatgaaatgtaaggatacagagttctgggctaacagaacagcaagaaacttagagggtaaatcctggaacagaggcagctacaaagaaagtgagtccacaaaaattcgcatataagatctgtccaaattcttggcagcttttaaatactatgcatgcagtggtgctatgtgtagta

SEQ ID NO: 219703 - DNA, 352 bp, Homo Sapiens
  misc_feature (33)..(33): n is a, c, g, or t
  misc_feature (249)..(249): n is a, c, g, or t
  misc_feature (314)..(314): n is a, c, g, or t
ttttttttttacaggtgaggggaactttaggtntaggaaaggctaaataacagctaaataacatctaaagccccctccttccttgtaagaggcagagtccggagctgacaatgtgcttaaccactatgtgcctcaaccttggacctagtcagtcttttctaaaactccacatatatttcattttcttttttttgtagattttgtcaggtttttaaaaatggttgtatatttataaaatatgattgtggnaatctcttatttaaatatcattgcttaatttatagggcaaatatcacttatgattcagagatccnaatacaatggaaggatgccttaattccacagatgccaa

SEQ ID NO: 219704 - DNA, 639 bp, Homo Sapiens
tgcagtatattaaatttaatcagagattacacagagtatgacataaaacagcagttgactagaataatttgcaacacatgaaaacagtttagaaaatggatttaggtcatattctctgacagtaagtttgttggaaatacaggcatagaatcagacagatttatgtgtcatctggtgctcccttcccttgtcacatcaacttgaaccgatagttttgtatggatccaagcagtagacatgctgttgattggtaaactaaatctgtaatgagactgttaacttcataaagccacaattaactatattttggtgagtattttagatggaaaagcacattcctcctaatagttagaaataagcttagaaatattttgtgggacagttctatggttgtctaaaataagaatgtttggcttgttatacataattccattattcagtgacaaatgtgcatttgcaaatcagagactagaattttagagattaatcctggtggaatttttagggaaatcttgttcaactatatttgtgaaagcaagaatatgttattttttaaaattgggtgtactgactggcctaagcatagactttctttttttcaatcatatggttacaaaaactgtatattacaaacagtat

SEQ ID NO: 219705 - DNA, 602 bp, Homo Sapiens; identical to SEQ ID NO: 53146
  misc_feature (542)..(542): n is a, c, g, or t
  misc_feature (558)..(558): n is a, c, g, or t

SEQ ID NO: 219706 - DNA, 555 bp, Homo Sapiens; identical to SEQ ID NO: 45140

SEQ ID NO: 219707 - DNA, 676 bp, Homo Sapiens; identical to SEQ ID NO: 45119

SEQ ID NO: 219708 - DNA, 542 bp, Homo Sapiens; identical to SEQ ID NO: 49123

SEQ ID NO: 219709 - DNA, 654 bp, Homo Sapiens
ttccgcaacttacacgtggacgaccagatggctgtcattcagtactcctggatggggctcatggtgtttgccatgggctggcgatccttcaccaatgtcaactccaggatgctctacttcgcccctgatctggttttcaatgagtaccgcatgcacaagtcccggatgtacagccagtgtgtccgaatgaggcacctctctcaagagtttggatggctccaaatcaccccccaggaattcctgtgcatgaaagcactgctactcttcagcattattccagtggatgggctgaaaaatcaaaaattctttgatgaacttcgaatgaactacatcaaggaactcgatcgtatcattgcatgcaaaagaaaaaatcccacatcctgctcaagacgcttctaccagctcaccaagctcctggactccgtgcagcctattgcgagagagctgcatcagttcacttttgacctgctaatcaagtcacacatggtgagcgtggacttttcggaaatgatggcagaaatcatctctgtgcaagtgcccaagatcctttttgggaaaagtcaagcccttctttttcccacacccagtgaaaccttggaaaacccctttttccccacccccattttatgcccccctttgaaaaagtctttctgc

SEQ ID NO: 219710 - DNA, 612 bp, Homo Sapiens; identical to SEQ ID NO: 50756

SEQ ID NO: 219711 - DNA, 762 bp, Homo Sapiens
  misc_feature (458)..(459): n is a, c, g, or t
aagcgtacaagctattatatattttcataatatagaactttaaagtatagtaatcaacagtggcaaaatatttctgtctctgacattattatttgtgagatccaacctgtaattgagatcagagaaaacagtatgggaaaacaaatccatgagaacaggataaaaatatcatgaacagcaaaatatgtctgagtatttaaaactgtatagaaaaaataaattagatgaacaattgtgtaaatataaattaaaaaagatgacattcttaataaataaagtttactatttacatttttatatattgccaaaagatttaacttagatccataaaaacacataaacagaaaaaaaaataggagcagcaaatttatgcgcgtgaggtacagaaaaaggattggaattgtgtttagtttttggtgtttagattattttctttgtgtctttcttctttttctttnntttttcttttttacaataggccagtagaattcttatgagaacagcttttaagcacttcaatggagtgtcatttttttggtagcttccagaaggtgccaaacaggtttcaacatcatattaattagaaatacccataataattataacaataataaaaaggtttaatatggtacataaatatggaagagcagtttgtaatatgaatacattttctctagacgagatcacagttttaattggaaaattttacatttaaggttatttatacaacacttatttggtcaactatatttacatgtgcct

SEQ ID NO: 219712 - DNA, 541 bp, Homo Sapiens; identical to SEQ ID NO: 60068

SEQ ID NO: 219713 - DNA, 629 bp, Homo Sapiens
  misc_feature (500)..(500): n is a, c, g, or t
ttttagtacttttttttatattaaaagaattctaatttgcatgtttgtagcctgttctggagagttggggggcctgatctgggatggctttccataagccaaggatgggaggaagcccttgccccccaggagtgccgagtgcactctgttgccagaaacaaaggatgccaggtgccacccaaataccccttcaaagggcttgaaacccttctgggcctctaagcaatctaaagaactaacttggtctgataatctcacccatcccccactcagagtctggtttgaactttgattccttaggaggcatggggggaaggtgggggtggtacagagagcaactttaaaatattaaaagtggctttctcaatggagcgaaaagaaaacctgtgggattacaaagttaactagacattgcagtgggaggagggtgcaggctagtttatcagcttttttttttttttttttttgagacggagttttgctcttgttgcccaagctanagtgcaatggcattcgtcctcctcgggccattgctccaaccaagtgtcctttccgatgatgtacctgaggttgggcttttttcctccgatttttgcggcaccgagggggtgcccggtttcccaattcgc

SEQ ID NO: 219714 - DNA, 714 bp, Homo Sapiens
tatacacacaatggaatattatttagtcttaaaagggaaggaaattctgacacatgctacaagatggataaaccacaaggagattatgctatgtgaaatatgccagtcacaaaaatacaaatactgtatgataccacttacacggggtacacagtcaaattcacagagacagaactagaatggaggttaccaaggctagctggaaaatggcgaatgagaaattgtttaatgggttcggggtttgttttgcaagatgaaaagaattctggagactggccgtacgaggtaaatatacttaatactaacgaattattcactcaaaaatggttaagataataaattttgttgtgtagataaaaaaatttaaaaatcgattccatctttctcatcaaatcttactttttactctttgtttctttttttcccatttcagttagattgctctcttcattgtacttccagtatgcctcttgagcctttgcaccatggtgttacttctctggaatggtctttcattatcacccatccattttcaaaaggttgcatgtgctttcgttccaaagacattagtttatagatcccaccatgaatcgcatcctccatgtcatccctactctttcaaatcacattcctctaccttttctgcactacacagaaaggcctacacacggttttcatactttaacttaaccctttcgaccatccttcctaaaa

SEQ ID NO: 219715 - DNA, 635 bp, Homo Sapiens; identical to SEQ ID NO: 60053

SEQ ID NO: 219716 - DNA, 619 bp, Homo Sapiens; identical to SEQ ID NO: 50442

SEQ ID NO: 219717 - DNA, 622 bp, Homo Sapiens
  misc_feature (554)..(554): n is a, c, g, or t
  misc_feature (571)..(571): n is a, c, g, or t
aaatatgactttaaaagggcatgaaagcaaccgttatttagtatctgttattgctgagtacaatgtaatatagaacttgaacttgaattcaaacttacactcctccaaaacctgtattattttctccaggccctgccactagccagtgagggaaatagatgaaatagatctgactctaccttgaaggtctgcagcaggggtcagcaaacttctagccctcaggtcaatagcctgccgcctgtttttgtatggcccatgagctaagaatgatttgtacgtttttcaatgttttaaaaaattgaaaggagtataatgtttcataacacatggaaattatgtgcagctcaaatttcagtatccataaataaagttttattggaacacagctacgctcactcattagatattgtctatggctgtttttgtgcaaaatggcagagttgggttcagagttagcaacagagagcttgtagcctgcaagcctagagtatttactatctggatttctacaaaaaaaaaaaaaaaaaaatttggggggggcccgtaacccaatncgcccctatagtgagtngtattacaatccacctggccgcgttttacaacgtcctgacttggaaaaccc

SEQ ID NO: 219718 - DNA, 612 bp, Homo Sapiens
acaaattcttccagccatcctatgtcctccaaacataacatgtcaggaggagagtttcagggcaagcgtgagaaaagtgataaagacaaatcaaaggtttccacctccgggagttcagtggattcttctaagaagacctcatagtcaaaaaatgtggggagcacaggtgtggcaaaaattatcatcagtaagcatgatggaggctcccctagcattaaagccaaagtgactttgcacaaacctggggaaagtagtggagaagggcttaggcctcaaatggcttcttctaaaaactatggctctccactcatcagtggttccactccaaagcatgagcgtggctctcccagccatagtaagtcaccagcatataccccccagaatctggacagtgaaagtgagtcaggctcctccatagcagagaaatcttatcagaatagtcccagctcagacgatggtatccgaccactccagaatacagcacagagaaacatatgaagcacataaaggaaaagaagaagtcaaagacaaagatagggaccgagactggacatagactggacaagaaaaatctgattgctcagccagaagtggtcaatcaccatttttaga

SEQ ID NO: 219719 - DNA, 607 bp, Homo Sapiens; identical to SEQ ID NO: 49053

SEQ ID NO: 219720 - DNA, 517 bp, Homo Sapiens
gtttatgcactgaacctccttgctctgggatcataatcatatttgagtataagttatggtattcacatttgtatttgctacccaatacatttatttgttatatctgacaagcactgggaaatgaaaataattatttgcattacaaactcattattcatgtactttgaaagctttatctaacagcagtttttatatgggctatctgaatcttatcttctaaataaaaactagatttgtgaaagttgcctattctttttgtacaagcggcttaactattttaattgtagcaagtgaagacaaccagcatcactatctcaacccaagtgcctacttagaaaacttgtcctggctgccagtgctgatgctccttactaataaaagctgttgagacagggctgaatacatccttacagccctggtcagtggcattccctcgtacaattcatttcttaaagactgatctatagtgtttttcagatgttgccatcatcatgttataagcagcttttatttcttt

SEQ ID NO: 219721 - DNA, 617 bp, Homo Sapiens
tcaggaagggttgcctgcagggacttttgctctgctgtcctggaccctgtgtgcctcataagggctattctttctttcacgtgcaaaacatttttctgaaatagcaaacaacctacatgtttgctgataaaagattggctaaacaaattttttttttttttttttgagacagaatctccctctgtcccccaggctggagtgcagtggtgcgatctcggctcactgcaagctctgcctcccgggttcacgcccttctcctgcctcagcctcccgagtagctgggactacaggtgccctccaccacgcttggctaatttttttgtatatttaatagagacagggtttcaccatgttagccaggatggtctcgatctcctgacctcgtgatccacctgcctcggcctcccaaagtgctgggatgacaggcatgagccaccacgcctggtctatgaactttttaaaaaagatgtatgtgtataaaaacagattcaagggaaaggcaccccaaaggttttttcttctggaagatgagatttgtagtgataattatttcttctggaaacttttgttagtttggaaattttctacagggaaccattttttttaccttggtacca

SEQ ID NO: 219722 - DNA, 640 bp, Homo Sapiens; identical to SEQ ID NO: 50553

SEQ ID NO: 219723 - DNA, 647 bp, Homo Sapiens; identical to SEQ ID NO: 55056

SEQ ID NO: 219724 - DNA, 606 bp, Homo Sapiens
ttaaggcagtcaaatttagcacagggggattatatgccaactttagtgacactaatgttaataagttctggtaacccactaccatcagaccaacgtagttagtttttgaagaatcctaaagccatgctgtatggtggggaaaaattaatttagcttatgacaaagcattatccttcaagcctctgaataatcagcctcttgctttacaaacacttcttgtgtctgacagctctgccatgcctttagcaatagctatcatttactgaccacagtcattcattcattcagtattcattttagcacttagtgggcacctgctctgtgccaggtaccatcctaggtgctggggatacagcagtgaacaaaccaaacaaaaccctctttaggcaccacactggatgattctatttcactgagacctcacaatgtatctgcatgtaggtattattatctccattttagagatgaaggaactaaggcttatatgttaagggccaggtcccagagctagtcaacaacaaggcttggactgaaacctctcaaactaactccgaaagctgtcctcatttcactaagctgtggccatttgtttggttcaatacaaaa

SEQ ID NO: 219725 - DNA, 662 bp, Homo Sapiens; identical to SEQ ID NO: 55850

SEQ ID NO: 219726 - DNA, 564 bp, Homo Sapiens
caaattcctccttttcatattaataaatattctttcaagttcttagaatacctgttaatgttttagaattatctttacgaaaaagtaacatatagctctggagtgtttttattaagattcaaattcataaattaaatattgaaaacattaattgagcatttgtacatgcaaagcacaatataagtggaagatactttttagtgtgacagagaataagaaaaggtttgaaacaggcttaccgattccttcttttccagcttcagttttgaatttgtaagtggaggataataatgcctatctcacagagaagttgagaaaattaggaaatgacagatctaacgtgtgccaaagcataggacttgacacacggttgggacttaataaatgccggttctcttctttcactccatttttcagagatgcagtgaaaagaaagaaatcaatcctgccctcagtaagtttgtaatttaaaaataaaaacgcagcctgtctgtagggacatttactttaccctgccatgaattgtcttaatggtggggtagatggtctgattgcggctctgca

SEQ ID NO: 219727 - DNA, 625 bp, Homo Sapiens
acacccggccctaattagtcattattaaggaggactgctcataaaggcagtaccaaatcatcattcagatcagcttaagtgagaaagcaaaatgataatctctattgttagagaaattttcttttctagacaccaaggaatattttaaatgattttttattttttctaggatgcaggaactatgaaaaatgatgacaaggcatttaaaagggtatgatcagttaaatagaagtagggtctgcaaattgtgcttaaggggaaataagcaaaagaaaggaaaatagtagaacctttcatactaattagaaatgtagttacctaccagagggcaattttgctccataccaggaagcagtaaatagcagtaaatgatcacctaggcacttctttcctgtgaatttggtgagcattcttccagaaaagaagactaaaagcaaacaacaacaacaacaaaaaataccacacctcagtaaccttgtatgctgcattatataataatgatagtaaaaatatattgttttgagtgtactgtgtctgtttgcaaatatacatgcacattaaacttttttgtttttatatgtcttaaaaaaaaaaaaaaaaaactggaggggggcccggtcccaaa

SEQ ID NO: 219728 - DNA, 621 bp, Homo Sapiens
ccagatcttactgtgattactggatgtaagtgaccttctaaccttaaggctgcgaatataagattagattctgttttcaccaaaatccaggaatagacaaaaagactgatacctggtatctgtacctcattgagtgaaaggagttaattaagttcctcaggggaactccggagattcagggtgtcttgttagttgtaggatgccttcagtagcttacaaacaaaaccataaccttcctggaacccagcactctggaaggccaaggtgggaggattgcttgagtccaggagttcgagaccagcctgggcaacatagcaagacctcatctctattttttatcaaaaaaaaacaaaaaacaaaaaacccatagccttggccttttgtcgctgctttcataatttggaaggcttctgttttattgagtatacgaagctagcattcttctaacttaatcttttctgtttgcaggattggcctattgaagaagttcaacccggagagatggaaaatcagctctcataactaaagtaatttagtataaaaatagaattgatagtgagggtataagtgtaaccatagttaaacctcttctgtatatctagcttcttgcttcagaatgaa

SEQ ID NO: 219729 - DNA, 638 bp, Homo Sapiens
cccaaattggaatctaagccatctaatggagataggtgtatgtaatgtgtgccattagtaaggtaatttgccagttgcatccatttctgtcagtagctctataaatcagtcagcagatagtgggggaacagacaattttgtccttataagtcaattgaaagaagaagtgatgtcacttaagcgtctcttacagcagagagaccagaccattttagaaaaagataaaaagttaactgaactaaaggcagactttcagtaccaagagtcaaatttgagaacaaaaatgaacagtatggaaaaagcccacaaagaaactgtggaacaacttcaggccaaaaacagagaactactcaaacaggtcgcagcattatcaaagggtaaaaaatttgacaaaagtggaagcatactaacatctccttgagaaagtcatttgtttagcatttcttcttacaatgtaaatttggggaaaaaaaatttgtgaagcccttaaattctgtgtggagaaaaaatttttgcacaccaaagaaaggtgggttcccgttcactttggaattgatatacagcattttttaggtgtaaaacatcaaaaaaacttcaactggttgaaggaccttttaattatttgattcccggaaact

SEQ ID NO: 219730 - DNA, 587 bp, Homo Sapiens; identical to SEQ ID NO: 46685

SEQ ID NO: 219731 - DNA, 529 bp, Homo Sapiens; identical to SEQ ID NO: 50370
  misc_feature (393)..(393): n is a, c, g, or t

SEQ ID NO: 219732 - DNA, 723 bp, Homo Sapiens; identical to SEQ ID NO: 48995

SEQ ID NO: 219733 - DNA, 520 bp, Homo Sapiens
gagagtgagcacttagaaatgtttatattaacttgacataactgtgacatccaagcatgggagccttggaaaagagttttattatatttcacaaatatatcagtccacagtcgagttgactgtgactttaaaaaaaaaaactttaaaaaaaaaaaaaaaggaaaaagtgaaatttatgatagttggtgcctgtggggacagatgaggggaggagcacatgcgactttattttctttatttaaaaagaatatccaagttgggcgcagtggctcacacctgtaatcccagcactttgggaggccagggtgagaggaccacttggggccaggagttcaagaccatcctgtacaacatagtgataccctgtccctacaaaaaccaaatcttagttgcgcccgtggtcccagctgcttggcaggcttatgcagaaggattgcttgagcccaggagttgaaggctggcgtgaactgggattttgccatttgacttcaatgtgggcaacatattgagacctgtctta

SEQ ID NO: 219734 - DNA, 607 bp, Homo Sapiens
tgggcaaaacctgtgtaggtctcgctgtgggtttgctggggaccaagggggtgatgaaaaggggaggggcggagctcctgcccaggagaggggctgtggggccccaggataaaacagacacagtgacagggccaagagccagcactgctggccttggtgtcatgccagaatctaccaggactgagggagccagaggagtcctgtaggcaggctactgtgctggagcatcccccagctgctcccatcttgctggaatttcttgggcggcttctccacctgtatctcaagacagacacccgggggcctgtgtctgtggccgctcccatcccggcagccctggctgctgctcgccccaccctcgcttatctgtagattcaaagcgatgttctcttctgtgctcttagaagtagggagttcagcagtaacagccaggtgaagcgaacctgctgggtgatttgtttgcgctctgttttatggggcattcctgcgagatgtgtcagcttctgtgtgaaatgcagccacagctcatgtgtaccaaagtagaaaaccaaatcacagagaaataaaaacatgcttcagagagaaaaaatatatttctactctccag

SEQ ID NO: 219735 - DNA, 674 bp, Homo Sapiens; identical to SEQ ID NO: 52933

SEQ ID NO: 219736 - DNA, 634 bp, Homo Sapiens; identical to SEQ ID NO: 61459

SEQ ID NO: 219737 - DNA, 627 bp, Homo Sapiens; identical to SEQ ID NO: 48254

SEQ ID NO: 219738 - DNA, 661 bp, Homo Sapiens
catgtgggggattttatttcaggcacttgctcttcagtttttcttacacgatgttccacaaatataaaaatgagaaactctttcagattatctgtatatccatatacctggattattctggctaaagcgacaggaaatcccagcagtctggcttccccgagtaaccctgtactgcctggtttaatcccgccgtctgagggtggggtgggcgtcaggcatggctggacacaggagtgccagtggtggggtcagaatccagcttctccctctcccggccccagtgggtctattccccgaagtccttgctcctgtctgcagggctgtgcccactgccggtggggcagggagtggagaaggggggctgactcacttgctcttctcctggagttgctattctaacggcagcaaatccacaggaaaaaggtaaacaaaaaaaaaaaaataagaatctttcagaaaaagaagtatttttttaaaaaaagagagaaaagaaggtgaggagttcagtgtaaccaggtgactactctgaactggggactgagtcagcctctgacgctgagctgaatgcccaatgacaaacgtgaccagccgtgcgggcgggggcaaagcccaagacacaaaaggccgatggcccacggccccgggtggcgctttccagagg

SEQ ID NO: 219739 - DNA, 534 bp, Homo Sapiens; identical to SEQ ID NO: 45876

SEQ ID NO: 219740 - DNA, 691 bp, Homo Sapiens
cagaatgaaaatactggtatatttgtataatgcaaagagaaatacagatataaatcctcaaaacggaaggtacattaataaaaatgtagcattataagccaaaaatattatatagtacttgcagaatttagtctttcagtttaacattataatgtctaacaaagaaatattatttaaattatagttctcattattaatttaaaacaaccatcagtagaacagcacagcttaacctagcaaacattttaaggaaatgctttgtttcctagaaggaggatatcattatattccattcatttataccataaacaacagaagaacaattttcaaagtggaaattagtttcataagacagaataaaactgggcttctcaaagcacaagccatttccataaaattaattttttattggcaaaaaatacttaaaacaattttgatgtagtactctgcttctcagagccctcccaatcctcgaaccacaatctatacacacgaacacatgcaatactgtatttttctccacatcattactaaccaaaacactttactcttttaaaacttacaacttgacagaaatgtttccattcaagattgctataatacagaaagcagttgtcactgacgtggtttttaacaacagaaagtaaaaccggaaccaaatcttacttgttacttactgctttaaaaaaat

SEQ ID NO: 219741 - DNA, 587 bp, Homo Sapiens
  misc_feature (567)..(567): n is a, c, g, or t
tctgggtggcgttatccatccctttcttgtgtctgtcagacaggctctccctaaccccacccctagtccaatgactgctttcactctgaatccccacggtacatatataagcatctgaggctctttcctattggctttgattctacctccttcacttgaggagcagctctctgctggcaaccacgtaccatcctgatttagaacttcccacaggctaacttaagacaccaaataaacacttgcacacacacataaccaccacctcccattacagaagtacacctcccctactgaacagatgatggccacgatactgaaaagcatggcatcaacatgacaactgcatcctgaaagatcagcctatatataggtttggttatcttgaatttcgagtttggagagaagcaaagtatttttctaataaactgtgaatgctgaggaattcaccttcataggagtcagaaacaggctgccaaacttttcaaaggaaaaacagtggtaggttgagcaagcacattgtcatgtcagattttccaggctcgaaggggggccccttacccatttcgncctatagtgagtcggattca

SEQ ID NO: 219742 - DNA, 582 bp, Homo Sapiens
tggcacgaggggaatacctactgttgatcagattttcatgacaatttaacttcccattccccatagtccaagagggttataaaaccagatttagccattactgcctttttaaaaaattaaatgatgggagtcttcctctgtcgcccaggctggagtgcggtggcatgatcgtggctcactgcaacctcagacttctgggctcaggtgattctcccgcctcggcttcccaggtggctgggactacaggtgcatgccacccatttaaaattttttttttcttagagatgggagtcttgctatgtttcccgggctggtctcgaatttctggccttaatttcctgatcctccttccttggtctcctgagtaactgggattacggatgtgagccaccgcacctggaggccatcactgtcttactgttccaaccaagtggtagaactggaaaacaactattctggtatattcaatttgctgcagaaatctaccctcaaattacctgtatctcacctatattaggaagaattctaatagaatagcattgtgactatcttactttaatatttaatgtattagaggcatat

SEQ ID NO: 219743 - DNA, 582 bp, Homo Sapiens
  misc_feature (485)..(485): n is a, c, g, or t
tttgtcactggtgtcagagaaacctctgtcatcagcagatgtcctaagagtataattatagttctttacttaatccaaaatttgttctgctctgatatctataaatgatatgattattcaaaataccttgaaatgattccacaattagattaggtctgttgaagataacttattcttaaatatgagtaagattaaataaaagtagtttgagagttgttactccctgcctcaactccatggtattccaaaatgtttttgtgggcactttaatacttgtagttagattttgtttgttagttttagaaatgaacatttcttagattttcatgggtattttttggctgtatttaaatgtaaatgatataaaagtaagggaaattgtgcaaattatttcttgtgtagtaatcagtggaagtgatcaaacagcttgaagcagtttatgatgagaaaaattaaaattgcaaatgacctgaaatttagccagnctattcttatttctttaaattcagaaatcttaaaaaaaaaaaaaaaactcgaggggggcccggttccaattcgcctttagggggcggtttcattcac

SEQ ID NO: 219744 - DNA, 763 bp, Homo Sapiens; identical to SEQ ID NO: 50633

SEQ ID NO: 219745 - DNA, 614 bp, Homo Sapiens
gcctagtgtgggttgaatctaagtagttaacagggttgcgcatttgcaggggcagcatctttccagtgagtgatgtgttaaattcccatgtctttgtgcagtgaagcaggactaagaatggatttctggactttttggaagtttacccctttctgaattgcttctgtaagtggcagtgccatttaggatgtactgcataagtttttggctgggattttaggactgaaatacatgtaggtggccatcaaatcagggtttcattgtatcacattaaataaacatgataagttagccaggtgtagtgactactggggcctatagtcccagctgcttgggaggccaaggtgggaggatcacttgagcccgggaggttgaggctgcagtgagccatcatctcgccattgcattccagcctgggcgacagaaaaagaccctgtctcataaatagataaataagaacatgatgatttttaaaaagtcataaacccagacaaagcccgggtttccaatgggagcataccaagttaaactcgagggggggcccggtccccaattttgcctatagtgagtcgtattacaatttactggcccgccttttacaacgcgggactggg

SEQ ID NO: 219746 - DNA, 636 bp, Homo Sapiens
ttgtaaatattcttgtttggattttctgtatacattgaggaagcattaccggaatgaagagaaacaacccagtgttgcctttcaagtgtgcattgtgccctgtgggcccatgtcccctttcaggagcttcttgactagagagttactcgaaagaggccagagctgaaacttgtgtgtacattttgattgccagtatcagtttggaaaaatgtttaaacttaggtttaactttttggcatggtggcgcacatctgtaatctcagcactttgggagacagaggcaggagaattgtttgagtctaagagtacgttaccaacctaggtgacataacaagatcctgtctctaccaaaaacaaaataaattaggcaggcgtggtagcatgcacctgttgtttcggcctcccaaagtgctgggattacaggcgtgagccatcacacccggccaacatgttatatatgggatagaccctgggtctatcttaactttccaaccatgcttgttcctttcacgcaagattactacctaaacttgtcttctttcttattatggagtgacagttaaaccctatgccttgatttaaggtctcacttcttgtggaaaacagaacttcacctgaaaatcgaatttccaatgc

SEQ ID NO: 219747 - DNA, 604 bp, Homo Sapiens; identical to SEQ ID NO: 50850
  misc_feature (383)..(383): n is a, c, g, or t

SEQ ID NO: 219748 - DNA, 536 bp, Homo Sapiens
agctatatcaatctaatatttattctaaagggcaaaatgcttccacaaaattattatgtaatgcaaaaggtgtgaaaaacatttcaaatgaaaataaagtatgagtttgaaaattaaaaaatatttagagacaactttcacattaatagcaaaataatatattcatgttaataatatattattttcatgaaagaaaaatggtttgctgtgtaaaaacacaagtgtaatctttggtaccaaagatttttttttccctgcctattttaccatctctgatgacatggaacatctttcctttagaatggcctaatattacataggggttcactttagctggtaccttctacaccactggaaaataacatggaggtttagagccgtgcaaaataaaacttttttaaaaatgtcggcaggcacggtggcttacgcctgtatcccacccttttggaggccaagggcggtggttcacaaggtcagagattgaaacatcctggttaccacgggaaaattcctttccccttaaattccaaaaattt

SEQ ID NO: 219749 - DNA, 643 bp, Homo Sapiens; identical to SEQ ID NO: 47940
  misc_feature (511)..(511): n is a, c, g, or t
  misc_feature (517)..(517): n is a, c, g, or t
  misc_feature (519)..(519): n is a, c, g, or t

SEQ ID NO: 219750 - DNA, 666 bp, Homo Sapiens; identical to SEQ ID NO: 50124

SEQ ID NO: 219751 - DNA, 640 bp, Homo Sapiens; identical to SEQ ID NO: 49021

SEQ ID NO: 219752 - DNA, 755 bp, Homo Sapiens; identical to SEQ ID NO: 48162

SEQ ID NO: 219753 - DNA, 464 bp, Homo Sapiens; identical to SEQ ID NO: 50782
  misc_feature (304)..(304): n is a, c, g, or t

SEQ ID NO: 219754 - DNA, 591 bp, Homo Sapiens
cccattcttttttttttccctgtctccgtgacaaccagtggttcttcatttttgatcatgcgaaatgcactttgacccagatggtctgcagaacttcacttaggacattagcacacaaatagcacacatatcacatacccatttatatacataattagaaaatgttcctgatacatgtgtcatgtgatttcttccaacaaatgttttggaaaacagcaagcaactagtctgtaggttgtcttttctctagagatccttgtcctgggacagcctggggcaagttattaagcatatttccttcctggtgggctagatgatgtgcattatacctgtagtaccttcatactagcccttacaagttaaatgtcctgtggccatcttagccgaaagtctttggttgcaaaatcttataggtaaaaacagttgaaagaaaaaaaaaaaaaaaaaactcgagggggggcccggtacccaattcgccctatagtgagtcgtattacaattcactggccgtcgttttacaacgtcgtgactgggaaaaccctggcgttacccaacttaatcgccttgcagcacatccccctttcgccagct

SEQ ID NO: 219755 - DNA, 750 bp, Homo Sapiens; identical to SEQ ID NO: 55866
  misc_feature (713)..(713): n is a, c, g, or t

SEQ ID NO: 219756 - DNA, 616 bp, Homo Sapiens
  misc_feature (522)..(522): n is a, c, g, or t
gattttattcacttttatttcaagtttaaagtgtgcttcacacaacttgaatcaagttgatattttaattgtggtagctggcccaccccaaaggtttcagataaataatatatacatataatcatagatgtaggtgctaattaaatccattactttaatttcattaaattatcatgaagcaggaatgggacaaagaggagaaggtatcatcaacgtactgatgaatcaaagtagcaaaagcgtaaaagtcattggatattagaaaaaaatgaattacgataattttcccaaaaagggtttttaagacaagactctaatgtaatcttctgtatagagagcatagcccatgacacccaagttaagtactgctcttggagtactgctgggcttgctgtgagcagaaacacctgtgatatttttttccatatcaacttatcatccttgtcattagacatacttcagtatctgggttcacagggctcttgcatggatgtaaacctcacccactacttgaggaccagnctcaaatgtcatcgctccctgaaaaactccaagtgcttttccaatctcctggccaaccggggggccattttccctttccttggtggttccccac

SEQ ID NO: 219757 - DNA, 593 bp, Homo Sapiens; identical to SEQ ID NO: 46550

SEQ ID NO: 219758 - DNA, 529 bp, Homo Sapiens
gttggtgtgttggtcatgtctggtcgcggcaaaggcggaaagggactgggtaaaggaggcgctaagcgtcaccgtaaggtcctgcgagataacatccagggcattaccaagcctgccatccggcgccttgctcgtcgcgggggtgtcaagcgcatttctggtctcatctacgaggagactcgcggggttctgaaggtgtttctggaaaacgtgattcgtgatgctgtgacttacacggagcacgccaaacgcaagacagtgacagcgatggatgtggtctacgcgctgaagagacagggacgcactctttacggcttcggcggctaatgctaccgcttaaacgactcagcatctcgacttcccaaatcaaaggcccttttcagggccgcccacagtttttcgcaaaagagctcatgacttgttagacgattggttggtctctttttaagttaattgttcctgtcaacaggtacgtatattttttagccgcttttttttttttgttcccaattacattttgggggttcgg

SEQ ID NO: 219759 - DNA, 611 bp, Homo Sapiens; identical to SEQ ID NO: 48994
  misc_feature (516)..(516): n is a, c, g, or t
  misc_feature (529)..(529): n is a, c, g, or t

SEQ ID NO: 219760 - DNA, 759 bp, Homo Sapiens; identical to SEQ ID NO: 52864
  misc_feature (678)..(678): n is a, c, g, or t
  misc_feature (731)..(731): n is a, c, g, or t

SEQ ID NO: 219761 - DNA, 735 bp, Homo Sapiens; identical to SEQ ID NO: 52105

SEQ ID NO: 219762 - DNA, 732 bp, Homo Sapiens; identical to SEQ ID NO: 51878
  misc_feature (628)..(628): n is a, c, g, or t
  misc_feature (696)..(697): n is a, c, g, or t
  misc_feature (702)..(702): n is a, c, g, or t
  misc_feature (709)..(711): n is a, c, g, or t
  misc_feature (714)..(714): n is a, c, g, or t
  misc_feature (722)..(722): n is a, c, g, or t

SEQ ID NO: 219763 - DNA, 676 bp, Homo Sapiens
tctccgcaaaatttaattggcagtttgtttcatgtccagcaatcaaagacattaaggaccactaatatttacatccatgaattcatttagacagttttctttaattgatgatgaagacactacaattctaagtaccagacagaatcaggaaaaaaaaaattgaaaataagcataacactataaagaaaacttggaaaagtgaaacacttctaaataaaaaatatatacctggcctggcacccattacatatatacataatacatgttataaacatatatacagtaaatgttttggtagcaatacagaccatgcattggtctttgtgtacacagatgaagtagcaccggggcagcaccaccatcttaagatgataaaccaaactgcacatacattaaatgaaaatacatatatgtttaatttggcccaccctgtagccaagaggtgtaaggaaagtactttgcaagaaaaaattgttttgggaactacattcttaagccaatggtgaagttctaaaaagaaaaagaaaaaaaaaaccctacaaatgtctatgcaaatatggacaagttttcctgtttactgaatttgtcctatccctatggcattactcttaacagcataagcaaaagagagttttaaatggcaaagtgaatggccaaagtttaaaacccccgattt

SEQ ID NO: 219764 - DNA, 585 bp, Homo Sapiens
  misc_feature (535)..(535): n is a, c, g, or t
aagtaatccttatttctaagaaatacatactgatgtttttacagagaaaaattatgtaataactggaatttagtaataatacagcaggagagaaaaaagtggaaaatgatacacacaaacaagatcggccatatagttattataggtaaagtggggatggatttcattactctccctatgtttgtatatgttaggcaacacaaatgtcaaacaagacagaggaagaaaggcggcaaaatcctttgcatacctgggggttttctttctttgccttaattactaactttctgcattaggttaccttcacatgctaagaacagttgaattttcaatttcctaaggcatcagcttgcccttttctttacaagaggggctggggacataaaaaaagcaaaggtgcttcctcaaaagcttcagtgcctggcagctttattcccactgacttccccttcctcccctggactttccttctctattttgccctcacagccatcttccttaaagcaaaacccagtgctgtgtggttaggctcatnttagactcagttgtattggttttcttaggaagagagaagaattcacttcg

SEQ ID NO: 219765 - DNA, 609 bp, Homo Sapiens
gtttgaggctgcagtaagctataatcatgccactgcactctagcatggactacagagtaagactgtctaaaaaaagaaaaaaaagaaaaagaagctttttgcccactgttgcagttaactggcaaacttgtgtaataaattaactaacagaactggtttagcaacaaatgagatgcacaaggtctttaaattataaccctaggtatgttggtgatttgaaaggtgacctaacagcatttaaagtaagttatattttatatttatggggctttcaaaaccacagtcaaaaataagaacccaagcctgagtaacatggcaaaaccccatctgtacagaaaacacaaaaattagccaggcgtggtggtgcacacctgtagtcccagctgctaaggaagctgatgtgagaggattgtttcagctcaggaggcagaaggtacagtgagccgagatcatgccactgcactcgagcctggacagcagagtgagaccctgccttaaaaaaaaaaaaaaaaaactcgagggggggccccgtacccaattcgccctatagtgagtcgtattacaattcactggccggcgttttacaacgtcgtgactgggaaaaccctg

SEQ ID NO: 219766 - DNA, 616 bp, Homo Sapiens
ggtatttatttatttatttatttatttatacacagagtctcgctctgtcgcccaggctggagtgcagtagcatgatctcggctcactgcaacctctgcctcctgggttcacgccattctcctgcctcagcctcccgagtagctgggaccacaggcgcctgccaccacgcccggctaattttttgtatttttagtagggatcgggtttcaccgtgttagccaggatggtctcgatctcctgacctcgggatccgtccacctcagcctcccaaagcgctgggattacaggcatgagccaccgcgtccggccctcattttttattttcaattgaattagaattcaaatcaaagcataattctacttgattatagctcttgtgaaagattcttagggaaaagaataacatgaacgttaggatggcctttgtttgtagattggattttcatgaattattcccatggttaactgaaagttaaatgcatataaacaagagttggcaagggctgatgctgtacactctcaagaggctcccaagatttggtttgtttcttttttcatgaacacccagaatctttcctctcactggatccagaatttcttgggcccaaatcctgca

SEQ ID NO: 219767 - DNA, 541 bp, Homo Sapiens
tatcatatgattatttatttgctttaattgacattgcacacactccattctcagaataacgatgacatcactatcacccaaaatgattactgaaaggctaaaaagacatttttcatacgctctcccagtgccctcctcatatgtcttcagagtggtggtgtatctacattgtcaagtcatggatctgttgcatactagcttctcttttttgaatccattgatgtgctaggaaatgtttaacaagagactctccagaaaaagggggaaaaagccctgattcatagcattttgcagctttccatggagtaaatactttcaccattggtgagctatcaaggtgacatcattaaatgtggagttcgggaaaagatgtgcagaagctgaccctatctccaccatttgatacaatcaatgtaaataacctcaaaagcatagataattgtaaaatgtagtaacataattatgaagcgatgtgtttttagtgtttactgtttttaatttatttaaatgtacgtacatgtatatactttaactgttcata

SEQ ID NO: 219768 - DNA, 714 bp, Homo Sapiens
  misc_feature (633)..(633): n is a, c, g, or t
agagagttgtactaaatagtctccaaggtccctttcaggttaagattctatgatcttaacagacataatatagttgcttttcctaaaagttgaccattccttgagtcaaagtatagaaaattctctaatacttccagtctatcaaaattcagccctctccttccaatttgattcaggtttcagtcaatctgcataaaaattccttcagtatttaggtaccctcattactccaggcctgactacaaacagcttatactccattctctctccattcccaggaaaacaataaacacgctgtcttgtcttctttgccactttgactcagatgagacggttaatgcaagtttgaagcaacttccaggcccatgaagctgtgtttcaaagtgggctatctcagaactgaggatgagatatgccactacagaagaaagaccgtggagcaatgtctattcccagagatccacccaactgttcaggcaaagccgcaccttaagaggagtcaggagtcaaccacagagagagacccaaagagccgctcctgacaggatctttataatcttgttttggcagacaatgggatattttcccctctctccaaaaccattactctctctctttgggggcggggactanggaacaaagtgtgtaaaaacctcatgtcctaaaaccacaagccatttaaaggagatagacagtgaaagcacatactttttg

SEQ ID NO: 219769 - DNA, 603 bp, Homo Sapiens; identical to SEQ ID NO: 50161

SEQ ID NO: 219770 - DNA, 672 bp, Homo Sapiens
cccccaacaatcctctctttccatccatatcccccagtatggaccttccacaactcccagccataagctgaatgtttctctttaaaggatggagaaaacttctgtctgtctctggcaagaattgggggactgttgactgggattgtgggctgggcttggcttctaactgctgtgtgacccaagacagccacttctcctccctaaccttggttatgtcttggcagcacagtgagcaggtcggactaggcgaacagttttggattattgtgtttttagatgtggaattattttttgttatataaactcttatgtgtaaccccaatatagaaactagattaaaagggagtctctctggttgaaaggggagctgagtaccctctggaactggaggcacctctgaaaaaagcaaactgaaaaccagtgccctgggtcactgttactcctataagacagtttaaagtgagacctggaaaaacatttgctttaccttgaatagatagggttttatgttgggatataaagaaataaaactaaccctatttaaaccctgaaaaaaaaaaaaaaaaaaaacctcgaggggggggcccgggtccccaattcgcccttatagggagtgcggattcacaattacggggccggggtttcaaaccttggggacgggaaaaacccggg

SEQ ID NO: 219771 - DNA, 690 bp, Homo Sapiens; identical to SEQ ID NO: 53127
  misc_feature (424)..(424): n is a, c, g, or t
  misc_feature (551)..(552): n is a, c, g, or t
  misc_feature (673)..(673): n is a, c, g, or t

SEQ ID NO: 219772 - DNA, 597 bp, Homo Sapiens; identical to SEQ ID NO: 40518
  misc_feature (379)..(379): n is a, c, g, or t

SEQ ID NO: 219773 - DNA, 704 bp, Homo Sapiens
atgaggttgctttctaacattaccatttcattttggatttcacttcatactttacaatacagcctggaggaacgcctcaacttctagtttctctctccattaagtatctaattatgtgtaaatagaacaactaacgggacgctgggaagcccaggaggcaaacattttgcaaccggaactgttgagtgtgctcggagaggcgagggaggtctatttgctcgtttcctcggattgcttaaatgcgggattccgctatcccaaagcacagagcgtaaagtatcagctccccctgcctgccttcccggcttcttctgttttacaagcaacgataatttcccggcgaaagcgaggcctgggaatcaaatccaaaaagtggttgttccctttaggagaggttagtagctggaaaggagcatgagaaaactggaaggtcccatagactaatgtgttccttttccaaggtttgtacagattcaccgagttgctgcgccttatcatctaagtaatgtctcggttttagaagttgacattgttttgttaattacttctctggtcacatgcatttcatgccgcgcataaggaatcgggtgctgctttatataaatgaatgaaactaagttcctggtttggcccttctacaccctcttccctaccacaggctttgcaaaccccttaagtgacctttgtaaccgaccggggcactt

SEQ ID NO: 219774 - DNA, 684 bp, Homo Sapiens
atctagtaatggtataaagccaaccctgtaatttaaagaattaagatttttatagccaaaataaaataaagctgaatatattaaatattagatttatttaatttagatgtcatatctatttaatttcttttttaaaattaacacattctgggcacaattctcatcacttcataaggaaaaagactaaaaaaatgtaaagtaccggaactcgggaggctaaagtcaccacacagagataccaattctttcctcactagggaatcccataacactttgcgtgtcagtgattgacagctgtcactgaactgattgacaggccgcacagcacaaaactgtaaagtctatccacttgttataaaacagaatacataaaatagttataaaaaaagtgtttagaaaaagaaaatcagttacaaatgcaaatataaatacatttaatttctataaaagcaatcatacaaaatcaaacaatcacttatttacttggttttcttaaataggttattctaaaatcaaaagtagcaaataattcattaacatgattctaattcaacatataaaattatgtagtagaatttgattttacacatttcctctgagaagcataatcattttttaagttaacagtgaaacaattctggaaaactcacttggaagcccaataaaatcgataattaggagggt

SEQ ID NO: 219775 - DNA, 603 bp, Homo Sapiens
aattgtttacaaatgtttattaaatgtcagtaatttttacaaagcaaatattaatagcaagaggcaaatgttttgcaaaatatgtacaaaagtaaaaagctgtaatgaactagcaactcattttataaaatcaaaccattctttccacttttagacctcctttagaaataatttattgcccatcctgaactaaagcactgacaaaaaaatttacaacaattatcagataatgtgcttagttcctggaaagttataaaaagatatatgtaaaaaaaaaatcctaagccacaaatattttatagagctaatacgagtcatgttttgttaggtacagtatctacggggttattacaaaatatacttttttataaggcttcttgtggtaaatgagctctcaccagagtagagtagtttagaaaagccatttcaaacgttttgcgattctgccttcaagtaagaggtaaaaggtaaatggcatagtttgttgcactgttgcttatactgtgcaagaaataatatcttacccttttttttcctagtaccaatcaaacaagcatgaattaaagacaattttttacttactatggcaaaaaaatttattta

SEQ ID NO: 219776 - DNA, 675 bp, Homo Sapiens
ttttcatatattttattttttaaactctcataactttgcaagctagcagtaaaatattgccttcaatattttactaattagcaccgtataccttttaaagctaactggaacattgattcattataaatgattgtaaaataaaatgatcatttcaaatgccaaattaatctcaaataacaagtgaactattattaattttatctctttttttggctctacgcacaaagatgtatttcaaagatgaacttaattatattagtatcagttttgtcaatctagcaaatcaaagtatcacagtttaaagcaatatttaatctctgaaattactagaggcatacaagaaagttaaggaatcagctacaaaaacaaaagatactaaataactgatttatagtcccttattttttaaaagaatgaggaaataactcaatgaaaaattccatggtgccaagtatcagttacacatatggttaagtatacgtcagtattctctgttttgcttatcagagtttggccttaccaaaaaccatcgaaatgtccaggataactcacagggacagctggaagcctgaaataaaattgctcagtgcaaaaagatcccaaaccattcatataattttaaatggaagcctagacatttaatccctatttttaatgttcacatctgaaaaatct

SEQ ID NO: 219777 - DNA, 658 bp, Homo Sapiens
  misc_feature (634)..(634): n is a, c, g, or t
tcagagacaaacactttttaatttcagtaacagtagggaaaaataacagcatccatgcattaaaactaagagccttcacaaagacgtttcaagatgtattttgaacaaaagaggacaggctcttgggacccctctgggtcctgcctcagcacatcgagtcctcaaatccgagtgaggaaagtctggggagctgcactgtggagccatcagaaagtacctggagcggctgctgctgggctggaaaagccgcagaagtcctcggcggtagctgggttgctatggcaacaggagtcccaggctgcccgtgctttctggccacaacctttacctcatcattaatgacttcaaagtgctcctcttcctcttcttcaatgtccaaatcattctgcctaagatatgcttgtaatggtccatacagtctctccttgaaagctaagaaatccatcatgttcccttgaaagtgttgcaagaaaaacagttcaatcaaatactccttgaagacctccttcagagcctgcatcttctggtaatgatagtccaggcactgctttctcatctgtgccatcttccgaaaggctgggggaatctcctctaacttcttgggaaccttctttattcccgggtttccccacanacataagtgggaaggctgtaaaag

SEQ ID NO: 219778 - DNA, 562 bp, Homo Sapiens
attgcttatttttgacttcttaccagaattctcaaggaatcactgaaacgagccatatgcctcccaaggcaatgggactccaggggcactatttcttctcctttcccagaagagaaggaccacgactattacaaggacgtgttaaatcaaggcactgttccttctcctattgacacgagtaatccagtatgtaaagttcagacataaaaaggggcagtaaagaatctgtaactgcagaaagtgctgcctgagcactgtaaatacttttcaagcaccagcctctggctttaccattgaaatttaagaactagaacgatttcttaaagtaagtgtgggtcaaggtcctaaggcagctattccacactggatttaatatattcaaaaggaacgtaaagaacacatgacatgagtcaaaccgaacttcagcactcatgcctgctttcttcctcttcctttactcagcctccttacaaggccgcaaaatcatttccacaaaatggtgaaatagggcagaactgcacaggtctttttatttcatggggaaataccagactgcaaaata

SEQ ID NO: 219779 - DNA, 642 bp, Homo Sapiens
gctactctatactatattcagatttctgtcatttttacctaatgttctttttctgttcctggatcccatcctggatcaggtggtatgcattcttataagtgaaatattaatatatcaaaattactcattttggcaaatcagtatattttctgtatataattatagaaagttcacattgttcttcaaatttacttgtaaaaaattattttccatttggcactaaagtttattctcaaggtgttcaatctatgtcagtttttatttgaagttgtgtgatctctctaaaataaacattagtaattacttacaaaatgctccttagaatctcaatctggtttattgttttaaatcgcaatgttatacttatgtgcaaaaatatacttaaggtatattatggttgtaggttaacaattgcattggcaagattcattttacctgtatgtttttactgaatgatctattttccaacccaaggaaagtatgaatatgtggcatgatgacacaacacctttcctagaaatgtgtttactgactactgagtgtgcctttggtaatcctgtttaaagccatggtaaaattaaaacatggacccaaaattagaaaaggaattaagcccttgctttctggggattaaaactgaat

SEQ ID NO: 219780 - DNA, 628 bp, Homo Sapiens
aagtggtgctgtcgcccaggctggagtgcagtggtgtgatctcggctcactgcaacctccacctcccaggttcaagtaaattctcgggcctcagcctccaaagcagctggaattacaggcatgtgccactacacccagctaaaaatgctggtattcttataggttgattttctactcttaactgctgacccataaaaatttgagttgcaaaatatatctctggtcagttattcattccagggcatatattcaaatgcctactgatatttctacttggatatctctacttggatatctcatgtcatgcgtccaaaactgaaacttgtctcaatcccttttttcctgttttttaatagcaagccataactgaaagccataaaccaggatctcatcatcaacttcttcctctcttatctcagaatcaagatagttatcaagtaagatctttaaaatttcttgaattagcttctcctttatgcccactgtcactaccatcttagttcatgatgttatcttcagcctagattatggcaatagcttactaatgattattcctccatcctaatgataaagggggcttttaaaaatgttactcccctgctagaaatctatggatggttttaagaaa

SEQ ID NO: 219781 - DNA, 620 bp, Homo Sapiens
tgatctgataatagaaatgactaatgggcattataaaatgggtatataatgagtgtatacattgtggatacactggacaaagggatgattcctttcccaggcaggatggagagggatagtgagagatttttattatactatgcagaaaggtttgaagtttaaaacttatgttcgtttctggaattttccatttaatatttttgtattgtggttgaccttggatgactgaaacctcaaaaagtgaaaatgcagataagggggtctactgtacaagcaaaggtgcaattgacatcattgtacaggctatcttgtgaacacatgtatgtttctttaggacattaaaagttggaattgttaggtcacagggtatgtgacttttaaaatttaatgggtgatacacaattgtctttaaaagaggctgtgccaatttgtatgctcactagcaatgtattcctgtttttccacaccctttccagcttttgatttgtatgcacgctaaatattagttggatctgagatggtttcttgtgttttaatgtgcacttcccttattttgctgagattgagcttctctttataacctatttgtaaagttctttgcttatgtgcatttttcaaat

SEQ ID NO: 219782 - DNA, 739 bp, Homo Sapiens
  misc_feature (658)..(658): n is a, c, g, or t
  misc_feature (682)..(682): n is a, c, g, or t
  misc_feature (723)..(723): n is a, c, g, or t
gccctagataggcttagttgtactattcttcaaccggcccttttccctcaaatggggaaaaatcagaaaccagagagggaatggcgtttccactgtttctctctttgtgactttcaaaaccaaggtatttagtactcgatgctgttgggattcacttcttagcttggagcaaggaatcttcattctgtgtgacctaacagttcaaaagctcctatcccctcatgagataccttacgtggaaaagaaaggttggagttctgcatcgtagtcagcactagcaacctgggtcattcatttaaagaactatctttaatatttactctcatgactaattgcccatgtgcatgtgccaaggcaaaacacaaaagtgactgtttccaaatgactgtcttctgcttttaattcctacttgccttcagttctaacacaaggtccatcctcttctttcccaaaggattgatatcattgaggatcagggctgtgatgatgtcaatgccattggattcatgggtggctatgcagttctgagcaaagacacacacagacattcacacaaacgctggtcataaatcagacgtcaaaggccaacaggctgaactgctatttcaacacaatgcttaccactcccagtaatgtctttaggggagagctgcaaatnttccgtgagaaagtgggtagagtnaaaagacggatgaaaaatcttaattttcagaattaacaatnaaaccgggggaaagtc

SEQ ID NO: 219783 - DNA, 565 bp, Homo Sapiens
cctcgcacatgaaatcaactggataaaggcatcaagataaaaaaaccaacatagtaaatcgaatgaaaacaaatactatgtattcaaagtacatagtgtaatctatgaagagctgtttaaataaagtacatacccatagtttggaaataaggtttaaaaagaaaagttgcttataagaccaagaagtctaccaaatcttccagatgctaaaatctaactgatttagcaaatatctgtagagggcctactctggggtgtgctagggtaaaatatgatataatttaattaacataatatgtctgaagggtggtaggcagcaaactccagagcagaaaaattatcaacatcaaaaattaggtatcagcactactcaaagaggggctactctgaatggaaggactgatcttggtcatatagacaaaagtgcacctgcacctgaaaaaaacagagaaggcatcacttctctgtttgtgattgccactgggcaatcacaacttgataaaatctcttttgctttatttcagatcatttattaagcacttgctatgagctagatgcaaaaaat

SEQ ID NO: 219784 - DNA, 557 bp, Homo Sapiens
acactatagaagagctatgacgtctcatgcacgcgtacgtaagcttggatcctctagagcgggcgcctactactactaaattcgcggccgcgtagaccgtttcttccatgtgttacttgagtgaaaatttacgggctacataaatatggctgttgtttggaaagaaaatgttgtgacattagtatgcgcacaagacaatgggaagtacgaactaggattcctgtaaatacgagaaaggaaaagaatgcttttactatgttagaagacttaaaatcacatgaagtgattccagtctttctgttgttattccgatgttttagctattttagattttggggtttggcttttttttgtttcattgcctttctacataattggataaccttgttagtatctgcagaatgccctgattaggaaatgtgttaaccctatgtgtcaatttggtataatttcatattgttttcatattgttttatgtggaggtcttcaataaatgtatattgtatatgtggccgtaaaaaaaaaaaaagttgacgccggtcggaatttaattgtta

SEQ ID NO: 219785 - DNA, 628 bp, Homo Sapiens
gctggtacgcctgcaggtaccggtccggaattcccgggtcgactactactactaaattcgcggccgcgtcgacttttttttttttttttaaagacagtcttaaaaaagattctgttgcccaggctggaatgcagtgatactaacatggctcgcagcagccttgacctcctgggctcaagcgaccctcctgcttcagcctcctaagtggctgagaccacagctaagtgccatgccaggctaattttttttattttttgtagaaacagggtctcggtatgttacccaggctggtcttgacatcctgggctcaacctatcctcctacctctcaaagtgttggaattacaggggtgagccatcacactcaggctgatccatattttcttaattttcagagcctgacattttcttagcaactaattggtagtcataattataggacaagtgataatttgtcaccttttcagatgctatcttctcaatgaactcttctaaacagcatagactaaaacctggccccctaaccgagcattctcaattcccattatcctgcactatctttttcttttctgtcgacgcggccgcgaatttagtagtagtaggcggccgttctagaggatccaagctta

SEQ ID NO: 219786 - DNA, 564 bp, Homo Sapiens
gattcacttaatatttattgagctccagaaatcataaataaaaaaactgatccacttaattacattgaaatgtaaaacactgtacagaaatatttttacaagcagaaattaaagttaaaagacaaacttgggaatacacatagaatacatacgacaaaaaggtaatttctttgatagaccaagggtccccaaatcattcacaccaacattttttaaatgagcaagggaaaaccaataacctgcagttccatttttcactgattagattggtaaggatgaaagagttttaaagtatccagtgggactgagggtgtcaggtaagaaacactcacaggctttgtttataagcgtataaattggggtggtcctttttggagggcaattgatttgcagtatctacacctttttaaacgcaaaaagctttaacctaaaaattccactcttagcaattttacagataaaaacacgcacaaagacccaagaaccaagatgttgcaaccttgtttatagcacactcatcaacaggagaatgcttcaataatgggatatcataaaacaagaaac

SEQ ID NO: 219787 - DNA, 650 bp, Homo Sapiens; identical to SEQ ID NO: 44766
  misc_feature (398)..(398): n is a, c, g, or t
  misc_feature (574)..(574): n is a, c, g, or t

SEQ ID NO: 219788 - DNA, 743 bp, Homo Sapiens
attttctattgcttttttctatggcttcttgctgttgttgtattagggcatacaacacagatcagagactttcatttctcggagaagtttttctccttgagaaattggcactttgatcctcagcttgtgtaacagcttacacatacagatcctaccagcactattaccaaccttgctgcttaggaaattccactgctttggccaaaagagtgccctgtcattaaaatcttcttagatgaactgttcctatcactgaattcttacatttaaacaggtatgtgtgtgtaatttacatacgtgttatatcctaagtttctacacacacacacacacacacacacttagtgtaagtgaaatgtctgtcttgagtaaaaagcagttacaagggtattaaaacaaatgttgaaaaataactattttacatttagaccatacaatttttaaaggtaatgcgatgacatatgacctaagagatcaaatacatcatatatgattgtcatatatgcatgttgtcttaattgactatttttctctttaatcagaaaataaaagagcttacctttgtatactgagatcacagcttacagtcactatatctcagcctattttatacaagtgatatggctacgaaggtccgaggagaacgagaataaagtgagataaacgtgctgaaaactgcttaaaaggtttaccccgaaatccaccgagggtccaacaccagttttaaaattcccttaccgagt

SEQ ID NO: 219789 - DNA, 666 bp, Homo Sapiens; identical to SEQ ID NO: 44483

SEQ ID NO: 219790 - DNA, 692 bp, Homo Sapiens
gctagttgataataagcgaaggctttaaaattttttatttgaaagaatttgttaaattctactatgggtcttggaaataacccatagtagaatttaaaactaagagcatactttccaaaatatggtctgaagaaaacctctatcatatggcaaatgaagcaaactgaaaaagcatgaaaatagaaatcacagaataagaatgatttgcacacaccaagagtttgagaaacatgctctaatgatggaggctggcttaataagatttggggttttcaatgcaatagaattcttgtagtattgtgaagaacaaattccacacgagagattagaagggcacacgtggctagaagatactgttacagaaaaaatgagaagtctggaagattaaaacttgaacattaacagtagaaaggaaggaggcatgataagcacagaaaaggtaaagaactactggaactattctactacaacacatacattagctcatatgcaatcagtaaataagggaattatgtcagtacattcagaaatcacattggttcatttccaatttttcctaaaatgttatttagtttttgcatttgcaggtaacaacagttaaatacagctagccctgagtagtgccaccacttctggtcaccctttactgtttttaaagggaaagttttaaatttaccaaattttttgttaaa

SEQ ID NO: 219791 - DNA, 699 bp, Homo Sapiens
gcgtgcgctgggttggcgggggcagtcctttgaactaagattctctcaggaaccactgcaggaaatgaagtgattcagaactcaccaattatgaactaaccttcaatgccagaggctttaacagtttctaataaaaattcagttcagatctcaagttcagataagtctgaaaaaacacttcaaggtcatctgaacgaacatattctaccagtactttatataattgtatttacctgttcctaaaactttccgtgaaagaaatgttgaattttcttcagaaatagttttgagcaaaatgtcaaaacaattctcccatgctcagtgtacttttgactatactctgaaaatatttcttcttgttttcctgcacttacctgttagtgtgctcacactcctgtattatggaacatgttcagtaactcatacacatgtaacacagaagtctgctttcagttcacttggaccaacgtggtttaactcttgctgcttattaaatgctttgcaagctaatgtaagtacactaacattttataaatgtgatgaaaacttactcatgttggccactttacaaagtagtctatcagtcctcaaatagttaaacatattatccagcaatttcactcctaggtatatacccaagagaaatgcaaacatgtctacacaaatacttgtgcacaaatatttataacactcataata

SEQ ID NO: 219792 - DNA, 703 bp, Homo Sapiens
  misc_feature (1)..(3): n is a, c, g, or t
nnnttgtgactttgtctggcagccactcaagctggagtgcagtggtacaatcacaggtcactgaagcctcaactcttgggttcaaatgatcctcccacctcagcctcgagtagctaggactacaggcatgcaccattatgcccagctaatttttaaagttttttggtagagacagggtctcaccatgttgcccaggctggtctcgaacttctggcctcaagcaatcgtccttacttggcctcccaaagtgctggatttacaggcatgggccacctcacctggtctagggtatctgttttttaatgaacaaactggaaaggaattccttactttcaatattttaacgagaataagatatctcaagttcaatgaagattaaatgttggtggaaggcatttctatactcattatgcccacagcctttagtatgaattatgtaaaaagaaatatttagtatgataataaaagaaagtttagtggcttaaaacaacaaccattttattatatctcatgtttttgtgggtcagaaatttgggcaggggctcagctggtcaattcttccattctacatggcatcagttcaggttaccaagtcgctcactggcatttacctggtggctggtctggtggatccaaaatttcactcaaatgtctggtatcttggtggatgtcaagaaagaaggggtcaaccgggtgcctctcc

SEQ ID NO: 219793 - DNA, 701 bp, Homo Sapiens
gctgggttggtttatgaattaaaagtgaaacatatatttaacactgacacctaagattttgagattataccaattccgtaggtcaacattattggcatgttaagacaccatgataatatttaaaaacttaaaaaaagaaaagtccaccaaatctaagaagcccctttcctctgtaatgtccctctagtgccctctattgacaaagcccaacatgttgttcactgcaaaggtgaaagagtccagctcttcaccagctgaaatacatacttcagaagttatttagtcaaagcagagcaagtacgggagggtgaacttggagccaactaataaactgctaagtggcagggttgtttcactatttgttcctttttattggggggtaatgctccatccagtatatggattttctacattttgtttacatattcagctaatgatggatatctgagttgtttctaagtatcgggtactgtgaataaaactgccaagcacatttgtaaaaaataacaacaaaattatcttttatgtagtccaaaatgctaaaccctcttctatctaatcttccccacaggcttgcagggtacaattcccattctacagacaaggaagctgaggcttaagaaaaattccaaagtgacttgcctaaggccacaaatgctccaaaattccaccttttcccttgggccgaatttttggccttg

SEQ ID NO: 219794 - DNA, 468 bp, Homo Sapiens
cagaggcagggtctcgctttattgcccaggctggtctttaactcctggcctcaagcaatcctcctgccttagcctaccaaagtgctggaattacaggcagtgagccaccgcgcctggccaggactaactcttaaacatgaataagaactaaaagtaagctagatctgattctataataaccttacaaaacaacaaatttacaaaaatgaattcacaaattgagctcatacctacttaaatatatcgttatacttctcagtatttacaatatgtatattcacaaagtaaatgttgttacagacacagaaaaacatcaagcccccctgctgtgtttaaaaataaataaaacctaaatttaaaccgtgtgtctcatgatctatgtgctctgcagtctaatgttccgcatgtctctcagcagcactgttcggtagttttgttccaaaatttccatgtattcaaaataatcat

SEQ ID NO: 219795 - DNA, 603 bp, Homo Sapiens
aagagaatatggaagacataaatctgcaatgaaatcagttatgaaatattaaacctctacttctcaggagtgacactaatcatggtctggaagctagcctatcgcattttaaaacacccttaaatcaatgacgtagaaactttatagtctaagggctgcccaagcaacttgtcaagcaacccgaaaggctgcacctgatttgcaaacacatacacagaacctatttgtttgaaatcgaatatgattaaatgaatgcaatttggcttgtacctgtctttttcttaataaaactaggatggacttatttattaccgaggaaaagaatcaatacacttaaaaagaaaggactgaaagacagcaaagtgtccctccctctgtactctggcctggaacactgagcacttaaaaatttcattgacattctttgcttgttgcctaagagctctcctgagaaggaacatactcatttttccattcctagcatttaacacaggttaacatggcacatggttaactacccaataaatgtttgttgaaaacaaaacatgactgggtccacaatggcaggtctgaaccctgccaatggaacttaatgcaaacaga

SEQ ID NO: 219796 - DNA, 540 bp, Homo Sapiens
cagaatgtgtcaacaaaaaatactttcttaatggcatttgtgttttaagaaaaatcagtcacatagtgtcagtgttaagaaaaggttgtaggtttacaggttgcccccagtggccatactttgaattgtgattctcacgggtttaaagatgtgatttttaaaaaatcagtgttttaccatctagttatttgatcttgtccacttttttgtgttcaacaaaagtgtaaaactggaaagcaaagaaaaaaagactattttcagtaaacatgtagttttgttttgtctttattgatagaatgtaatgggcctttgggatcttaagtactacttatgttacctttgttattcagatgctgaacttaagcagtgaaataatagaaactaaaggatgttattaaggggtttaactattttaagtcaacatttagcttatccatcatattggtttcctgaagatgtcagaatttttcagtgtaagacaaatttcaaaggtaatagatccagtttaaaaggtgaatccacttgatgtattatttggtt

SEQ ID NO: 219797 - DNA, 515 bp, Homo Sapiens
gtttgtatatgtaactgcattatcctaccttaatggccttatcaactgaatatgaaacttctttattttaatgcattttaaaagtaaccctttttttaggtttggttaattcacttttgaaatgcagttcctatgaaatacccagactatttataaaatcctatgcaatgaataacttgtagctaaaatgaaatattttatgtgaagtttttaataacttttaagtagtagcttggttttcatttttccaactaaaacttggaagtgcataaaaaactaagagagtatataaataatgtaaatagagtatcttagttacatggagggaattaatctgttcacctatattatgtaatatggagtttatcatgaacagagtttaacagtctcagtctgagttactctgttaaacttcttttcctaaaaatatcagaaataattacacaaacaggtacagtccagctgtctttgatctctctgttctctacaatgataaaaacttatagtttttcttc

SEQ ID NO: 219798 - DNA, 658 bp, Homo Sapiens
caaagacagagccaaaaaattgatgaagtggaaatgcagcaaagccaactgcatgaacaaagatgctgtcattcaaaaactacaggaaaaggttggcgctttttactctctatagcaatttgttgtaaatagactgatcccatcagagtgaacttcaaatgcctactaatgtcagtaacatcttctgattatctggtgtcttttattcaaggattcagaaggaaattgcaaatacattattttaaggtacttatgcaaggaaaacagctgaggagatgattttatcattcatatttcactaccagcaaaatctattttaaatgtaacaataaaaaatagctaacattatttcattcttactctatgcaggcactgttacaagcatctatgacaggtactactattagcctcattcagaagatgataaaactgaggtgtgaagagaatgcattaacttgtaccaggtaacacagcagcaggtggcacactgcaattcaaatccaggtgctctgaagtaaacaatctctctggtcaacaattagactcaccagaactttattgtaatgtagccttataatatctacaaggggctaagggatcttactccaaataaactatgaggtttttctgagtgagctaaaatttactactcaaaggc

SEQ ID NO: 219799 - DNA, 623 bp, Homo Sapiens
agagatatggtcttgctatgttgcccaagcttccacctcagcatcccaaagtgctaggattataggtgtgagccaccacacctggccagtggcaattttcaaaaatgttttcaagcaagaaaagcctctttaataaagaaaataatgtgtttacacttacctgtaaccattctatctattctgtctccacttctttaactataaaaataaatgtcatcataagctactcttgacccaaggcactcatggctttcaatgctaatggttctgactattctcaggtgaccagaaaatacataacacgtgtcatttctaattctgtgttagcagtgactgaatcgccattaccaggcagtggacaaagtgttaaccacacactccccatttcccattggattatccttcggtcctcacaagttgacagtggatacaattactccccttttatgtatagagaaagttagcctgtgaagttataacatataccagtggaattacaggaaggctgaagttcaaggtctcaccatatccccttttgaatatcaagaaactgctacatcagaaagttgttggaaaaaaaattgacaaaagggattttttagaaattatcaaaatatctattt

SEQ ID NO: 219800 - DNA, 670 bp, Homo Sapiens
  misc_feature (600)..(600): n is a, c, g, or t
attattagtaaaatatttttgtgtccaatggagaagataaggcatgaacctaaataccataaaactcagaacaaagtacctaacgcaatccccggtgctgagcagaaacttggtaaataatttctgaactactgaaagtggcaactgactgtaccatagatatggtccaccccactcccgccatcgctcctccctggctttggtgatcacacctgagagcatgtcataaacttatctgtttgctcactgcttatttgccccactagagcaaaagtttggtgacagcaggaactttgtcatattctccacactatcccccgaattttgcacagtatctggcaaacggtcggtgcttgtttggtgaataaatgaatgagtgaatgtctagcacaacatgcaacagatgtatgtgctccacaagtttctgctaatttattattgttggaaggggcttaaccaaagaaaaggtaagtgctgtggaaatccaaagaagtatgactgtttccacaaaggggcagggacagcttcgtggaaaagataatgatgaagctgggctttcaaagagggtctgttgtgtacagagaaaggaagggcatgcanagaaggaaatctgcaaaaagacagtttctcaaagagggtgagcttcagtttcaggcagcaaaaactagaa

SEQ ID NO: 219801 - DNA, 734 bp, Homo Sapiens
aaaatcccaatgatcaagcaagcaaaaggagcagctttgtttttaactattgtccactacaattccactctgagcccgtacttctttttgttggggaatccccctccccaattaattaagtttaattaaggtgagtctaagttcaaaatgtaacttagtggaataggagtacagtaggaatattttattcatacctaatggcaaatgtgtgagacactactaaaatactaagtattcaaatcaagtaattccagcagccactcaaaaattaatccttacctgctgtggtcttgttaaacagtatgaaaacttatacaacagaaactagtgccagacaaaatgttttcttgtttttctaaaaggggtggatgtaaggtagagccaaagttgccagccctactaaccttacagcttccttaattatgacaatcacaatgcctgcctgaattatcaagtcccaaaagttgtcttctgtgagggcagttggcatccactttgactcaacttcatctactacttaaggaaggttgagtcagagttaattatatgaatataatttgctccactcataattcaaccacactatggaccccagaagcatttagaaaaaaaggttttttctagagcttaattacgttggatgcatgcaaaaattacccttaaattttttaaatggtacaaccactttggcccttagcttcaaattcggaacttatgaccttagtttattttgc

SEQ ID NO: 219802 - DNA, 634 bp, Homo Sapiens
aaatgacagacataaactaaattgtaaaagctagtttgtcaactatcaattttgagttccatatatataaaaatcatgacttaaagataatcttaccaatactagaaatcaagaaatacatcaaataaaaggaaactctaaaattccatcttaacttataaatcactttgcacattttacttacaaagtaagattttccttatttttttcttcatcttgattccacgctatcaactataagttgcatatgtttgcactgtatttttattaggtggctcaagtccattgtggtacaaagtaaaatataaatgattaagacaaaatgcaaagaaatagcaaaattaattttacagaaaatttcttctagtttaaattgtttttttaaaaggccactacaatatgcttcaaaaaaaatcccatatgcctccacccattatgtatgttttgtctcttaacatttcactgtttccatgcaatgctaaattaaaacaatcagatcagcactgaaaaacacacacaagaactttaggcctagactcaggcatagtgacatcaagttttaagtgtaaatatggcattaagaattcaacagtttttcttcattagagcttttcttcttttggtctgggagagt

SEQ ID NO: 219803 - DNA, 633 bp, Homo Sapiens
ttctgagccaccaacgtaatttatgtctaagaagatactctagagatatggcggcaataataaaatcaaaatttttcttataggccaggcagggtggcttatgcctataatcccagcactttgggaggccgaggtgggcagattacttgagcccaggagttcaagtgctcctgagcaaggagttcaagtgcagcctaagcgacatggtgaaaccccatcactaaaaaaaataaaaaatttttctaatcaactccacaaccttttacatattaaacatacaatgctcaaaaaagattcttcaagtttgtttagatgtctaacttaaaattttctagtaaatgtaagggctagtactgttcctgtacccctaaaggtaatttacctacattcccacaggaaccactgaaagaaccccaacttggagtactgcaacccaaatgttccaagaacatccataattaaatcttcccaagacacatataccttaaacaccttctcatggaatgtcatgaaattcttgaaccccctttccaccccctaaccctaactttgtcccattttcctccttttattagttcccggaaaaaaacagcatttgagggccacaggaccccaccaccccttgtttaggga

SEQ ID NO: 219804 - DNA, 523 bp, Homo Sapiens; identical to SEQ ID NO: 49402

SEQ ID NO: 219805 - DNA, 592 bp, Homo Sapiens
  misc_feature (1)..(4): n is a, c, g, or t
nnnnggcccattcaatgattatttattaagcatcaacaaatacaatgatgactactcttttatggagactatatcccatggaagtaaacagataataaataaatatactatgaatacaaacacgtacacacagtttcctggagatgttcagtcagcaattagattaagcaactgaggctctgtagagacaagtgaggggctaaaaatatagatttgaggaaaaatgcaaaggagagagtacattccctcatataaaattgtttctcctggtgaggtttcctgcaattttggcacgaggcatgcattcgttttcaggtctatcggttatttactggggtaatactgtagatcggcagattactgcagaatccaatggactgaagccataagcattcacataaggcctttgagggtcagggatttggcttggctctgctggggggtccttctgctccagtctgttccgcccgtctttgttgcctccttggtacaaatacctgaatgggtgcccccaagggttttaaggtgaaaaggtaagcttcctgtgtctgggggttaaaatcctaaaaagaaaaaccccttgttttttgag

SEQ ID NO: 219806 - DNA, 555 bp, Homo Sapiens
tcatatagtctagtctttattgaaagacttacttcaactgttgtttacagctttggcttaagttggccattttagcctctcactgccagcagacataaaaatcaagtgggaatggcacgggggttgggagtgaaaatactagtagagaaattatgagaacaaagaatatggcagtcagtcagaaacacatcaccaaaataaatctcaaaataattatgaaataaaaaacatttccttgcatgcccaaaaagtctctgctgatgtttttgatgaacggggtggggagcaacgattcttaggcttaagttggatcaagatagcattgggtcatgttataaaatcattttgtagctcaacagccatacttttaattaattcatttattttttgagatggaggctcgcccctgcgcccaagcctggagtgcagtggcgcaccttttagcttaccgcaaccttcaccttccagggttaaatttttcttcttaaacctcccaagtcactgggaacccccaatgcccaccatcacgccccaggtaaatttgtttccttgggc

SEQ ID NO: 219807 - DNA, 651 bp, Homo Sapiens; identical to SEQ ID NO: 50459

SEQ ID NO: 219808 - DNA, 752 bp, Homo Sapiens; identical to SEQ ID NO: 49008
  misc_feature (669)..(669): n is a, c, g, or t

SEQ ID NO: 219809 - DNA, 645 bp, Homo Sapiens
gctggtacgcctgcaggtaccggtccggaattcccgggtctactactactaaattcgcggccgcgtcgacttttttttttttttttgctttgtaaatcagatttaataattaggaatagtgctagtctattaaaaacaaaagactgtaacaattcagcaaacaatagattatagaaactgtgaaattgacaaataatatacaattcagagaaacgtaagaaaggtgatttaaaatggcaaaattggcaaatttataagcaggaaaagaagaggctttttagtgaacaaccattttcaatttctggaatacagggaaatgttttggaatttcaaaataactcattgtaagatgaagatttaaaacagcaagaaaaacataatgacctgtcactactgttcactgctgcgaagaattctactgaagtgttaataaacatcatcagttaggtaatctcagacttgaattgtggtgcaagtcgcaagtatacagtgaaaatgtctgtctctgaagtaaaacaaaacaaaagtcgacgcggccgcgaatttagtagtagtaggcggcccgctcttaaggatccaagactttacgtacgcgtgcatgcgacgtcatagctctttcttatgtgtcacctaaaattcaattca

SEQ ID NO: 219810 - DNA, 553 bp, Homo Sapiens
  misc_feature (16)..(16): n is a, c, g, or t
gaaatatgagtaagtncgtgggagtagatatgaaacagggttataagcacatctcagtgtctaattttacagaataaatacttctattctatcgcagctcacatgtaaatccaggtaggtatgtccctatcccacttagaataaaatgaacagccaagtggccaaagtttccataactttcctccttgctgacaaatccaacccgaagtctgtgcctcctagggaaaggacaggacaaaggtacaattcagttcctaaagttatttctccctctgggagagaaaggcactgtcaaagtacaaacccaagtcagcgtgctttgaaagatcatgtcacttgtttgtaataggaaatcatgtcatccagagttttgaaagtaactgtgggggcttgtggtgggttgtcgggggcaggagtgggtgacgtatgttcagggctaggtccgtggctctggtcagggcactgccctgggtcactctgtgctggcccaggtctgctccatgcctggctgctggaaaaaccagttctcttctgacccacaaagtaatctgac

SEQ ID NO: 219811 - DNA, 732 bp, Homo Sapiens
aatgaacaaatgttttattggcatgttcattgttgtaaacagcatctggcatgaaaaagttttaccaaaaccttttttattgatttttataaattagatggtatgtcaaaatttatgtagaattgtgttcattgagtacttttatttagcaaagcaaaaacttgctgatactaataaactctgcaatgaaatcatgttgactgcatcagtctgtaccatgacctgacctcattagcaagtttattcagaacaatgttaagacgtttcccaaaagttaaactacatgtaactacaaattgactctaaaaattaaaactggacttacaagcattctagaagattcaaacttgaagtaaatcttcaaaactagatgtacaaagagaaaaaaattgaagccgctgaacagagaaacctcattaacaagggcaacgacaatcctatgggacctagcactgaggaacctcactgaggattacatttacatagattgctatacttctcaatgtacacaaatgtacagaatgaatgatacgtgaaaagaataatcatggcagatagttgaactgcaattatgataactcaacaggatcaattttatttacatgctgaataaatgaatgaaacatattctctacatccataacttaagtaccaatagttataattacaacacttgcacaatctgagctgccacctgctggggatcggtctaagggaaaacgttctgatgtt

SEQ ID NO: 219812 - DNA, 539 bp, Homo Sapiens
gtatagacaagaaattattttagtcctttagtacaggctgtttcctccttcacccccagaacaaaaatcgaacttctggttggacagcgtcagatgtcactgaggtgaccccagcctgtttgcagttccaagtcttccgtgtaggcgtcactgctactggaactttgtagatgaggagcctgtatgatgatgtcctgaacatttctatcctttcctcacacagagggaagctactgggaatatcacagacaagctattattaaacaagtgtctttagtccaagacatctcctgtggcagggaaatgagggggcaggctgtatcagtgatatttttataaactctggttttagaaaaaattcttcagatggacgcattattttaagactttaacattttccaaaaccaactgaatcttatcccctccatttatccccctccagacacttctaatcaagggcaccatctcccttgtgcccaattcttggcctcgagggccaaatttccctatagggaaggcggtttaaattccgaatcatt

SEQ ID NO: 219813 - DNA, 591 bp, Homo Sapiens; identical to SEQ ID NO: 45165

SEQ ID NO: 219814 - DNA, 549 bp, Homo Sapiens
ttgaatttaggtgacactatagaagagctatgacgtcgcatgcacgcgtacgtaagcttggatcctctagagcggccgcctactactactaaattcgcggccgcgtcgactttttttttttttgcagagatggggttttgccatgttgcccaggcaggtctctgactagtgagctcaagcaatctacctgcctcagccacccaaagtgctgcgattacaggtatgagccactgcacctggccaacactgttgtactttttaatttttacttgatggcagaaatgattatgttgttaaatgtttcttctaaatttttttttcaattttgaaggatatcaatgttttaatgacaaattagccttcatgctaattcatcttggggaattctagtaacagtcctaatttctgggaattctggaaacatcttataatattttcctgacacatacacaagactactatctctccccactcagagaaacatacacatgcaaaaaactattttaatataaatatggaaaataaaaacaaacttttcaccatatcaat

SEQ ID NO: 219815 - DNA, 672 bp, Homo Sapiens
attcataaagaggtttaattggctcacagttctgcaggctgcacagcaagcatgatgctggcatctgctcagcttctagggaggcttcaggaaacttacaatcatggtggaaggcaaagggggagtgagcactttacacggccagagcagaaggaaggtggggggaggtgtcacatatttttaaacaaccagatctcacaagaactcactatcatgacaacaaagggcggatgttgttaaatcatgagaaaactcccccatgaaccaatctttccaccaggtcccacctccagcattggggattacatttcaacatgagatttgggtggggacacagaggcaaaccatatcacatggcttgtgcacatttggagcagtactagtctccatgaagtctacatatggattcagctttccttgtatagcttccacacacatgcatacacacccacagacacacacaaatgctaacacacacggcgagaaaaaagatgacttgggactcttagaggaacaatttttctgttatcactgtcctttttactttgctaagatcttaccgtgttagaggtggaagaagaaagagagatccttcaatgtctctgacccctccccgtcattttaagcgcatgtagaagagagaacatgatgtgcccaaatgccacacaactt

SEQ ID NO: 219816 - DNA, 574 bp, Homo Sapiens
cagtaaaatgttttaatgtaggaagcacgaaagtctttgttccaacaaaattaactcagagaacaaattattttacatatgtatacagatcaatcaacaaaagtacacattataacaattgctaaacactgtccataaagaaaacatttcaaatgagaagcgccatcgcggttttctccttctgggtcacccagtggaatgagggccctcgccaggggctcttcccagacgtctcttcacaccaaccggcttccttctgatggccccattttcctttaaaaccagttctcatcaaatagggtgttttatgcaccctggcaaatgatcattttgacaaggattaaaactgtaagctaaacagatgacacaaatgacaattgggaataatttttagtggggacagaggctaaatactaccccctccccttttctacttctaaccaatatcttgagcattcagtgggacaatacaggcttgccttgtgccgaattctttggcctcgagggcccaaatttccctataagtgaggtcgaattaaaatcccgtaaattaattggttccaatttttaaaaa

SEQ ID NO: 219817 - DNA, 604 bp, Homo Sapiens
gtccgtaagcttggatcctctagagcggccgcctactactactaaattcgcggccgcgtcgactttttttttttttttttaaatctgtaagcttccttgtttctcacacctactcatgattcttggagctgtctccggaaacagaatattttccctctccttcctaagtgctcagctcccccattgtgtagccccgggacatcagaagttgttttctaaggtgtgttttttccaccctcccttatttcttttcccatgatttttttattaccaatccctccatgagagagacctatcctaggagtcttccatcttgcctgatagaagttttctctggcatattccaaattcagattgctccaaaaccaggtgaagtctgttgctagttggacagtcggtatggcctggaggagaagggctgtttgtatttccatgcatcctcctttgtcctcttgccctgggtgaagcaatgacgtctctgtctcctctagtgcgttttaaaatagaaccgcaagaatacaagagaatggggtttccccacaatcataattcctggagcttgggtaactcctgttcccgaaggttcaggttgaaatgactcaac

SEQ ID NO: 219818 - DNA, 592 bp, Homo Sapiens; identical to SEQ ID NO: 60505

SEQ ID NO: 219819 - DNA, 625 bp, Homo Sapiens
ttgaatttaggtgacactatagaagagctatgacgtcgcatgcacgcgtacgtaagcttggatcctctagagcggccgcctactactactaaattcgcggccgcgtcgacttttttttttttttttttacagcttcctctttgccccttcattgccctcaaaaagaggcccatctgcaggactcttatgcctcatcctatcttagctcaaaggtggaaatctgcacacagcctagaagggataccagatcttagtactgacaggcctcttcccagggttggggttgttccttctgcctgaaatcacaagcttcctggggcggagctcccgcctaagtgcaggcactgagggccgcctacgtgagcctcacggtcactcaccgggtgcgttatctgaaggactggaaggacatcacacccaattatttccccaaataattaccaaggactccaacattttgctactaaaaatgcattcctttgatctgtccacccaatgtcaagctctttcaaaagtaaatgctcctgggagaggcattcatgctatagtgttatgacttacaattcagactatagccttaatgacttattagggctatgtttttctcattccccttgaaaggcga

SEQ ID NO: 219820 - DNA, 595 bp, Homo Sapiens; identical to SEQ ID NO: 49898

SEQ ID NO: 219821 - DNA, 651 bp, Homo Sapiens; identical to SEQ ID NO: 61608

SEQ ID NO: 219822 - DNA, 640 bp, Homo Sapiens
  misc_feature (556)..(556): n is a, c, g, or t
tagagacaaggtctcactatattgcccaggctagtctcttaactcctgggctcaagcaatcctcctgccccggcctcccaaagtgctaggattataggcatgagccaccacacctggccacaaatgcattcttaagacaactgatgctgtgaaagactctacctctcttcccaaagagagggaccacatggccccaccaatgagggacgctgcctctttggggatttctctctgccctcttcaaagtactgtctcactaggaaaataatagcaaagaatgagacaactagttcctgccaagctagacagacagtgttgtagacaagacattgcctgagaccccacagaatgactgcctcctggtggtccagctcctagagatacaatgaaataaactttatacccagtaaggataattcttaaaggctgtgatctcagagcagaaccttcaaagacattccatagtcatctgacctccagcaggtaaagctttgtccatgggtgctaagctcaggaggccagaccaaccaagtgctgccctgctaaccactgcctncacttctgtctttggggttcatgctggctactagcactaataagagatgaccaatgatcaaaaaggaaaggaaaagttggtgca

SEQ ID NO: 219823 - DNA, 772 bp, Homo Sapiens
  misc_feature (762)..(762): n is a, c, g, or t
acaatcacactcaattaagggcacaatttttggtctgtagttttggctttccaaatactttccaaatgtcaaagacgtgaattaaaggacaaaaggaggatgataaatgtcttcctcagctgaagcaggaggcactcttttctaacacttattatggctacctccgtgactcacctcctctctgaaaagggtaaaccaggtgtgagctttgtgcccaggggaaggtcgagcaggatggtgtcttatataaatacaaaatgctgcttaaaactatttgtagaatgactactgtacaaagctgttttctttacaaattcaaactaatgcttatttggaacaacgtatctggcacccaaggatagagaataatttggacctatcagttctcaaaggaacctactctgccttctacagccagttccaagatccattaacagatggcttctggcagattccacagaccagagggaaagaggcaatctctaagaatctggatctctgtcatgcataataaaatctttcttttttattgtaagtgcagacagtgaaaggctgaatgcacttcagccaggtctttaaatagatttttattcaacataaacaacctaacaccaactaaatctgcatgctttctctgaaagatagctacttcagtccacaaaaggggacgttttgtcaagcctctcagcttgcattaagttcattaaataaacctaatcacacaacacacagcatatgtgggtataagaactaaatgtgggnttcctttaac

SEQ ID NO: 219824 - DNA, 585 bp, Homo Sapiens
atattaaatcttcagaccctggtaggtatttactcaccgcacacctcaactctggattagccacatatcaagtgctcacagccacacatactcatggctcatggttacagtgctgggcagtgcagctcgaaagcatgacaggcttttgctaaccacaagccttcagccacacagtcctttttcccttcccacctccttttcgttatccccctcttcatccagattcctcaaggtccaactcaagtagaacctcttgagaaaggcctatcccagcaactccagctcttaatgatcctgacgcactacaataaaactgaatgcaaactgtgggcaatgagtatgggaggcctattacagaaaaaagttcaagacagaaacactcaaggaattgaccttttcggattacaaatatgtataaatgtaatgctatcatttgtaataaagagacaaaataactaaatgtcggctgggctcagtggctcatgcctgtaatcccagcacttttgggagatgggtggagcccttgagcccaggaattcaagttgcagtgagcagagaagacatcactgcactccagcctgggca

SEQ ID NO: 219825 - DNA, 532 bp, Homo Sapiens
gggcacaaataaataatctttaatttcaataaatagctccccatcacaccagacattatgctggggaaaaagatacagaagcatcccacagagagagaggaaagagagagagagaaagagagagagagagagatctattctaactacactaattccttagcacgagagacgtgacattcgttcacagaaaaacacagaaagatcctcagagtatgattaaggaagaagatcatcatggatggggggtgatagccattttaatccatatatcaaggctttgtatgtctttcgggggtcacaatcaccatgattcggtcaaaaaatgttacttttggtctatcatatcctatttacttgagacacacacacacacacacacacacacacacacactacttttatccaaagtgggatctttgacagacaggaagacactggttggactctcactgggcaggaaaggcaaaaagaaagcagtgctcaaggctgagggcctggccccatgccatgcttttcaaagaggacacatagg

SEQ ID NO: 219826 - DNA, 578 bp, Homo Sapiens
aatgaagtttttaatgttatatgttggataaaattaatgcattaatttattattatgaaatcaaaacaaccctaccttaccccgaaaataacacctgtaggtttttgtcagttgtcagatgggcatcttgctatgttgcccaggccggtttcaaactcttggagctcaagctaccttctgcctcagcctctagagcagctaagactacaagtgtgcaccaccatgtccagcttaggtgtcagtttgatatgagtcagtagcataagtagtaaagaaaacctaagggggccttgggctctcctacggtccaggtctacaagcaagcaggtaatggtttagttctatttggcttggtgaggccacatctggaccaaagttagacaggcacactgacacatttgagctcatccagagagtagacaaggtgatgccaggagtccacactatgtcaaggaggactagctaaagggagggaaaatgtttaggctattagatgtagaaaagagttggccttaaactcttgacgtttttatgagggtgaagatagtagaatttaagacactgaagtttttaagaag

SEQ ID NO: 219827 - DNA, 542 bp, Homo Sapiens
acggagtctgtctctgtcgcccaggatggagtacagtggcacaatctcagctcactgcaatctctgcctcccaggttcaagcaattctcctgccttagcctcccaagtagctgaagtctttatctcctaccttgatctctgtagcagaaaagaacagtatagatatcaattgtcatcaacagatgcaacatatcttgtaaatcaatatattttcaagtgaggtctctgaatcacctgcactgaaatcatctgtgatgcttatcaagcatgcagattctcaggacccttcactgacttcataaatcttcatctctggaggtgagaccctggacactgtatatgcaacgagcacaccaccaatcctggatgagccccgctttttctctgtgccagaaccttaatgccacgcagcattacattaagtcacattacaactttggtcaatggaaacacagggctttttctgacaaaatgccatcaagccaggtttgcttcccacttaaagtcaaatattaatcatttattttctgagcctaaaagcc

SEQ ID NO: 219828 - DNA, 541 bp, Homo Sapiens
taaatattttcaacccacagttgaatgaatgagaggatgtgaaacccacagatatagagggccaactgtattgtatatttgaaaattgcagagagagattttaaatattcataccaccaaaaagtgaagtgatggatatgttaattagcctggtttaatcacatgtatcaaaaaaatcatacagtaccctgtaaatccacagtgatttgtcaattaaaaataattaatgagttcaaaattcttttgaagtgtaacatccttaactttttcttgttcaaataaagttttctttttatttttttaattgttttaaaaactcatctcttaacttccattaactcagtggattcaccctattaacttaaggactcttttctttcttaagttaaacatttcatgataatcaggaagggcaaggttatgttgcaataagatcttaacccacagtaaaaagtagatcttaacccacagtaaaaaatggatcttagtggcttaactcaataaggagactttattccacaattattcaaatgactcaaat

SEQ ID NO: 219829 - DNA, 503 bp, Homo Sapiens
aaaagaaactattcctgcttttttaaaaagctataaaagcccatattatagaaatttggaaaagtggtcaaattatatacttatgcataatttttttattttactttcaataagaattacaattcaaagataaacgagaacccctgcagaattaacagtaaaatgaagatacaacaaagacagaaattgaaaaggtactctggtaaagtcaaaacactcccgtagacaaatgctcacatactttcaactaatagtagtatgttatttaaagaaaaacaaaaaagatacaatgtaggtggtcaataaatgtttgttgggcaaacggatgaatggatgattgtaataagaacaatctatatgaatgtcaaaaaagtatgtattttcctgcatgtattggagaggaaaagaacagaaaaacaaggttactttaagtacagataaaccacttgggggctttttccgaattaaaattcacattaacatacttttaaaggggactttta

SEQ ID NO: 219830 - DNA, 540 bp, Homo Sapiens
catagaaaaaaatgtatatttatatccctaaaaggcaatacagaatttataaccaaaccatgtgtgagaactgttaaattacattccaaataccagcagtggaacaaacagaaacacagagatgttttaaaaaacatgcagcacgttacaaagaggccgtgtaataattcacaacttttgttagcagccgttaagtttgattagtattaagcagcaatggtttaagcaattttaaatcatgatatgatagttacatatatgcattttactgttccaattatagtttagtaataggtcaggggtttgagcaacattttaagcattataattttctcctaaattatttactatgggaaattggcttccacttaaggttttcatagaaactgatggttattttatgagggagatgtctggacgtatgtgtgtatgtgcatgtgtgtgtgtggaaaaccccccacgttaaaatctgttgtgtgttatcacttcgtcgatattgcttcatcaaaatttcgtatgttcattattcggcgctaaatt

SEQ ID NO: 219831 - DNA, 541 bp, Homo Sapiens
acatggaaaagcttgtgatataatgttcatggcttaaacaatgtaatgataacaatataaagtatatattcatgtaaacaaaaaccagtcatacaaaaatgaaaagttattgttgttaacattgattattaatttttaaccttattgagatgttatctttttaattaaacagcaataggagttatttattaatcataccaatttcttttctaagttccagtagatagtgctactaaatccatttggaacactaaaaagaagacttgtgggttttatccgagttaggtatcctgataaatcattaccactttggtgattcacagaatacttcaaggtaccttccaaggaggtctaaaacaataggaaatcagttatgaaattaaaaacaccaagcagtttttactttttttcttcttaggggtatattttggctattacaccatttccaactcattttcactaccaattttcttcaaacaccttttaaaacgtgaaaggcactattagtttttaccaccacatttttttattcccaaaaatg

SEQ ID NO: 219832 - DNA, 605 bp, Homo Sapiens
acgctattataaatgttttatgaatttaattttccaattatttgctgctggtgcttttttgtaaattgaccttgtattcttcactagaggggagaagaatcacctaccttttggatgcctcccactctacttgtctccctgaggtgatatggaccttaagtccacgatggtgacctaaactcagttaaaaattcttgcctagcagcaccaaagagtggtatgtgattccatgttttctcccatttacctttgcctacacccttcctttaaaaaaaaaaaagactccgtagaattgtagggaacaaagtaaaaatgggaccatttctagaaattgagaactcagagtcatatagaatcctgagtgatacgtagggtatttaataatatgggagtatatttaacccttccacttatacagaatcttataatttagaaataatttgtaacatatcaactcacttgatctttgcaataattttatgaggtaattgagataggcattactctcctcatattaaagatgttgaaccaatgatcagagagcttaagtgacttgtacaaggtcacacagtgaaatagaaagtgactcaggatttgaaactaga

SEQ ID NO: 219833 - DNA, 619 bp, Homo Sapiens
  misc_feature (561)..(562): n is a, c, g, or t
taagcttcaagtgctgaaaagcaaaaaatacaagatggtttctctaaaagaatcatttttgagaagtcacgggaggtgtcagtctcttaccaacatttagataaataaattgtacattataaaccattactgatgacgcttatgcaaggatataactatgtaaggattttaagcagtaaaaaataccgtaaatcaagacaatgttttaaccaaactgtttccaaccatgttaagttacagttgtacactaaaataataattattcatgtttgagaattagagatcttcacaaaaatacttcaaatatattcacagctggacaaaaaaatttcaccttacactgttaccatggagaaaaggttctacatttggtgtaactcctgtagcactgacaatgaaatcgcagccatatatcttttcattggtcaattccacatagacaggccacatctctttaagaaaaaaaaaccaaaaaaacagactttatttgtaaatggaaccatcaccacagcagtgtatgtgactacaatgacttgaaacaaagaaagaaaaagaaaggcnngagataactttgtaacacactccttagcatttattatgaggcatatttgctaaagca

SEQ ID NO: 219834 - DNA, 532 bp, Homo Sapiens
aactcctcaaactaccttcccacaaagccatttaagttaaatggtacatttacagactcacctacatgaaggatataacttaaaacatctgcttagacacatacgttctgttcagatataaaaaatgtggcaaaaatttttaaaaatataggaccactatattcttaaaatgtgtgttcttctgtgtgtgtgtgttcattcattcaagagatctttgactgcaattaggtagtcggtcctataaaggcttccttgtgtgacgataatttctaaaagtaaaatgctccagtgaatatttctgctaaataatcatatcttaaaattactttaaagaaattccaatccctcatgttacattaagcaataatgccagttttccataatatgccttagttgtaccaccttattcagggtcgacaattaattagaagacaaaaagtataaattcgcgtgtttattaagtagcaaaacaaatttctttggctgtctcaacatatttacattaatgtgtttaattttctaattttgaaaa

SEQ ID NO: 219835 - DNA, 524 bp, Homo Sapiens
agacagggtcttgttctgtcacccaggctggagtgcagtggggagatcacagcttactggaggcttcaaactcctggactcaagtgatcctccccactaagtagctcctgagtagctgggactacaggcatgcaccaccacacctggctaattttttgtccagatgagattttgccatgttgcccaggctggccttgaactcctggactcaatccatccacctgccttggtctcccaaagtgctgggattacaggaatgagccacggtgcctggcctataattcctaatggatttatagggcatactctgtaagtacaggctggacctgctgccctcagtctgtactttcttagtttatgagatagagcacagataagcacacattgaaataataatccattaccaaggattatcgaggacttggtacatgtaaagcacatgaaggcactgtgttaggggccgaggaagaggtgaagaagcagacattggcctctgccctctcagaatttataacagggaagaa

SEQ ID NO: 219836 - DNA, 610 bp, Homo Sapiens
cagtcttactgtgctatgtcctttcagttcccatacaaaataaagccccatccagctgctggcttgaaattcccacattaccttgatatcactctccatggtcagggtgaagcttagataattttcaccatagctgtcaatgtggatatctggtggtgggatcactgaaaacaaaaaggaattcaaaaacagaagccacgtgatgaaaagtgaggaaggcaggacttaatagttttcaactcaacggacaaagccatctttcagtcggggaagaaagggtatttctttggcagtgttcctcatcgatctttttttaccactgttttcctgaagctaaggttggtccacagttgcttggtgaacacaaaactatcttggctcagtcggctatcctggcaattaggtcaggcagaaaagttccattttgtaaaggtcccaaaacagcccagcttcagcctggttcttaaaggaacagggatcattcactgcgagtggcatcttgattggcactaacaaagtcccaccaatctcaagtcctttcggaagggctgaaaatggagtaaatcgtaaatggtaaacgtgcgtgttgcaaaaatggaaagattgtggc

SEQ ID NO: 219837 - DNA, 613 bp, Homo Sapiens
tgtattcaaatatttttattctgtgaacattgaaaatgccttctaggaatatggcattgcggggtgtatacaaaaaaatagatcttttctcaaaaagcatgtaatctgcttgggaagacaagaacattattaaaaaaaaccctttagaacacaagtgagttgtggacagtaatacatataaataatctgaatggcagtatataataactgataactatctacaaccaaaaccagcctagaacaaaagcatgagtaagaggctttagggtacacttctgagcattttcttttaattctcaagacatttgtccttgttttcctaatctttaggtggattcatacatttgtatttcctacctggtatttcctctgaattactgacttgtaattcaaacaccacatctgctcccaaccacttcctaccacttccactgctacctgaattattgttatagcctaactggtcttcctgctctcacctttgctcccctaaagtctattcacaataaccagtttaaactattatttattaggaaaaatttcaaacacacagcaaaattgaaaagattttacagcaatcacttctgcatccaccacttattttctaccatta

SEQ ID NO: 219838 - DNA, 638 bp, Homo Sapiens
tattttaataattagaaacgtaattaatttttggacacaggagtcattacagtaatcaaaaatggtaattgcttaaaataatttttcttcaaatggaaaacaaaacccagatagagttaagaaacacctctccagcctacttacttagaatagctagacctgcttctttggcttcaacataatggatccttatagatcaggttccgccttcaactcttaattttaaatttttttccaatatcctcatgcaacattccttatacaaaacaagaactaaaagcataggtataaggcatgtaagaaactttaaccacttccttctgaatcttgctaatcatgtgcaatatgccttttgagagtaccttttgttttaaggaaattaaaaaaaaaaataggcagcagcgatgaagaccattaacacaaccacaagttagcccttacccttaaaggattaagatcaagacagaacctatgggaaacagctcatttgcataaaattgtagaaagtaagagagaaatcaagttaaatgagggatatgctcaagtatttaggggtgaaatacacagatgtccacaacttaatttgaaattcattcaaaaaaaaatggattaacggattagggtacagaccagatagg

SEQ ID NO: 219839 - DNA, 617 bp, Homo Sapiens
gttcttggtcattaacatgccaaaaaagaggcaaatggaaatatatttttgaaacatatatagtttttccagacaaaatagagatccacttcaaactatagctataacctctaagtaggtatgtcatggacattcaggtttattcaaatatactcataaaaagccaactgaaaaagtcaacaattcctcaagtccaatacaatcttcctccatggaaggaactagttttcagaactagtctctgaagcataaattctctgaaaagccatgacaaaaaaatgaatacttctggtaatagtttcggtatattcttgtccacctctataatgcaggagagacccttttccccatgccaaacagcagaaaatgcccatccttatctagagaatccttcaggacctaccacctctagcttcatccttgaaaaactatttcagagggaaaagcacctctaccacaggaagcaccaaattagtgtatctagcagcaacttttctgtaatgtaatttttcatcatcttttttctccaatgaaagttgacagcctccctaaaattcttaattacacgtactttgaaaaaatattctccttttcatttaaacaaatagctatgataa

SEQ ID NO: 219840 - DNA, 634 bp, Homo Sapiens
aaaaaaagtaatactggttttgtgggaatgaaagcagtgatttccagcagctgcagtgaagacattccagaagactggaggcccacaactgaaattcttactggctgggatgagaggatggtggtgtgggcattcaacatgaaaacaaacaaacagaaaacaaaaacaaaaaaagaaagacaaaaggacaaattaacatcctaagctaaaaacctcagaagtcaaaaagatttggaggaaagagcacaaaaaaaaagaccaaaagtccaggagatatcctcttaaatctgatcccttagctgtgaactccccacaaagcatgaacggctgactctaccccgtctacttagtgctcgggagttgtagtgataatttctctcttttaaaaagctgggtacaatgttttggatcgtacagtaccagaaaaatttggtccataaaaggtgcataatttctttccattcactacatggctgcaaagtcaatctgtacgtagagctgtctcactccagcctgagtaaaaatattatgtgtttggcttaaaatccacctagcatcagcatcaggtgctactattaatttcaaggtcccaacataaacgtcagaacataaagtccagaagtgctgttcctgg

SEQ ID NO: 219841 - DNA, 644 bp, Homo Sapiens
caattttaagctcatcagctatcactagtgttagcatattttatgtgtggcccaagacaattattttcctaatgtggtccagggaagccaaaagattggacaccctgatatacttaattaccagggtaatattcctaacaccatcacttttacttgacaattctcctgctctaaaagttatgaacctgacattcttggtcttacacaatctggacccagtctactcttctataaccatcttccacttaatttacaaatctttattaaggcacaggtactcctacttatcccctattgcctctctcatgctgaatcaatcatgccaaaagctaagaaaacatgagcatgcttgggactaaagaaacagaactgaggatttcctacacatcctaactgcaaggacagtccatcaaaagccagagataagtatttttatttgctctttatttcttaaaataatttccccaattttgttaacccctacctcaaatgactttagaggtattttaaaggatatgtaatatagttactaagcatttccactgattgtagctgaaggattttctaatgtctattacatgaaaatttttccttaaactcttttttaaaccaaactgtcattttccttttccaaaaccggcctg

SEQ ID NO: 219842 - DNA, 640 bp, Homo Sapiens
atacagactgggtctcgctctgtcacctgggcacaatcctcccatctcagccttccaagcagctaggactacaagcacacaccacctcacttagtgtgtgtatgtgtatatatatatattattttttttgaaacaaggtttgtctcactatgttgcccaggctagtttcaatctcctggcctcaagcaatccaaaccacatcacccatgctctcattaacatcagtactttaattcttaatatcttcattcattcactcatttcttgcagcaggatcctttagggacgcaactcggagagactggaaagtggaaaaaggagtggaagtaattatactcacgttaaaactgaaaaaaaaaaattcaaaggcgttagtttgcttcataaaatctgccccaaattacattaatgactgaggcgcaaggtttttgtggctctaaggctttttcacatgagccttcggttgcccaatatgtgacctctggatgtgtttcttggaagctttcaagagtcggaggctagaaagtggggagtaaactggctgtctttattgtaagatgactgagacctcagtatgaaggactgaaaattttttaaccagataaatcaaagtactcatgcttgaagaaaacagggtgga

SEQ ID NO: 219843 - DNA, 616 bp, Homo Sapiens
taatgctgaaaagatttattaaaggcattctctttataacatttcttgtcagggcacataattccaatagcaaatattttttcaccattcattcaaatacagtatcacaatgtgtttagtataaatatgtatacaaaattttataaagacactaaaaagtttctgaccaattaagtcatgagtttacaaagcacaaactgaagattaaatactgaatattaagatgaaaactactatacaggtactttaggaagttcttcaaagaagtgcacctcccgggaaatcctcatatgtacatctacactccagcaaactgcacaggcaaagtgctacttgccagattattgactaataaaaacacatatagagcttcagaaagaatacaaggtcaaatgccaaaaataaaaaaagaaatgaaagcaaatgtgctacattgtaccattttaaagagcttgaaaacaccacacaaggttcactaatactgttctgactgcaatgactgtatttacttacaatctcttcctaacaaggaaactatcagatttattcatggtacgaatggccaatttcaactagttatgccaaatgtacaagtagtatctgtaaattccaaaat

SEQ ID NO: 219844 - DNA, 616 bp, Homo Sapiens
gagtcaaggcctcaatctgttgtccaggctggagtacagtggcacaatgatagctcactgcagcctcagactcctgggctcaaaaatcctcctgcttcagcctctggagtagctgggacaacaggcgtgggctaccacacctggctaacaaatgagtttatgtcggctattctgttttctgacatggatcagacacaaggccatcttggttaagagggcagggcttgggatgagacatcccatcacttatcaagtgtgtgacttcatgtgagttatttctctttggtccttggtttcctcaactatgaaatggagttatgacagtacctacaatcctgtgtgaggactgactgactgactaatactttggaaagtccttagacctgtgtcaggcacacgatttctacaattacaatgtcattgtcagcagcaccctccctggtctagtctggccaccaccaactctaagaagaaggaaggaatggatacaggcaatggagctgggggagaagaaatcaaacataatgaacagtctgaccccatcatttgagacagacacttgaagaaaaatcttaaaggcaagggagtgggggccaggtctttaaaagctatttgg

SEQ ID NO: 219845 - DNA, 508 bp, Homo Sapiens
aatttatatcacataaactattattttggggtctcactctaaaagagtgaggtcagctgccatctctgagctgagggaaaaaaataagggatgattctgcaggcataaggaggggcgtatatgttgattttttaaaaatatacataacataaaatttaccattttaaacatttgtagctgtacaattcagtggcatgaactacattcacactgttgtggaatcaccaccatccatcaccagtacgttttcatctttccaaactaaaactctgtacccactacacagtaactccccattctctcctttttccagcctttggcaacaaccattctattttgtctctaagaatttgactactctaggtacctcaattaagtggagacatgtattcatccttttgtatctggacttctataatttttaagttttagaagtacttgaaaaggttaaaaatgtttaaaaatatttggttccaggtactacatatatcccaaaaaatacaaatgc

SEQ ID NO: 219846 - DNA, 549 bp, Homo Sapiens
aatcagaagacagatggataaatagagaaaagaagtatagaccatggaaacaagttccaggttctaaggagctggttagagaaacacaggaaaaaattcctaggccaaggacatacagggagttgtgtagacagactctgggaactctgggagcacaggccagcaaaagaggttagaagggggaaaagattaaggaaggcagataagtaggctgaaagctggaggcagataagtgggctaaaagctggacccagaactccctaatgagagagaagaaaacaggcatcagatagaaggatgggtcagttaattttgctaaaatccagactggaaacacggcatcagcagcagaaacaagggtacccggccctagacacaaagcacccaaagctcttgttgtgggtgcctgacatagtattcaagatccccacccgggtgccgacgtacttcccctaacatctgacccctgctgttccatgccccgccttggccttgtttgtggcccccaaccctttgccttggacctagttcctggactttttccgaggg

SEQ ID NO: 219847 - DNA, 617 bp, Homo Sapiens
  misc_feature (371)..(371): n is a, c, g, or t
tttattacccaggttcccatcaatggtaaaggcaatgtaatttgaagagaaaaaggagacataaatataagaaaatcagatgtgtacatgattcatgtttgcagatgacacaactttattcctagaataaagttattccaatcaaagcaaaagctacaagaaacaattagaaaaaagaataggtggctgaattcaaaattaattttttaaattaatgagttttcaactagaagtcccctagcagagcaggtattttcatagacaaattaaagattaaataagatatcatggcataagtgaaaatatttagcaaataaattatacttcatccaattttgtaaaaaatacatacatatacatgtgccaggtgnagtggctcacgcctataatcccaacactctgggaagctgaggcgtgagccaccatgcctggccaaaatttaaaggttttactagatttccagaagcattatttatgaaactcaaagccctcgtgccgaattcttggcctcgagggccaaattccctatagtgagtcgtattaaattcgtaatcatgtcatagcttgttccctgtgtgaaattgttatccggttacaaatttcacaccaacatacga

SEQ ID NO: 219848 - DNA, 566 bp, Homo Sapiens
ttgaatttaggtgacactatagaagagctatgacgtcgcatgcacgcgtacgtaagcttggatcctctagagcggccgcctactactactaaattcgcggccgcgtcgactttttttttttttggttaaccaattgagctttgagtgttctaagcaggacaggtaagatctgcgtctggcacagtcagccaggtctccttaccctgtgcttccctttctgcctgtgactgaatgggcatgtcagggtctagtaggggatccaggaggaggaagcctcattaacttctattctgcagcaattgatagacacccaacttgaacagtgggggcttatcgcctcatatactaagaccagagatagctgatgccaaggttggctaaattagtagcttgagatgttagatttttcatttgaggtttctatgctgctgttgtcttccgctcttggtcacagaggctgccacaatccgcatgtcaagtcctcatgtgacaatatccagacacagcaaggaagaggtagagtcgacgcggtcgcgaatttagttattgtagtcgacccgggaaaa

SEQ ID NO: 219849 - DNA, 607 bp, Homo Sapiens
atgaaatgacatttattgtttaaaaaagcgtgagtctggaattagatagtggtgatggttgaacaagtttgtgaatttactaaaaccactcaattgtacgcttaaaaaaaaaagcaagcttgagctgcctaagtcccgctcacacacactggacttgtactaaatgctcaacgattccattctctcagactatggaacattctgtcacatttttttccttcaggagatttccctaagaagagctgtttgcaaaatattgcacttaatttgaatccagggggacctgatgtctcctggaagaaaacgtacactcacatgccttcctgcctgcagcagatggcgggagtggtgggacaaggggctcaacagcagtttccatgaacattgtttccatcttcctctttgttatacacacagagacacagatttaaaggaaagtatcatctgggctgaaggcggtgaatggtatcccccaaacagggatgtgaacttttgaatgttttcagctcagaggcagtatggtcgtcctaatacctcaagacttatgttcagtgagatgttaagagacaggtggcaaccttggctcaaacactggacttaatttatc

SEQ ID NO: 219850 - DNA, 596 bp, Homo Sapiens
gtaaaagaactaatatttgcaaagaaaggggacgaggacattttctaataagcattagccaggagcagccacccccaagtacattttattcccaggtatatttattttgggactaatagcaatcaaaacagagtaagcggaaggtcttttttgtaagggtaagatgactgtgttcctgcagcctggacactgactgctgcaatgaaattggatctgttgagcatgtcttccaaggacagatttggatagtaagccaggtagaaggccagagctcccacaaagctgtcaccagcacccgtggtatccacagccttgactttctctgtgggaatgtgctttggctcaggttctgtctgtgacagcaccacacatccttcagcccctaaggtaatgattaccacctggcagccccttttcaagagcactaatgcagcctccccagcatctgcagcgctgcccaccgtgaggccagttaaaatctcagcctaactttcattgcagcaaaacacatctgagagggtgtagaactggggatccaggtcagcaatggcaggggctggattgaacaaggttttcactccactcctgggggccat

SEQ ID NO: 219851 - DNA, 576 bp, Homo Sapiens
actgggcaaagatagtcactgttaatgtttctttccagtcgttttctatgcatagtttagccatgacttctcatggggacaaacccactggtttaattcaacccccaatgtcaggtttttataggtcagcccagagttctcaagcccagtcacaaagcagagccaggactcaaattcacaccctgtgactgagctgtttccactgtaccatgagacactacccacaaatcgctccttctccagtatctatgacacgaccataacaaaccataccccttggacagatattccttaaaaaaaaaaaaagtttcagaaatagccaaccaaatacaaaaagtttggatgttttactttagcagtggtgtggagactctggtgtgctcttgtatagaagcgtagcatgcagctaaacccagtgccctggaaaccttctttgcagagcatctgtggacaggggttctggaacatgctctgggagacatggtactttgcagtttgtggcagaccccaggcctgtgtccttagatctggcaagggaaaggcaagtctttggtggggatgtttagctagaaaggt

SEQ ID NO: 219852 - DNA, 588 bp, Homo Sapiens
tgaaaaaaaggggaaattttattccactgacaaatttatattctataaatataatgtataagccttgaattagcagacactttattagggatgaccaaaacaaaaaacaaaaaaaaccaaaccacaaaaacagcaaaactaagtaaaatatgactattttcaatcaatgttggttatgttgccctcttgcaaaatgacaggcaaaatcatacttgtttttacatttgcatccacatatattacactgaaaaggattttcatacccatgacatcccatatgaatagtgtaaaggatgttgtctgcaaagtacatatcacagtgctggcagtggtgcagaagctgagggtcctggaccggcagggctggggctggggtgcttggctggctgtttcctatgctgggagtgctcgtgtgggcacttggctcactgcttggacctgccactggactatagttcctttgactatgggatggccgaggttctgggcttgtgggagaggagctctgaggaatacttgctgatacggcagaaactactgcttgggtagagggctgctgaatcatgaaaggcttttcatcagggcaaa

SEQ ID NO: 219853 - DNA, 603 bp, Homo Sapiens; identical to SEQ ID NO: 50568

SEQ ID NO: 219854 - DNA, 432 bp, Homo Sapiens
atcctctagagcggccgcctactactactaaattcgcggccgcgtcgactttttttttatttttttggctaaataaaaacatctactgctgtcttaggccatcctgtaagaaatcagggataagaactgaggaacaataggggtatgtaggcagtgagtcatgactatgcaaaaccataaaataaagaacataattttttgttgattcacaatttaataagttgtttaacatatttaaatcataatgtcattgtcacccttgtatcatgtctgtgttgttacatctaaaggcccttgagcaaagaaaatgcaaaatttgactttgcattcctttcagaactggcacatattcagtgagaataattcttgaattaagtaaaattcttacgactacaactgggcttccattccaaatcatacaatgcctcattt

SEQ ID NO: 219855 - DNA, 708 bp, Homo Sapiens
cggccctgaattgaatttaggtgacactatagaagagctatgacgtcgcatgcacgcgtacgtaagcttggatcctctagagcggccgcctactactactaaattcgcggccgcgtcgactttttttttttttagtttccacatcaggatacaaccctatttggaaactgttctggatactggaaaaaagattattacagttagtcagcttgaaccgcaaatagaaaatatattatttgagtctttaatgaaagctcctaaaataaaaatgttaccattaaccgaaaatacagggtaagtaactcaacagccaggactcacaaaatcaagcccctaaaaaccttacaagtggtttctctgggcaatattcccatgccaaatgaaaaggcacaaaaacctgctttcaagaaaaggactgtgcgtattccatcccattttatctagatatagacatcccctttcagtctgtcatcagttttggtcatatggacaaaagtttccctaagagaacatattcatatccttgccccgttaaagagaagctgataaacagcaccatttccaaaggtacaatgacttttaaaattataacccaggtagaacacagcttcattcttaatatccacctttatctaccaattctcaggttggaggtaagggagaggcatatttacacataccaagagtggcaaaaatattaacagacac

SEQ ID NO: 219856 - DNA, 701 bp, Homo Sapiens
ttgaatttaggtgacactatagaagagctatgacgtcgcatgcacgcgtacgtaagcttggatcctctagagcggccgcctactactactaaattcgcggccgcgtcgaccctaaattaagtgaagacttcatggttcatgtgactctcataatatttgatagtatgtattatttaattacttaatatccactaattagactcttttccttctaaagaagaatgtcccccaaacaacacattgtaactttctaaaagacagttggtgccagatgagattaaaaatgcagttactctactagataatattcaccttacacttcggtaaacactcctttaataactatttgttggtttctcaaaagcaatatcccatattaaacagacaattcaaatgtgacaattcctctgtaacaaagaagctgaattctgtaataaatgggaaacatttcattccagtcttctcaggtaccagaatcatggacttcagtagaagagagggaatagggagagaggtgggaggctgatctgttcgtggcccagcacggtgctgtaattcctgacccttctggtttccacagatcattgcagagtaatgcttgaagcgtgtgactttggacttctgctgctttaaaaagcccagtggctttccaaccaaatccttagactcaatctattggtgtgtttgtctaataaattctt

SEQ ID NO: 219857 - DNA, 607 bp, Homo Sapiens
  misc_feature (582)..(584): n is a, c, g, or t
  misc_feature (586)..(601): n is a, c, g, or t
  misc_feature (603)..(604): n is a, c, g, or t
  misc_feature (607)..(607): n is a, c, g, or t
ttgaatttaggtgacactatagaagagctatgacgtcgcatgcacgcgtacgtaagcttggatcctctagagcggccgcctactactactaaattcgcggccgcgtcgacttttttttttttttttttggaacagaaggattttattgaatgcactcgggcctagcatgagccccgaagaaagacagggggcttgacttttatacacacttctgaaagggggttggctagtttgaatggtgcagcaggaatttgatggtgtgaaactcgcggggcaggcaagagggcttacagaagcagaaagaaggcagttaatcaaactgtgacaggtcttgcaacgcaagcacagctggtaaccttgcagctgcactgaatggaaatcaggaacttacaaaacttgaataatgacaagtggcaagggggaaagacaaggcagtaaagacatttgttgtttttcctcttatacttgctgggggcggaccgtgttgacaaagtcgctggaaatcactgtcagagatgtagcttttaggatagtattgtccaggatctgctaggctctatccactgcaggccctggtggggnnntnnnnnnnnnnnnnnnncnnctn

SEQ ID NO: 219858 - DNA, 614 bp, Homo Sapiens
aaaaaagccttatagtatcacctaccacttaaaaactttgtttcctgctgtctataggatgaggtcaacattcatagcacagcacttaagctccaccatgcctctcatttcatctctcccaacatatacagagtcccatgctctagctccagttgatcctttccaacattgccatgctcttttacgtttgcacatgaagttccctttgtctagaatctctgattcctgaacaaatttacctggcaaattccttctcatcttttgtgaccaagctcaaatgacagctcctcagtaaagctttcctcaatccttttagcagagatagtagatacacaagtactaggcaacttctattacaatgctaattacttgagtttataaattatttactcacctgggtaaattatatgcccaccttctccagtagacaataaacgtctctaaggcaggaactttatcatttaaactttgtattcccctcgtgccgaattcttggcctcgagggccaaattccctatagtgagtcgtattaaattcgtaaacatgtcatagctgcttcctgtgggaaattgttatcccctcacaataccacacaacatacgagctcggagcct

SEQ ID NO: 219859 - DNA, 525 bp, Homo Sapiens; identical to SEQ ID NO: 49193

SEQ ID NO: 219860 - DNA, 685 bp, Homo Sapiens; identical to SEQ ID NO: 53062

SEQ ID NO: 219861 - DNA, 638 bp, Homo Sapiens; identical to SEQ ID NO: 50728
  misc_feature (510)..(510): n is a, c, g, or t

SEQ ID NO: 219862 - DNA, 466 bp, Homo Sapiens; identical to SEQ ID NO: 50801

SEQ ID NO: 219863 - DNA, 579 bp, Homo Sapiens
catgcacgcgtacgtaagcttggatcctctagagcggccgcctactactactaaattcgcggccgcgtcgacttttttttttttttttttgcttctggaacaaaacaacatgattctgaagatcatatgaaaaaagtgagattaactagggacactgtaaaaaaaaagaaagagaataatggatcacgaacaagcaggaatcaagagacagaatacaaaaatccagaaaaatgggcccatatacaaatgagaatttaatatatgaaaaagtagcatacaactatcagtgagttacaaatagacttaaaagattttgggacaactggagagctatctagaaaaagatcagtggatctgtatctcatacagttcgctgagaaaaacagaacaaagaattaaatgaaaaaaaaagaaaccagaaagtataagataaacattgaagtataattccttataaagtcttttttggggggagtggagaccaggtctcgctctgtctatcaggctggagtcgacgcggccgcgaatttagtagtagtagtcgacccgggaattccggaccggtacctgcaggcgtac

SEQ ID NO: 219864 - DNA, 639 bp, Homo Sapiens
aggtttgaacaaaattatttattattcatttattgatctaaaaacaaaagttcatttggaagaatatttctttataatatcggacatacataaaatgttgagctactcaggaacctgaggctggaggatcgtttgagcccaggacttggagtccagactgggcatactagtgaaaacccatctcttaaaaaagaaaagttaacaagttgactctttggtttatcattttatccttttgttttaaatattctagaacccaggatctacctgaatatcatgataaagttattttaaaaaaaacagcaacgtacatgtcacatatatagtcaatgtaaagcaattctactttgcatcccttagccacaggcataaggcagaacacagatatttctgtgttctgtgaatatctgtggaatgatacttgaatatgtggatcttgaataaagctgaattcatccagaattaaactttttgcattatttaggtgacactagacatcatcttgattaaacaagatatttgctttcacaagtgtagactgacaacatatacccatacctgaacacaccatgttagaaatatggctaatcccaaacttgtaatagagggatatttgggattcgggataccagggcactt

SEQ ID NO: 219865 - DNA, 602 bp, Homo Sapiens
ttgatataaatgtaaatggaaatcattaaatatattctactaattaaggattcattatattttgttatttcatgcacacccttaacaaccagtgtaattattcttagatcttatagcaagtgtttataataatttatttattcatttatccatcctttcatcaaataatttctgagaagcttctatgtaccaagaattacgaaagaatccagactgtgttataggtagtgattggttagtagagggatggacaactatcctcagctgtctgaatatggtgagatatgtgctctgattttgatgaatcttgttcaaaataattccctttagtttaagttggatctcctttcataatcatatagtgactggtcaggccacagccgtattggtgcaggctctactgggctacatcagggaacaggagtaggtgccttttactcatgacttactgtgaatgaggtcataggtggataattaattcatcaataatcaattcatggaggagtagcacaagtgaaaatcagagttgctggcttaaaaccagctcacaaaatttgggaaatgaaagaacagagaatccaatttaagaaaatgtgccgaga

SEQ ID NO: 219866 - DNA, 711 bp, Homo Sapiens
gtaatctgggtataagatttcaagctttcctatggaagtccaggagctgaagaattatactctcttcttacttcttctgacagtcactgtgacctttagagggccatttaaatggcccactcatttccatcttagattacaaaacttccaactaccacatgctgagcatcctaagcccaacactcacatcagccacagtaatcatcagttccatgaaaggcccatatatttcctagtgaagtgaaattcttgatggaggtatgatggcaaataacagtgttcactttcacttctccgaaaacaaaatacagtaggctagactgtgagttcctataagagagccccagagacggcacacccagctcgccattggggaaaagagcagtgggaaaacaagcaacagtcaagaaaaaagagtcatagtgatgatgcctgaaatgctgtacagtggaaagaccttcagtggaaaataacaacgactcaggaaattctagagttttaagtccacctgtaagacgtgctccaatacattaaggtcatgcagttgaactttggggaaagttctaattaggtatgcaatataagggcctaaactaaggatctgctggctcataattgaataaaactcccaagttacttcaatgttaaagacaattaaggcctatattttcaatggaaaaagcttttaaccgaaaccaatgggaagaattt

SEQ ID NO: 219867 - DNA, 688 bp, Homo Sapiens
ggcaacagatacaagacaaactaaaacaggttaatccaattaatgtgttttgggtgcaaatcccaatttggtattatcaaaggcatattttcacatttaactatattatcatttaagggattacttaattttaattttcatttctatttcatcctttcttttctggcagggaagcctaagctcatttgtaaaatttttctgtcctctgagcatacaattatattttatccagaacagaagtgcaccaaaagagctgaaagttaaaagaaatgttcagtagatgagacctataatactggttctgattaattaatataatcactctattaattatctatgtttaaaattcaaatttatctatgttggcttattgagcattcttaaagaaaacatacttgtaatatcctacaaccatgaggtggaaagggtcagcaaatgcttccaattatatcccaattattttaggaatggtttacttcaccttctgctccctctacccacttaccctaatagtggtctgcttcttacttaaaaggggaaaacacaaagatttcctgcagtttgagaatcaacttgggagaaattgaaaaaccagtggttgaattgaacagagcttgatttaatcctgtgttagccatttactagctatttaaagttagaaaataaactttctgaaccttgggcttgg

SEQ ID NO: 219868 - DNA, 621 bp, Homo Sapiens
ccctgagacagtctcactctgttgcccacgctggagtgcagtggcacaatctcggctcaatgcagcatcgacctcccgggctcaagagatcctcctgcctcagccccataggcagctgggactacaggcatgagacaccacgcccagccaatctttgtatttttttggtagagacgaggtttcgccatattgtttaggctggtcttgaactcctgacctcaagtgatccgcccgcctcggcctcccaaaatgctgggactacaggtgagagccatcgtaactggcctgcagtcccaaattcttaccgacatgactactttagttctgtttgattttggccaaattatgctcccatgctgtttcttactcatttagatacttccatttctaatatttacctcccagcacttctccattaccgatggggtcacctcctgataaacccgtaatttgcacattacaatgggtttaccaggaagtagccccatcataagtagaggtgcattctgaatgtatactgcttttccaccaaaaatcccacatcaaaccaccaaaagtcgggggactgtctgtattttaaatgctaaattatgaaacgctgtattggtgcaaaatagactt

SEQ ID NO: 219869 - DNA, 636 bp, Homo Sapiens
ctttgttgttgtttttaattgaaccaggtgtttttgttttgccttcttgtgtttgtttttctcattcctttttcccccataattagtttggaggtttacattccatgtgtccccctcaccttataccatgtgagagagcgagcttccaaagacctactgcttgttgacctgtgtcccttaagtttggggagctcgagaactggcattaagtgctacatctaaaaagctggggcaaaaaaaaaaaaaaaggaaactgtactgaaagaaaatgattattctatcaacactaggacatgaatgggcaggtgtttaccctacaccagaagtggacccggcaggaaggagctggcatggagccctctgtaaatcctgcccaggcctccaaaagacagaattgtccccagacaacctggagatgaaggaaacatttacaagcaagtagggaagcatcgccctgtggaaggaaagaccgtcggccccaggggagtacatctgaggaatactcataaaaaaacccttcaaaaaaatggtcactttgaacaccttgccaagcccaataagcaacagcttgcaagacctcaaatgaccagtcacaacaacatggtacctttcttccaagcctgaccccgtaagggc

SEQ ID NO: 219870 - DNA, 721 bp, Homo Sapiens
taatgtaaaacatatttatattgacaaagcactataaccaaaggtttacacacatgaatgagcatatgtaacaaattgggacatttttctcaaatatgccaagatttatgaagtctggcaacaatccctttgctttttcttataacaacagctgctaattccctctgtgacttctaactgcccaattttgtgaaagttggatcagtttaaatttagaagatactctattccaagaaataaagttcaaaaatggagtcatctttaagttaaatatgtccaggccaaaatgttgtctttctgcttctgtttcttctgcatttccttcagaaatggagaagtaccagttcactctaggttttagcaccagctttgaaataagttgctgtctgaactacagcaagctactcctcccttctctcagtcttctcctgtgtaaaataggtaaataaaactagataatttgcaaaggtcaacccaatgctcccattatttgttctattcttttttaaaaaaaaaatgtagacttttaataactgcttttatcaccaggttaagccatgcagttacaaagtagttagaaatttctgaaggatattatagttaaaaaaaaaaaagctgattcttacacatattttatctaccactttatggggacactattgttcaaaaggccctggccaaataactcccaaatgaaacactaaacccaaggttggtttca

SEQ ID NO: 219871 - DNA, 654 bp, Homo Sapiens; identical to SEQ ID NO: 40201

SEQ ID NO: 219872 - DNA, 585 bp, Homo Sapiens
ggacagggtccgactcccatcacccaggctggagtccagtggcacattcaaagctcactgcaggcttgacttcccaggcccaggtgattctcctacctcagcctcctaagtagctgggactacaggcatgcacaaccatgcctggctaattttttgtatttttagtaaagacaagattttgccatgttgcctaggctggtcttgaactcctgggctcaagcgatcacctgccttaggctcccaaagttctgggattataggcatgagccactgcaccggtctttctgtcatgattttcaattctaagtgcaattgctaatgacttttcctgtagtctcaaactccttttttcactcctttctccatatcccagtccctgccaatgtggatcaaacactccaaagacaatactataatttggagggggaggggaacttcatagtggttatagaaaaaaaaaaattgtcttcatttatactgaagccatagatttaacttcaaaaatagccatcccttaacccaagtccaattttttggaactttttctcttgaggtccaaacccacatttttaattagtttggcaa

SEQ ID NO: 219873 - DNA, 596 bp, Homo Sapiens; identical to SEQ ID NO: 61612

SEQ ID NO: 219874 - DNA, 617 bp, Homo Sapiens
gcggggaggagtgaagagagtgaggtttggggatccttctcggagagagaaaggcgggcgtcgtcccttgtgccccgcgcaggccgacgcgcttagccgattccgcacgttgggcaagtgggggcacagcgtccccgggcactccggtcccggcaggtcagcctctcccgggcagcgctcacacccagtcctccgagcctggggttccacggccgaaatgcctgcgacagagaattagagatagaagctcgtgaatgtccctttcttcgaagggctgggaccccgggcgggccgctggccagctcgcccgcagcccgttgccatgtgctccctgttgctgctcccggtgattgacaggccggcgcacagtcggcgtgtcagccgcgaaccaaagtaacatgcagtcctgcacgtttttgccgaggtgcttttgccccctggaatgcctaggagttcaaacaacgttcaagcaacgcctctgcgcgtttgggatcaataccccgagacgggaaaatcaggttttaaacccaagctttactcgggatttcggccccaacaatgccctaacaaacacgcattttgtccccaccccccagtggctagccccctttcgctta

SEQ ID NO: 219875 - DNA, 679 bp, Homo Sapiens
acaccatctgttccttccactcccttagtttcatcatccacagcttcccgctcaggactagattctgattttccatcacaatccataagttctccttctcgactatcatccatttcaccatcccttgaatgctctgattggatgtctggaggggtctgaaggacggccacgctattctgatttataatcttcaatttcaattttggttttgaccgttttcttcttggaactgtaactgtgaggctctgtaactgagtcatccctgattcagtcaaacacacaccatcctgggtataagtcttgggtgggtctagctcttttacttttgtgacaatttgtgctacaagtgaagattcacagcagtctgaggaaggcacattagacgcaggcatatagggtctgcacatgctacaatcaaaaccaatgtctgctacattttccacttcttcctcagtatttaagttctgacaaactgcatgcatccatctatcacattgtctacattgcagaataagatcttcttctctatagtttcgatagcagactggacaggaagataagctggcacaaggagcgcactgtgtgtaattgttctgccattcacatcttagaccctgcgatgttgctccacagtgtctgcaccaaacacaccatttgcacttcagcctcctttgggaac

SEQ ID NO: 219876 - DNA, 573 bp, Homo Sapiens
ttgaatttaggtgacactatagaagagctatgacgtcgcatgcacgcgtacgtaagcttggatcctctagagcggcccctactactactaaattcgcggccgcgtcgacttttttttttttttctccaaaatgctaatggcagaacttctgctactctgtactgtaccgcacctctgggtacatccagctgtgaccacaccacaactgtatcgcatccagcaacctaaagtactcttgtggttgctcatgtaaatacttggaaaatatctgcctcttccggactctccccttcacattatagaaatgctcaagtctcaaaaacaaaacaagaaacttccagagaacctattcacttcaaattacggagatcccctctctccttgatccacaataaacttctggaaaaggtcgcctacaggccttaaagaatcaccacgattttcctcccctatacaagcaaagcttttcagacaaaaatcgtcgacgcggtcgcgaatttagtagtagtagtcgacccgggaattccggaccggtacctgcaggcgttccagctttccctaaagtgagtcgta

SEQ ID NO: 219877 - DNA, 561 bp, Homo Sapiens; identical to SEQ ID NO: 50797

SEQ ID NO: 219878 - DNA, 559 bp, Homo Sapiens
aacacagataaaaatctttatttgggtggcagaaaaaaaatatgcattatttcattaaacagtgatcctacacagagagagatttaccaaccatattaattcagcaaaactcaaaatacttttccccaaaatacattttcacctatcctgtcacttcttgttaaagaccagtttaggttttactaaattaaaatagtttatatgtatactattattaattcaatttgtataacaaatcttctcttccttcttttgagaactcagccagagtcactatacagttacattctcctttccacactattaatgaaaatttaagcaaaacatagcgctttgaaaaccccaattatgtaatatgcaattaattccaacatatttaagaacattaacaattggaatgcagctaatgttaaaatatttttaagatattatcttctttactaatttttacagactgacaaatattaacttagaaaaattagcataatatgaacaataaatttttacttaacatttcataacaataaggcttatattaaaataatatttacttcaaagt

SEQ ID NO: 219879 - DNA, 552 bp, Homo Sapiens
ttgataaaacatcatttatcttaataatgggtacttctctgaatttcccaagtgcccttccaaatgccagtatcaaagccagtgcccacatgtgtgtagaaagttcaggagggttcaggggagttgaggcaggaacacaggctgctcagcccagggggtccaccgaggagaagcatcattctgggccagtcacccactggactggtttccaaccaaggagatttcaagcggggatttccaagcatatttctggaatttcaaaacttccagtgaaaataatatacagttgacccttgaacaacaatgatttgaactgggcaggtccacttgttcatggatttttgttttgttttgttttgtttttttgagatgcagtcttgctctgttgcccaggcttgagtgcagtgatgcgatctcagcttattgcaacctctgcctcctgggttcaagcaatacttttgccttaaccccccgagtagctgggattacaggcacgcaccaccacaccttgcctcgtgccgaaatcttgggcttgagggccaaattcccatt

SEQ ID NO: 219880 - DNA, 583 bp, Homo Sapiens
aaatataaatgaattttatttatgaatgtatagatgtacagcaaataggaaagataatacattaaaagaacatatactataaccaggtagagttttatctcaggaatttaaggatgttttaatattacaaaaacccttattataatcatattaggcaatttaagtgataaaaatttgattgtatcaaaagacaccaattccttttatcaagcttttagcttccaacaaacaagaatagaagatgttatttctgttatcctaacaaagaacatttgtttaaaaccaacaattaacttcatatgtaatgaaaaaatatcaaaaaaacttattacaattttatgaaacacaaaaacaaaatagaaatacctatgattttatatttagaaagagcaaacaggccatctaaaactgttagaacaaagaaaatcaccaaaagatacatattttaaaagttaatagctttctaataatagagattcccatgctgacaggaacatagatataaaacagcccagaaagaattaattaaggtatattttaaacctagaccaaaagaagaaccaagttttatgaaaaaaatcaa

SEQ ID NO: 219881 - DNA, 457 bp, Homo Sapiens
  misc_feature (361)..(362): n is a, c, g, or t
  misc_feature (365)..(365): n is a, c, g, or t
  misc_feature (367)..(369): n is a, c, g, or t
  misc_feature (371)..(372): n is a, c, g, or t
  misc_feature (374)..(375): n is a, c, g, or t
  misc_feature (377)..(377): n is a, c, g, or t
  misc_feature (379)..(380): n is a, c, g, or t
  misc_feature (383)..(384): n is a, c, g, or t
  misc_feature (387)..(387): n is a, c, g, or t
ggacatataattttaatgtactgtgactctgccatctagctattattactttttatacaagatttggaaatatctctctcattcagatattttaaatgtaatagcatttgatatgatatactcgcacctaataatctggtctccactaaggacttattgtaattaaaaagttaaacaagttagctgatggacaataaatctgttttaaggagggaagagaaaacaggcccttgtaaatattagctcttaagtgccagctactttatatgcaatatcatttgaaagatctcctaccatactaaataaagaattggaggccattatccctatattataattaaaggtgggggaggggaaagannctncnnnanntnncnannctnnatnttattacccttcctctctatattcccacaaaatggagaaacttgggggcacaaacaagcttattcaatgt

SEQ ID NO: 219882 - DNA, 548 bp, Homo Sapiens
ttgaatttaggtgacactatagaagagctatgacgtcgcatgcacgcgtacgtaagcttggatcctctagagcggccgcctactactactaaattcgcggccgcgtcgactttttttttttttttttttttaacttaaacctctgatttacactttgctttattcattttcccacaaatactcatctttccaaattggcacatattcatcctcccacaccgcacagtgcttcccgggcacctgacccgaactccagccccaggtagagaatccttaggatctagtcaatctgtggtggtcctaaccccctctggtggctggttcaggcaggggcatgtgaagcaattgtggccagtgagttttgagggatgacagctggcaaagagctctgggaaacaacttctttatgcttaaaaccacacaaatgaaacattttttcttcttcctctgaatgtgctgcttggagctgctgtagccatcctacaactgtgtgaagtgggggacccattctgaggacagagctgctgatacctcgagggcctaacaat

SEQ ID NO: 219883 - DNA, 592 bp, Homo Sapiens
tgtaaattcatttattttggagcaatgagaacacatggacatagggaggggaacatcacacaccagggcctgtcaggggatggagggctaggggagggataacattaggggaaatacctaatgtaggtgacaggttgatgggtgcagcaaaccaccatggcacgtgcatacctatgtaacaaacctgcacattctgcacgtgtaccccagaacttaaagtataataataaaaaaaagaaaaaagaagttcatttattttgactcctacaaaggcaaggaatagggtttttgttgttgttgttgtttttgagactgtctcgctctgttgcccaggctggagtgcagtggcgtaattttggctcactgcaacctccgcctcccaggttcaagcaattctcccacctcagcctcctaagtagctgggactacaggcacacaacaccacatcaggctaatttttttgtagttttagtagaaacaggggtttcaccatgttgggccaggtttgtcttgaactcccgacctcaggggacctgtttactttgggcctcccaaagggcttgggattataaggcgtgaacccattgcgccc

SEQ ID NO: 219884 - DNA, 670 bp, Homo Sapiens
  misc_feature (3)..(5): n is a, c, g, or t
aannnaacttagagaaaacagagacacagagatgttagctgcttgatcaaagcttcttcattcatcagtggcagagccagccccagatagctctggaaacatctaaggtatagtaactattaagtcactaagttgttattaaatgagtgctctgttcggggctgaggtaaaagtcattgtgaagatatgaaagtactcacccgttgctccattggtgcttattagactgctcagaatatactctgcttttaaaagttttcctggaaagcagcaaccaattgccacacaattagctttgaacatgcacttaacaattacaagttgttcatgttctaagactgatatattgcagcaggaactgtaacctcctttggaagcattccattttataatttaaaatcaacaatgacatcatctataaaactgaaaagaaagatgaagttttcctaagttggtaaggggggaagttggacagtatctgaaatgaaaattagattcatatgtatgtgataattcattcacatagagcacggtttgaggagtagaggcaaacttttttaacaggctgtgccgccttcctgtgaaaactatacttcaagaaatgggaatagagtttgccctggacagggactagttttggaattttttgggcaggatttggggggggggg

SEQ ID NO: 219885 - DNA, 726 bp, Homo Sapiens
gggagggaaatgtttttaatgcacacatgcactcagaccttaacttttctataggatacaatatggggacttttatagaagaatctaattcctatagtaggaggctgttatttactcagatttgaattccttttatttgacattacatacaaattactaaagccttaataaggaaaagtaccaattcaatcttacagcataaaattactttcattatatgtcttcattagctatacttactaattgatatttaatagaaaaataacgatattcaaagctcagaacagcaagtagtaaccacaattcctttgacagcactgggagactttcctttatacatgaatacaaaaatccaacttcattttccaacatctttaatcaaatttcactcacactatatgagttctattaggttctcaggcctctccaaatgctcatgtctcaggagggtatcactatttgaaatcctaaaccattcatttgctacttcttaacaaaaatttttgaaaagcatgtaaaccacacccttatcttttggattacaatggttaggtacaaaaacaattcatttagcatcttataaatcattaaagttatacataaaagcacctacaaatttttttaaaaaataaagattcacagtgcactgcaccttggaacatataaagttggaacgtaacatttttaaaagtgaattccaagacctgtattttttttaaaagacct

SEQ ID NO: 219886 - DNA, 744 bp, Homo Sapiens
aaacagagtcttgctctgtcacccgggaggcggaggttgcagtgagttgagatcatgccactgcaatctagcctgggtgacagagcaaaactttgtctcaaaacaaaaagaaaataaaagataattactttatacttagcttgtcttacccatgagtgacgggctgcatgtggcccaggacagttttgaatgcagttcaacacaaatttgtaaactttcttaaaacattaggagattttggccaggtacagtggctcatgcgtgtaatcccaaagcgttgggattgcaggcgtgaaccaccatgcccagccaagatctacactattatgtcaccccataaagtgaactctcagacttcccagccagtttctttcttatcataggttagcttgcttattctggaatttcgcgtatacagatgcatgccatgccataggtactcttttgtgtctgctttgttctgctcaacaccatgtgtctgaaatcattaccatcggtgtatggttctctaacttcatcatttccatttcagactcagcatatgctgagttcaacctgttgaagggctatctctgtttaattcaccatcttgaaagaaacatttaaaattgagatgttttcaagaatatataggtaaatcctgaggaatcgaccttgaaatgttattacaagctggctgaaactactcaagggaagtctttttcttcactcacataaaaagctaatggaatttatattcacaat

SEQ ID NO: 219887 - DNA, 719 bp, Homo Sapiens
ttaatttaatcttttattatttcttaacagtcacaatggaataaatgtgcctactttaagacatctatctggttttgttggcagatttaaggactaacactagactaaatattacacaaatattctattcaaatgacttaaaagtgctacccttttactaaaaattttatcgtactaaacatctttgaaatgtgtgtcccataggaaatgtgtttttttgataaccgtacttctaaaaaaattcccactttgagcactgtcagaaaacagagcaaatttaaagaaaattttgagaatataaaattacataaacatttcattttacttttcctttatcttaatcatatacctttaaataaaaaagctatgaaagacctaaataaaatttgagaaatcagaatagacaaacatcattaatgcccaaaacataatttatttattagagatggggtcttgctatgttgcccaggctggattcaaaatcctgagcccaagcaatccctcctgcctcagcctctcaagtagatgggacaataggcgcacaccaccatacctggctgtaagccacatactttaaatggacctaatttccaagcctggctgcctgatagaatgtgctttggtcagctagaattgataccatgttagagggtcagctgcacacaaaaatgtgttgctgaaagaaatggcacattatacctggtacttccctaaggtgc

SEQ ID NO: 219888 - DNA, 574 bp, Homo Sapiens
aattttagacacacttaaaggagcccaaaacttttgaattggttgtcctgtagaaaacaagatgactttttttaaaaaaatctcaattttgatattactatcttcaattatacaccacaaaaatttttttctaagaagaagaaagtatataaaacatgaatgataacttaaatacagctggacatttagtgaacagaaagtaagggaaacaaaatgaactaacgcaaatagcatcatcattctctcattaatgggctacattgtattgaggtgattaagtcagtgccagcaaaagaacacagtcatgttatttatgcttacctcctccccacatgtcaaaatatttagtgtctaatacttctcctgtttttccatttgccaaggcaacattgatccctcttccaacattattcttaacaccactcattaaactgaagggggagaaattgaaataaattttgaattaaatattgtacaataacatatcagaaaaataaagtcttgcaaaaaaaggtagggatattatacatattttcaattgttcagtgctggggaggaaaattaaaaagatctt

SEQ ID NO: 219889 - DNA, 533 bp, Homo Sapiens; identical to SEQ ID NO: 60533

SEQ ID NO: 219890 - DNA, 448 bp, Homo Sapiens; identical to SEQ ID NO: 55886

SEQ ID NO: 219891 - DNA, 572 bp, Homo Sapiens
tgaatttaggtgacactatagaagagctatgacgtcgcatgcacgcgtacgtaagcttggatcctctagagcggccgcctactactactaaattcgcggccgcgtcgacggcgccttttcttctaaagaacacaaaccttgatggttcttgcctgggtgtggttctcacctgggtgagcctggctgtgagggtagggggcctgaggtcaccccaaccacagcttctgtggtcctactggcagcatgttctagacagacctgtgtggagctggggaaaggagagtggagaagtttgaggaagctgcatgtttatgttttgtgttcctccctcccccaggttggggtcagcgggactttatttggatccaccacaggtcttttcaaccaaagccttgcagaaacaggctttaccccatacacacagaagagcaacgacttccttgttaagagtctgaaaatctgggtgagagcctgtcagacccatggcctcagagagcaggaaaaatcctttgcaactgggaaggaaattcagaagacaaaaaaaaaaaaaaaaagtcgacgcggccgcgaat

SEQ ID NO: 219892 - DNA, 666 bp, Homo Sapiens
  misc_feature (628)..(628): n is a, c, g, or t
tgaatttaggtgacactatagaagagctatgacgtcgcatgcacgcgtacgtaagcttggatcctctagagcggccgcctactactactaaattcgcggccgcgtcgactttttttttttttcggtacagacagcatcttgctatgttgctcaggctgatctggaactcctggcctcacaatactcctgcctcagcctcccacatgagctaccatacctggtaggacattatttttaagctcccattaggtggaaatcaaaagacaaagcttttagtaacagttcttccataaactagctgtgtaaccttaggcaagtcactctgaatcccaggtacagttttctaatctacaaaaatgactggaaaaaattatttctaagaccctctccaccttaagttattccactagtgcaaaatttaaaaataaagactcttatggtttggatgtttgtcccctccaaatctcatgttgaaatgtgattcccaatgttggaggtgggcctagcgggaggtgtttgggtcatggaggcggattcctcatgaatagcttggtgccctccacatggtaaataatgagttctcactgttagttcatgccagagctggttgtttagagcctgccacctnctctctctcttgcttctgctatccccatatgacttggc

SEQ ID NO: 219893 - DNA, 340 bp, Homo Sapiens; identical to SEQ ID NO: 50108
  misc_feature (66)..(66): n is a, c, g, or t
  misc_feature (69)..(69): n is a, c, g, or t

SEQ ID NO: 219894 - DNA, 572 bp, Homo Sapiens
tgaatttaggtgacactatagaagagctatgacgtcgcatgcacgcgtacgtaagcttggatcctctagagcggccgcctactactactaaattcgcggccgcgtcgactttttttttttttttttctggagaccaagtttttgttaaacttaatccttactctctttcctttccagcagcagaaacatctggtcggttttagattccccttggatttccaacttcaaagggaattataaagaataacaaattcatgtaccggcactaaaaaaaaattagagcagcaggagagaatggtaaaattgtccttatttgactgctagtgacaggcgccacaggcagaactatgagaaaagacaaaggcaagatcaccagttgacaaccagagttcctgcaagagactgaatctttggctacatgcaaatatgcacagggcccttaacaatccatagggaggtcgacgcggccgcgaatttagtagtagtagtcgacccgggaattccggaccggtacctgcaggcgtaccagctttccctatagtgagtcgtattagagcttggcgtaatcatgg

SEQ ID NO: 219895 - DNA, 462 bp, Homo Sapiens; identical to SEQ ID NO: 50799

SEQ ID NO: 219896 - DNA, 672 bp, Homo Sapiens; identical to SEQ ID NO: 50798

SEQ ID NO: 219897 - DNA, 662 bp, Homo Sapiens; identical to SEQ ID NO: 60223

SEQ ID NO: 219898 - DNA, 685 bp, Homo Sapiens; identical to SEQ ID NO: 60745

SEQ ID NO: 219899 - DNA, 617 bp, Homo Sapiens
ttcaatttaggtgacactatagaagagctatgacgtcgcatgcacgcgtacgtaagcttggatcctctagagcggccgcctactactactaaattcgcggccgcgtcgacatgaaattggattctgttgctttaagcatttcatgactgagctgctgtctggatgctacctgaagagattctcattgaatatcattatggcccgtaagtgttccataattttctttaagctccatctatgtaaatatttttgaacaattttgcacaagtacagggccacatacctatttgttataaacccgacgttgataaaatgcactcttagtataattgggtcttgttttgatcctggcagtttcatattgggatttggcagtgagttcaacagaataagcattatcctcttgaggcccatctaggattgaactaaagggcttctacaatatccacatgatcatacaattagttctctctctccctctcttttttttgtgctgtgatagtgtaactgaatatgagctggttgccaaggtattgtggtagaataataccctgcagtaaacagttaatcatgcagcagaactggcttgattaaaaaaaaaaaaaaaagtcgacgcg

SEQ ID NO: 219900 - DNA, 551 bp, Homo Sapiens; identical to SEQ ID NO: 60845

SEQ ID NO: 219901 - DNA, 649 bp, Homo Sapiens
tatcagttgtactttcatttagaagtatgaatcatgagcaagtagtcatgcaggaaattgtatcctctgcccacccacccacagaaagggccagtgctggaatggacagaatacagcaggaagtgcatgaaggtggaaaaggggagggagctgggagcttatctccgagagcgtttgggaggataggcgcgtggagtctgttagctggaggcttctacattcctgggcctccagaacccaaacgcctgccgctgccctgccagtgaaaccaaaccggttgccttttgaaactttccactgaggccaccttggagtcagagccagcgagctcaggtctctcctggtaaccttcacacctagaggtggggggatgggggagcagtattgaaggtgaggaaaaacagcatgaaatggagcattgtcaggatagatggtgactctgtggaaaaacagaatctggagtcccaagacctgatttaaaaatctgaactttccagtctgagcaacatagcgagaccctgtcccgtgtatgatggtgtgcacctgtagtcttgggaggctcacgtgggaggaccgcttgagtagcttggacttacagatgcatgccaccacgcccacagcgctcgtgccgaattcttggcctctaggg

SEQ ID NO: 219902 - DNA, 615 bp, Homo Sapiens
ttgaatttaggtgacactatagaagagctatgacgtcgcatgcacgcgtacgtaagcttggatcctctagagcggccgcctactactactaaattcgcggccgcgtcgacaaaacatgcttctactttctttgatctttcatgacattggcattttttaagagtcaaagatagttgtcttgtaaattgtcccacaatccggatttgtctgtttcctcatgacgaaattcaagttaagcatttttgggaaaaatactgcataggtgatgtatccttcctgcctcgtaactgcagatggcctgtaatactaagtttgatcacttgaccaaggtgaacttccagatctctccattgtaattattttgctgggtacagtggctcccacttgtaatcccagcactttggaaggctgaggtgggaggattgcttgagcccaggagttctacaccagcctgagcaacatggggaaaccctgtcactactgaaaatacaaaagtacaaaaaaaaaaaaaaaagtcgacgcggccgcgaatttagtagtagtagtcgacccgggaattccggaccggtacctgcaggcgtaccagctttccctatagtgagtcgtattagagct

SEQ ID NO: 219903 - DNA, 671 bp, Homo Sapiens; identical to SEQ ID NO: 50121
  misc_feature (564)..(564): n is a, c, g, or t

SEQ ID NO: 219904 - DNA, 601 bp, Homo Sapiens
ttcatcaaagagcaaattttatttaagcagctgtgcacagtggcagcagaggtactgctccttatggagcagggatgccccataggcagtgagcccagagtagcagctcagaggcagttctgcacacatatttatacccacttgtaactatatacaaattaaggaggaggttatttagaaatttctagaaaaggggtggtaactttcaggtcattgccatggaaaggggcagtaatttccagctgttaccatgagaacggcaaactcacttggcaccagtgggtgtgtcttatggaggggtgcttttgcctgtttcagctagtctgtaatctggtccagagttcaagccctgcctcaggagtcaggtcccacctcctatctcagtctggtcacagccctaactaggcagatgatcccaatgtcagcccaaagcccagcagtcaggccctcctgtgatctgcctggggcacccaggaaggggatggggcattgctggatgggccatgatgtgttgggccagaagtcaagccctctatgttgaagtccttaaccccattggctgtgaatgtgacccttatatggaaaatgttgtctttgcaaa

SEQ ID NO: 219905 - DNA, 674 bp, Homo Sapiens
  misc_feature (632)..(632): n is a, c, g, or t
aagcttgcggccgcgacccctctgaccgagatcctgctgctttcgcagccaggagcaccgtccctccccggattagtgcgtacgagcgcccagtgccctggcccggagagtggaatgatccccgaggcccagggcgtcgtgcttccgcgcgccccgtgaaggaaactggggagtcttgagggacccccgactccaagcgcgaaaaccccggatggtgaggagcaggcaaatgtgcaataccaacatgtctgtacctactgatggtgctgtaaccacctcacagattccagcttcggaacaagagaccctggttagaccaaagccattgcttttgaagttattaaagtctgttggtgcacaaaaagacacttatactatgaaagaggaaaatatataccatgatctacaggaacttggtagtagtcaatcagcaggaatcatcggactcaggtacatctgtgagtgagaacaggtgtcaccttgaaggtgggagtgatcaaaaggaccttgtacaagagcttcaggaagagaaaccttcatcttcacatttggtttctagaccatctacctcatctagaaggagagcaattagtgagacagaagaaattcagatgaattatctggtgaacgancaagaaaacgccacaaatctgatagattttccctttctttga

SEQ ID NO: 219906 - DNA, 729 bp, Homo Sapiens
cttgaatttaggcgacactatagaagagctatgacgtcgcatgcacgcgtacgtaagcttggatcctctagagcggccgcctactactactaaattcgcggccggtcgacttttttttttttcaaggcaatcaagaataatttattatggccttgctaatacaaggttccaaaaaatgactggttttgatataacgtcatggtggctaggtaaaaacatacatgttccagaaatgcacactcaagtgtgcaggagtacaatcacacgctcgggatctgctttcaaattcctcagcagagaaaaaaggggaaaaaaatgttctcacaatcagtaattgctgaaggtccactctgcacccccactgcaacaggcaccagaggaacagcggtcagtcttgggcacgttgcacgtcgctgttcactagcagccttggtactcttctccttggcaattcccagatacagtggagaggtcggtaggacacaggagctggctggcaccgagaggctctgccccatgctggggcactgctgagccctgactagcgcggccgggttgatctccaacacggcaatcttcccgccaaagagggaggccagcaagcacagcaccttttgatccgcagtgcggttcctcagggcacacgatccggccagcaggatgctgaggctctggaaatccttgtaatacaaagcagcttccacttccaggttttgccaggtttaaata

SEQ ID NO: 219907 - DNA, 519 bp, Homo Sapiens
ttgaatttaggtgacactatagaagagctatgacgtcgcatgcacgcgtacgtaagcttggatcctctagagcggccgcctactactactaaattcgcggccgcgtcgactttttttttttttttttaaaaaaagacaccaaagaaaatgtttcacattcattttcaaactaaaaaaaagaattcctgaaaccacattctggataagaactatcctagagaatgagcaaaagtaggaaattcagcggcagcctggggtttgctactgtaattcctacaaaaaggcaataattctatcaaaagcagggacaggctttccaaggctaggaaggttgtttcttttcttcttcgacaatttctagctcagagtgacttccctattcccccacgggcctggggaaaaggttctggggacagatgcaaaccccgcggggacactcagcctgctccagcaactaagaccaccaatttccaccagactggcgagtgctaggccattcacaacatgggccaagctccc

SEQ ID NO: 219908 - DNA, 623 bp, Homo Sapiens
aaaggtgtaagctttatttctatgtataaagtccagctttattagatgtttctgattcccaaaataatagtattaggatattccttattttaggctttaaataatttgtataataaaatagtgtcagtaggtccaaagctgaaatgcaaagttcaaatttctaatacaaaggagaggagtattttgtttcttttggtacagccatggttcccaaactgtgtagcagggcaccttagcaaattaacatgggtgccacacaatattttaaaatttttgagaaaaacatagcaacacctgtgggacatcacataaactactactttgaggtagtttacattttcaacattaaatagcattatattcctttctataacaacatatctttacaaaactgggttttcagcagtttgataaaaagtactgtgcaagaagcagataggaaaagaaaatgatactgtttccaaggtttgagacatgcagggtccacagttactagtggtgatgatgtacattcttattaagcttggggaactaacttgcttaaaaaacacaagtcttaaaatattttttttggaccaggtatgctgtggaaaaaagtacttaggcacttaaataaggcatga

SEQ ID NO: 219909 - DNA, 720 bp, Homo Sapiens
  misc_feature (625)..(625): n is a, c, g, or t
accacaatttaaaaggcaaagggaaggggaagcatattaaagggaagtgccaaaatcgtttcagacaaacgcattctcaggcataacttatttcggtttagtttaaggtttgaaataagagtatttcaaaaaccaccaagtttatgacatagcatctaattcagggaaggaaaaggggacaaatggaaagtgaaaagtctgaagtagccttagctagtcagaaacacttatgtgcagccacataaaacatttccaaggtctctcaccactgagttctccagtggcaagtcctctaagataaaactacagtgccaatatcaagagcacatgggattgcttgattggtgcaatacacataagctacaaaaatgtatgatttcttaggcctttgtttctgttcaggtaatcgatattcttctagagtttagtttgaaagacactttgtagagaacactggcatggacctatttctacagaagtggaaataaaattttgagtaaaatacagaaaaataagataaatattaactcttgatatgactgggctaaatttgcaaaacaatatcccctttattaagactagttcaagtttaatctacaaataggacaaacaagatcaatacagntccctgaaaataacttgataagtaatttctttcaagtaggaaaatttacgccatcaacctctgtagcacaaataagggaaggaaagtagatttaa

SEQ ID NO: 219910 - DNA, 758 bp, Homo Sapiens
attgaaatcattgaaaattcaccctgttcccatctgtgtgacaatgagcatgcttttaggtccatagatgatgcaaataatgaataaaacctaatgcaaaaaaaaagggggggatagagtgaacatctaacacctgtccgggttgaataattctgtctacccaccctcaaacattcattttaccgggcttttttccatgaggtcatgtatacaaatgattcaatcatttatttacttaacgaggcactgaatggatgactatacgtagttctcaggcaaatgtgatgagaaccgtatcttctgtttcttaaccactctcttccttgggtttcttttctacgaaatggggaagaggtcactgtgacttcagttttacgagaaactgagtgcagagataagaaaggttcaacttgtgctctaagaagcacttgaacattcagtaatgctctggaaatttcttccaaaagcaattcattagtattctattttaccagaaaagaatgtgatttggtgctttcgcttgaaagcaacatcccctctttgggctgccccggaataatatatagcttctacatgtatacaacactttggtttttaaatgagcggcaccgtacgtttgcgtgttaaaatgcgggtatgactgaactaaacatcctcatatcctggacccaatcaccccgttcccgataaactatctcaaggaatgaactcaaaacaaggaaaatacttgctgtgtgaggatttaatcacaattgaga

SEQ ID NO: 219911 - DNA, 686 bp, Homo Sapiens
  misc_feature (609)..(609): n is a, c, g, or t
tacaaaaaaaatctctttacttatggagggaatatgagagcacctcagagcttaggaggagaccagtccattaaaacatctttttaaccgtggcaaagcctatggttctcaaacttgagcatgcaccaaagacccctggagggcttgttgaagactgctgggccttgcgctgggagtttcggattcagtaggtctggtgagggcaagatgtgctgatgctgttggcctagggaccacacattgagaattcctgctctgggcatctccctttctctccccattgcttcccacttctccaccttgccaagattgcttctttgctgaatgtcttcatgacatgccccattcttcaacactgtactttaaaaattttttattccctaaatctggcaattttaccaagcatttatgatgtctactcgcagtgacagaaaaatttcttcttttggccatagtttgttttgctggacttgttaaaaaccctgtaggtccatactcttcaacaatacttctcatcttccttctttttgatggtgctgttcccggcatttgtgttcatcttttggagacgttacacagaataagcatctttctgccattggcattaantctgagggatgaaataacctttttcctacctttttctttgtaccattttcttctaagagcgaaattgtgccgtgaca

SEQ ID NO: 219912 - DNA, 620 bp, Homo Sapiens
gccactgccacctttattatttagcactgttatgaaaatgtttaacccatgcagtcagaaattatgttataaattttgaaaaggaaaacatataattataacataattgataggatttctcacctggaaaaactcaaaaggatcaaatgaatatctctaaaattaatagatttcaataaattgccaatttaaaataatcgatgcaaataaattcttctcctatatagcaaaaatgaccacataggtaacatattaaaagctccaataagcagtatcaacgtgttccctgtatgtctgtattacctaggaacatatttattacaaattatataggatttaagtaaaactctcttgaaggatatataaagtttttcagaaacaaggcaacatgtttctggaaagcaatgcaattctgtagtcctcacagtcatatcaatttaagagaatcccaaccaaattctcaatatatttttgggggaagaatctattaactgtaaaattcatctggtaaaataaacatgtcagaatcgtcagaatattggtaaaaataaaaaagatcaaggagagggtttacattaaaaagaacaaagtgccatttttaactattttcaaggtggtgt

SEQ ID NO: 219913 - DNA, 741 bp, Homo Sapiens
tagaaaaaacacagcttctgtaatcttttctctttctctttcctggaaattagaacaaattttttgaaggaagaaatattgtcaacattataaccttgagtgaagcattattactttagtaaatatctcgctaagatactgaacatcaaaattaaaaatcaaacaacttctaaatgtatttatttgcatttttatgctgtgtacttttgaatatagtgattttattatttttagtaaaatttcatgaactgctgtgtactttggtttcacacactcaacaccataccaataatgaaattattagtaatttcaagttactaattgattggctgtcatgtgctataaatgataatgccatctgtgaaccagcaaggcatagacagaattgtttggaaaaaagcctgattagtaccagttgcattaattctaactccccataatttagacctttttttttcttacaaaaagttgaaagaatattattgtagaaaacttagcacctttaataaagcatacttttctcacacttcttcctttgtctttcagaagtaaattatctacaggttcctttagtgaaagtctctcaggccttatttgtctgaaaatggtattattttgcattattttcttaaagcagtattggtgggtaaaaatttgagattggatggtattttcttggcacattttgaagttttcctggagttgttaaaggaatatatcccgttgttttttgcttctttt

SEQ ID NO: 219914 - DNA, 669 bp, Homo Sapiens
  misc_feature (649)..(649): n is a, c, g, or t
atttctaaagaaaagaagtttaattggctcacagttccacatggctggagaggcctcaggaaaggtacaatcatggcggaagccacaggggaagcaaggcacgtcttaccatggcacagcaggagagagagagcaaagggagaagtgctgcacttttaaaccatcagatttcgtgagaactcgttcactatcaacagaacagcaagggggaaatccctccccatgatccaatcacctcccaccaggtccctcccctgacatgcggggattacaatttgacatgagatttgggtggggacacagagccaaactatatcatttggttaaagaagtaagtggcctgtatttaacttttgggactgggaaaatgaattaaaataattctttattttacagatattaaagtaattgtgaaataaaagaaaaaattgtctgataaaaccacatctcatagaaacccaatgaatgcaacacatctaaaattttatctgcaaaaaacgagagaagacttgcccttctgtcagtaaagcacagataaagagaagtaaacttttctggattgaggcaataattgggcttcaagaggtcacgtgacaactgaggcttgcagttcaaatggtacacctcttaagaatggactttccttggnacagtgcttttcttagggca

SEQ ID NO: 219915 - DNA, 698 bp, Homo Sapiens
cttaaatcagccagtttctgttgcttgcaactaacaactcacgatgtttgcagagatcatgtttgtctcattcgacgctgtcaaaaaggttctgaacataatctattgcacctctgtcctacagactgagagttcctcgaaacagccactttactcaatcatgtttatacccttagtgttaagtgccggaagaatatgtactaaatgaatgaatggactgggctgaagagcaatgatttaccaacactggttatagttcatgcagccccttgacctaactgaacacagcattattacaaataagacatgatcccagctttcaggacctcttatatgaggcgcgaaaggcaggtaaacggattttcacaatgccaggtgagaagtgctgtaacaaaggttatgtacagaacagaaggcaaccaattcccagacacgggtcagagaagactctccagaagtaccaactgtatgcaatctgttaagttagtggacgagaggccaaatcggtgcagaccgagcaaccggtgcaaaggccaggagggggaaagctccaggcagcccgagagggcaccgtggcccgggcagggccgggcagtgggcgcagccggagaggtggaccctcccaggaggcggaaagccgcgtcctagtaccctcatcaaagaaaactgcattcctggccccgatcggccacgtgtgc

SEQ ID NO: 219916 - DNA, 705 bp, Homo Sapiens
  misc_feature (604)..(604): n is a, c, g, or t
gcaagttgaataaaccattctcaaaagccataggtaattactgctcaaaagctaatctttgccaaactttttctgtgaaatgcacctgtctataaattcagcgtaacttctgataacaagcttactttctgtctctgacaacacagtaacaatcaggacttaaatgttaagataccaaaattcatctcattcttccatcatcatatatcgcatgaatatgacaatgaacacaagcagtccaagctgatagtctaagtataatctagaagacattttaactgaaagaggtagtaagctacttctccccacctttttttaaacagccattctcagaaaccacagagtcaaaaactctgaccagagggaaattcaagttttgaatcacatctcaggatgttaggtaaccgtagtcctagtcttcccagctgatgaactattaatatttccaaagcataaatagcttatagcagaaatcacactgagaactttgtcattacatacaaaaagcaaagctttccttagatgacaaaattctaaagcagtaattcttaaattttaccatgcagcaaaatcatttggagggcctgttagaacacagactgangcctgaaactgcacttacaagttctcaagtgatgcccgtgctgctgctccagggaccatactctgacaatattttggagaatctgaaactgtgcaaatatt

SEQ ID NO: 219917 - DNA, 748 bp, Homo Sapiens
ttagtgattgccctttttagtaacttctaattttagattttagggcaacataatcagatagacttgttgttatgtgaaattctcatgtacaaattaagtttagtgataaagagaatgatgacagtaattataaaattatatgcaaagcattaatctacaaagggaatagtaaaccaaaaagttaaaccaaaaagttatgttttccccaaaatgcaaacgtcaacattgtaaatagaaagttaacacaacaccaagcgccacacttcatttcttgtttggttctcacaagccttcagctactaattgagtaaaagaaaaatccccactcctaatcttgttttttacatacttggaaggactagcatatcttttccccttttatcactcatttgcggaaatgacttagaattgggagtagatgacagataggagctaccgaggagactagggaaatgcaggtttactaacctttaaaatatttattccaacggctaaacctctaccctgattactgaagcttgaactaggtagtagcactgtctgtgccagttgtaggcaaagggaaaaaagttcattcgttggtcttaggaaagaacatccattcatgtttcaaaaaaaaaaaaaaaaaaatgagcctcgtgccgaattcttggcctcgagggccaaattccctatagtgaggtcgttttaaattcgtaatcatgtcatagcttgtttctgggtgaaaatgttatccgcttcacatttc

SEQ ID NO: 219918 - DNA, 678 bp, Homo Sapiens
gagagagcgagtcttgctatgttgcccaggctggtctgtcttggcctcccacagtgctagggtcacaggtgtgatccactgtgcctggccgaggggtaaactttctgatatggattgagccagcacagaaccttccccaagctctactcttttagagacagggcctcgctcagtcgcccaggctggatggagtgcaaactatactcttaagtgacaaaattcacggcgcagagaggtgggtgtggcggggaaggacaccggtgaacacatcgccttgcaaggatggctgtccccggtggcccggaaacaactaaagcaggggcctgagaacggagggcagcgggactcgatcgggggcaggactctagcctcgaccgcactccctcccgtaatgtttgaggattttcttttatcacccaaatcgttcattgtccatttttaaaacccagttattttttcctgggtttgggtgcctgcctcaaacattgccttaccgacacagggcaacaatccccacgcctgtgggggcctcgtgccgaattcttggcctcgagggccaaattccctatagtgagtcgtattaaattcgtaatcatgtcatagctgtttcctgtgtgaaattgttatccggtcacaattccacacaacatacgagccggaagcataaagtgtaaagcc

SEQ ID NO: 219919 - DNA, 638 bp, Homo Sapiens
atgcttgcagagcaaccccaataacttgatcttcaagacgggaattacttctgattacactctgagaatatctgtcatctgcctttgacaccttataagttgattcttgagcattaatttctccatcagatagcctttgggttgatgactcaagagatgcttgtggctgcaacacctgtaactcttgcattggaaaaccatcttcttgctttgaagatggatacacatctgagtcaagctttctttcagcataagactttgggtcaggggaagttatgttattttgtaatgtctgacaatgagtagaggatgcaaaagatgatgactggacagcaggcaaaaacttctgggactggggagatgatgactcttgagtctgaacattttgggaagaatgcatagaaatataattctgggtcgggctagagtctggcaaattctgagcccgagaggcagaagaataagaaagagaaggggctgttaatgttagggactcccctgaagcatagctttctgaaagactaacaactgacaaaacttgtgattgaaatgaatagctaacctgtgtctggctaactggtgataaaaccctgaaagtgacccgatgaagtactttgagactgatttactgaaaacaa

SEQ ID NO: 219920 - DNA, 700 bp, Homo Sapiens
agacagggctttgtttcatcacccgggttggagtgcagtggcgcgatcttggatcactgaatcctcaacctcccaggctcaagtgatcctcccacctcagcttcccaagtagctgggactaaaggtgcgtgccaccatgcccagctaattttgtttttttgtagagacagggttttgctgcgttgcccaggctggtctcgaacccctgtgctcaagcgctctgcccacctcagcctcccacagtgctgcgatcacagcatgagcccccgcgcctggctggcatcatctcatttctgactgtctcattagctcggcttccttgaggtgagctcccctgacgctggccctgcctgggctctggtgacatgacaatgatcctgggagcacttccttcgccaccagggtgggggctgcgtcagcgcctcttctgtgggatgttgtcaagacccaccctgagtctcccttgtcattttccaccacagttgtgctctgtgtacgttataaatggctatttatctatttgtgtgttttctatcatctccataggtttcttgagggagggagagagactggcacatgctcagcctgatctctggagtaaacttccatggtgttctagaggtccctgctcaacctcccctcctcggagtcagtccaacttcctggcccaaatttgaaggttcccgggcaagccgaaggc

SEQ ID NO: 219921 - DNA, 721 bp, Homo Sapiens
  misc_feature (634)..(634): n is a, c, g, or t
  misc_feature (670)..(670): n is a, c, g, or t
  misc_feature (675)..(675): n is a, c, g, or t
  misc_feature (681)..(681): n is a, c, g, or t
  misc_feature (707)..(707): n is a, c, g, or t
  misc_feature (709)..(709): n is a, c, g, or t
tcctactgcatgaactgacaaatttctggcattcatacatatttaaacatttagtgctaatatttgtacagaaaaaagttaataatactaaaacatatgttactatgatttcacttttagcctacatcatatactaatttccccttttacatgcagctttaatattgtccaaacaatggcacaaataaagaaacaaagtcaaccatctattccccactgcccaccaccccatccccacatcaaaccgttcaggactctcttccccagccgggctggagtggccctcgggctgctcagtgagacccggacccaaggccactggagcgagggagctgattcctcctcctctggggcacaccttcctgtaaacgtggctggggccaacacggccccagagccaagggaagctgctctctctgggttgcaagccaaccagttttgcagcaagaagagaaaattatcatcaggtgagggtagggtatgtgtgtgattcgggaaggggacagggagggttcccggtgatagcttgtccaagcctcagaatgaagtctgccttcagacaagacactggcagaaaaacctcagaagaaaactccaagccttttgagaaggaaaggagaaagaatgtgtcagnctgtgtcagggatggatcgcagatgccaggatgccnctgtnttttcnccaatggggtgaaagcagaacctttncnggctgtgattaa

SEQ ID NO: 219922 - DNA, 634 bp, Homo Sapiens
catgttttcataaactgctataaattgattttgaaaaacatccctagagttaaaaatttcagaggtttattatatctctacacaagattccttttacacagcagatcctcaaataacatcttttgttcgacattgtttcgttaaaacactgagaaggaaaaaaaaattattcccagttggggttactgttctgtgtagagtctgcacattctccccaagtctgtgtgggttttctctgggcacttcaatttcctcccacatcccaaagatgtgtatgttaggttacttagcttgtctaaatgatctcagtctgaacgactatgggtgtgtgtgtggttgcaatgcaccctgcaatggaatagcaacctgtcagggttggtccccactttgctactagctgatgggatagatttcagccacccacaaccctgaattggaataactgcataaatcattatcttatttgcttttattaatctttcttaaatgtatctataactcacatttgtttttagtctttatctacaagtctgggggtatttttgtgatcagagatatgctttaggaactcaacttactcatatcaattaacctatggtagaactgattttcttatacctcatcttacttaagg

SEQ ID NO: 219923 - DNA, 644 bp, Homo Sapiens
ttttattccttctgaaccacatactttgttctttttgtttattactcatatacttaaagagcagtggtgaaaaaggcccttagaaataatttcatctactgccctcaggaaatctgaagcagatctgcaggcatatcttatctttggtttgtagcttctaccctccttacaatcccatacatttaaaattccaatgtataagtcttgctggcttcattacaatccacctcagaataattagacacagagcaaattgtgggataatccaaccttagttatattttcttctcagtccatgagacaaaaaaggattcaaacaaaataaatacatgcttgacaaaaatgggacaaaagaagaaacaaatgaaaggaataatgaacctataaattttcaaaatctataaacattgaactaagacttgatgtacttgatatacctgctgccactaaaattgactttcatttctcacaattaatcgcctttctgctccaacaagttcctaaaatctacacaatttttccagtactgagtaaacttatcctctactaatatgatttttccctcgaagcagaggattcagaaacacatacagtcttgcagcacacatagctaaatttattttttctaaatgccaataccctga

SEQ ID NO: 219924 - DNA, 711 bp, Homo Sapiens
atatgtcagccctcagtatgggcaattttgcatctgcaaccaacttggatcaaaaatatggtattgtgggacacgaaagctgcaaaaataggccagctttttgtatccacaagttctcaacaggcaactgtggggcttgagtggattttggaatccacaggtggtcctggaactggtccccagcagacagtgagggatactacacacagacatatataggcacacaaaagataaggagggcagagagtgatcatccattaaatcccaatgaaaaccaatctactaaattctgagataaattttcctatcctggctaagttccagaccgaaaataagtggacaacataaaataatgctacagaactacagtgaggattcctacatatataagaacattaaaaaaaaggagtattatactgtgttcaggggcaaccctgtccctcacccagaaattaggttgcagctgaagtagctgctattcccttgaaaatatggatctgttctggacagaataagaacacactggaaataacagtgttaatatacagatacctcttgtttccagaccgactataaacaattcaaaggcagaaactttgggctctactttttgattcttttacatgcatagcagttattaacacatggtaggtgtgtaaatatttacctaatggatgagggcagcacagtttaaaaaaattgaaaagttta

SEQ ID NO: 219925 - DNA, 750 bp, Homo Sapiens
tttaataacattgtttaataaaaaactacatatttaacagaaaagttgttaaagctccaaggtaaaggcacattgaaggagaatgctttttaaatccaattttcagggaattcactttacatgtaaataaagcagaaaatgcaggaaaattattttgaagtttttcatcacttaacaatttctgggaaacaaagttcatcctattttcccatagaggacccctgttaaaatataagattatattcccctatactaggattcagcattcaaataaatcactagtccaacttcaatgtcgtagaacccaaaaaaaatataactatcctaaaaatatataatttaaaatataatttatagttatactaaatgggaataaacatatggcacacattaattacaaaggatacttcatgtactagaaagtgcacctgtaagaaaattaataaatgacctaaaactaaagcatttaggataacaaacatcattttacttgctatcttttagaatgctgctagggaaatcgatggcacttaaaaaaaaaagttgtccaaatatttcaactttttttggatacgttttcctgaaataagtggaggcattcagtcacctcaatgctacaagtgtttcttcaaataaaacattttcaaaaataaaaagctgacctaatatatgtctccttcatcttttcttaccttctcaaacttgtaagggcttagcatcagatgaaaggtcactttgcctagcacttac

SEQ ID NO: 219926 - DNA, 682 bp, Homo Sapiens
aataggtatggaaggaaagtgtgatttgagacaactctagggtcttaaatcccagaatttataatagatatctccctgaagttaaaacataagcctttttgctgcaatggaagcaagccacttaaggtcagaaaggtactgctttacttttccgcatttccaaggtgaggtcttcctctaaaggaagattagctcttggcaatctgggagttggctgaactggtcagaaagcaaaaggatcacacagtttgaggaagaggagtggtggtaaaaatccctaatgtcacagtctcctctgtgtctagagcacaatgttcatgatacaaatgagttagctttctggcagaaaagaaagaaggtgggtgagaagccaggtctttgatctgcatctatatacatcatcaggttcatgtttgagtttatataccccaggcccagacacagcttccctggttctaaatctcctgtaaagagccccaggctactccctgttcacaggttataaactgagagaaacaaaggaaaaaacaggggactcacaggagaagctggaaagaattgcagtaagctctttgaactttccagagtctagaatgctctccacttagaaagggaatccctttcatttttttctagccatccccagtgacttaagctctaatttagttccagtctaagagag

SEQ ID NO: 219927 - DNA, 518 bp, Homo Sapiens
acttggggtcttactcatgtggggtcttgctcatgtcgcccaagctggggagctgtggtggggtcataggtgattgtaacctcgaattcctgggctcaatcctcagcctcctgtggagctaggactacaagcgtgtaccatcatgcccaactattttttttttttcttctagggatgggttgccatgttttgctgtgttgcccaggctggtgttgaactactgcctcaagcagtcctcctgccttagcctcccagagtgttggggttacagatgtgagctaccacgtccacccctaaactaactttcattatgtgaaatctcttagttcctttttttctaaagctcagcatagtaatcacaaaagtattctatgagagtgaaactggtgttctttatatgcaattagttttgaatggttttatttgttgaaaaatatttaaagcataacaaacactataaaagattatactggattaatatcccacccaaagggttttttggcttctaatggattaaa

SEQ ID NO: 219928 - DNA, 754 bp, Homo Sapiens
tgctgggccttaacattgcagaaattgtttagaatgacataattgagaggagattttcagaaacatacttattaattttcatgagaaaatcagattgaatatcaccaactagtcagtaacaatttcaaatgaataatttcataggtgaacacacaggtcatgataaaaacaattagaataaaaggagtctgtatgattccatggaaccaaagtttaaaaacacagttttctattgcttgagataaatccagtaaatccgaatgtgaccttgacttgtcaggtcaagacaccaattaatgtttgctccccttcactccgacccatgcctccaggcaagaaagcaattaagcttttgttaaaaatcaattatctcttcacttatatgagggacctagaacaggcaaattcagagggacagaaagtgttatagaggttaccagggcctgggagggaaaggagcagggaatgaggagttattgtttaatgggtacggtttcagtttaggatgatgaaaaagttctggaaatgcgtggtgatggttgtacttaataccattgaattgtatatttaaaaatggtgaaaatggtaagttctatattacatatattttactacaataaaaaaattggtgtcttatttttaaaaattcagaaaaaaggtctttaatcaattcttttacaaaataatgtgggacctaagcagttccccaaattagtctgttcaccagaaatcccttggtgtgccttattagaag

SEQ ID NO: 219929 - DNA, 614 bp, Homo Sapiens
ttgattctgtctttatgaaactttgctttaacccaacattgtttaaatcccgacctggtttctcgtgagcttgaagccagggtgcccacactctgcaaaagaagaaaaatgccagtatgagtccttgaggctcagtgttgttgtgcagtccgtggacaggacaatgtcctcatttcaaggtttcatttttggaggaaaaaaaattcctcaggatgcaggatgccctgcatcccataatgggtatgcccccattgaaaccagctctgggagggtgaccaaactaaaaaggaaacagttccaagcagaaggacacaaattaccagcagagtcattattactcacagcaattcaggcccagggtctatgtggtgcagggtttctgaaagccggcctatacctgggaaggagggagagaaccagaggcctggatgctgggtggaggttctgtgatttactttgttacaaatttaagaataaaacctgctggatcaggagcttttcctatctcctcaaataaacctggatcccaagagaacagaaaggaaaaagtgaatgttggaaaagaattggagtgcaagctaagaagtccttgagggagggaggagaaggtgttt

SEQ ID NO: 219930 - DNA, 615 bp, Homo Sapiens
atgttttgcttttagctattttctgctttcctatcagtccaccaagtttacttagactttttttcttcttctcaagatatttattggggtacaatactttgtgggaaaacttcataattttcacaggactttctcttttttcccactagttttcttttactgctctagggcatgatccacatgacaaactatgattaatgccatccatcttcctggccctcctcagtacttaaaatattcagacttttaattttttttttttttttttttagagatggagtctcatgatatttcccaggctgaagtggctcttcacaggtgcaatcatagcacaccacagccttgcactcctgaacttaagcaatcctcctgcctcagcctcctcagtagctggaactacaagcatgcaccactgtgtctggcaagaatttttattttatgcctcaccctttaatgacttctaatttcataagataaaatccacatgctttattattcgtggtgcttaaggccctggaaggtctggctcctgctgctttttcctgtgctactttccccttgctgctacacagcaagtgcactgggcttccttgttttggactcacaaagcccctt

SEQ ID NO: 219931 - DNA, 620 bp, Homo Sapiens; identical to SEQ ID NO: 58601
  misc_feature (534)..(534): n is a, c, g, or t

SEQ ID NO: 219932 - DNA, 654 bp, Homo Sapiens
aataaattccagccttctctttcttgctgcttcctcagatattttcctcctttcttctccagtattcactctcttctctggagtttgatgggcctgtttatgtttttgcagtggtttcttttcgtgtaattttttatctccatatttcttatatgctaaaggtattccatatttagcggcaggctttgtaattttctgagcaggcataacagaaatcgagttttgtcctgaagctggtcttttagctggtataggctgtgatccaaacttcgaaaatgtttttagacaaaattcttctgcaataagctgaggagagagaaacttttcaatgcgtttggctataaaacctttctccaatatggagttgactgatggtctatccctaggatttcttttaaataactgagacaccaaactgcggagatcataggaataatgcaaagacacaggtggaaaagatccagatattatcttcagtaccaggtttttcatactgccagcttcaaaagcatgtttaagtgtacacagctcataaaggacacaccccagagcccaaatgtccttttattattgtaagtttgttttcacagatttcaggtgacaagtagattggggcccctatcaagttcggccccctctccagtcttttagaac

SEQ ID NO: 219933 - DNA, 620 bp, Homo Sapiens
tccaaacattagttctgattacgttatttaacaaatacatttttaaaatgggacctgatatatcaagacaattataaattatagaaataccacactaactgataacagactaaactcatctgttaagaattaaccagcagtcaaacaataatatagtttaatcacttattatttgccaggtcttagctttcatatattactaaatctttgattctcacaacaattctatcaggtaagtaacaatattatgcccattttgatgatgagggaatagatgcacagagtggttaaataacttgcccaaggtcacataactaggaaatggcagagcttgggttccacccttgcaatctagttccaaaccccagagctcataaacatatttaaggccttctgaaatggccaggctagaggtatcactctcgcagaggcaactatcatctctcagttaaaagctgcatctttgagatcaagcatctttgcatttttctgtctttataagcttgtgtagcaatagttactaattacaaggacagaagggcttttctagcatactatcatacaccctatttttacaggcccttgggagaggtttgattggatttcccccttgacacaaa

SEQ ID NO: 219934 - DNA, 699 bp, Homo Sapiens
  misc_feature (605)..(605): n is a, c, g, or t
  misc_feature (699)..(699): n is a, c, g, or t
aatttgtgaatctatgattttttgaaagtaaaaatattttttaaagtcctaataaggaatcaggaggtaagacctccataaaaagctttattattgaatgatacctgatctcacaaaaaacaaacaactaagcagaaaatattcttgaactaacccagaccctttcttcccatttgatgacctagtattgctggtaactcaacataaaattacatccctagggaaaaaaaataaagtcactctaaagagaaattgaaaatgagaaaaaggagagtaaactttaacacaatatgctaatatgaattaaattattagatatttaaaaaatctgaaatagcaacttaaaaactcagaactggacaaacaaaatgcagatgtgaatgactggctaaaatcaggaaaaaaattcggagaaaaagacaaacacatatcagatgtgaaggcaattataaagtatctaaggaagaagagatacaaccaaatgtaaaataagggattttgaagatataaatgaaaagagccaagaaaatgaaacaaaaaggctaaaagaaaaatcagtaagtgattaaatgtgaagtcaggcaaagatctaatagaactaattngagtcctggaaataagttggaaacgcgtttctcaaaggtggtcaattagaccaatctgggatgcgagagaatctatgacaacccgacctgcctn

SEQ ID NO: 219935 - DNA, 537 bp, Homo Sapiens
taaaacaagaaaaatgatttttatttttcttttttccataaagactttaaagcccctctacgtggaattttcttctgagacaagcagtatatgcccttacaattgctggaaaataattacactaaaaatactcttcccaaacataggatgaatcaactgtatttttataatatccatttcattaggcttggaagatataaatagctttacatggaaaaaaaaccttgaattcaatcaactctttttgaatactgtaaaccaacgttaggctagaggagccgacggcgcagcctggctctatcattcgcagaagaaacccttgataaatgattaaactccttgagctttttttattactcatatataaaatgggaatcatacctacctcaaagcattgacaggaggattaaatgtgataaagtatataaagtacatacaatagtgccctgaaagggactccatacatggtagctattatccccaagacttttttttttaaggaaaacctacttttaaaggtaattaaactggtttact

SEQ ID NO: 219936 - DNA, 540 bp, Homo Sapiens
agatggaatctcactctgttgcccaggctggaaggctggattgtagtggcgcaatcttggctcactgcaacctccacctcccgggtttgagcaattatcctggctcagcctcccaagtagctgggactacaggcgtgcacaaccacacccagctaatttttgtatttttagtagacaggccttcaccatgctggccaggctgttctcgaactcctgacctcaaatgacccacctgccttggcctctcaaagtactggcattacaggcgtgagccaccgtgcttggccaactaatttagttttgatgcactgtcagatagactaatcactgtctaagattttcctgaatctctgcttcatgttatgcttttcaaggagatgataatagcttgttaaccaccattcacagctcttcaactactcacaagccttcaagaacttacccttaagagcccactgaatattaaatattaaacaacttcaaagaatggctctaagacaattttgctttaatgagcttgataaaaataatccgaaggtt

SEQ ID NO: 219937 - DNA, 540 bp, Homo Sapiens
tataattagcctaacgttgaatttcacagatataaagatctaaattcaagttatgcaaacaactgatcaggcgaatagcaaggatgtaaagacaatggaaaaattttgagaatgccaaactctgtgtacacctggcacttccatctttcctgcaactttctgtcttccttcttcaatacagcattccagaaaaactcagcttgcacaccaggccgtctgggcattaatacctctctgcctttgctcatgctatttcctctgttgtgatgcctttctcctttccctgtgtctatctaaaccccagtccactcttcaaggaccattcccaagatgaaaacttccccaatgactccagtacacactgactggccccttttctttgcttctatatgctgtattacaaatgcctaaatgttcacaaattgttcatttttgtttggctcttacactgaacggatggcttttttttgcctttttgatttttgtcaaagggggggagcgggcagggcctattccactactttggggcattacagaaat

SEQ ID NO: 219938 - DNA, 593 bp, Homo Sapiens
ggtggcaaatggtgaggagagaggaataagcatctatcattttaagcatcaaatagtacaaaaagtattctgaactgaaaagaaattactaccaattatagaatatttaatattaaaacacattttactcttccaagatacacagagtagagaaaattaacattcctggcacttactatgtcacatctggaaatatctcagagataaaagatccattttacagattaatgaggttcaacccaattagtaattgcgccaaagtctaagtgtgaatgccagagtgatgaattgaacccaggtttgtctacaaaaccactgttgcgactatggcattcctttgtacttgaaaatatttaataagatcaatttccaggtccaccaatgtttgttaggtaaccaatcaagccagagtgttagaaaaggaataggagttggcatgcctaatgaacaccaagctagtgggaggaccagaaaactagttattaaaaagcattaggaaaaaaaaacaagtaaaaaacgtttgggtaaaaaaaaaccaccaaattttggcttgggcaaatggttatcattaacatttttttaaaaacaaaaaa

SEQ ID NO: 219939 - DNA, 525 bp, Homo Sapiens
  misc_feature (447)..(447): n is a, c, g, or t
accattcttctgtacaaattgaatataaaaattcattttagggtcctacgaagtgttctcttattcctttttactctacaggttggatgtacaaattccttcagagaacatgcattgaactacattcaaggcagtgtagtagatactgtgagaaatattgtaaagcctcaaatgtgactataagtaatgaaaccaattccacaaaccacatgtcaaaattagtcttattacttcacaatcatactgtattctagccacatcccaccctccaagaagaaacgcttcagatgatagaaataacctatatttttcacaataataaccatactaccaagaattacaaagaatcaaatgcttggtactgaagtacttactcaaggaattatttttaaaagccatctgcaatatgtgtcaagagccttaaaaatattccctttctcaaccagngttcctcctctaaatcccagaacacagaaaatgattcgagtggctgctttctcagttctcccaaggatggcacttgag

SEQ ID NO: 219940 - DNA, 681 bp, Homo Sapiens
ttttcatttctcttctagactacttacgaaatgttttgttttaactggtcttaggtaaggcacagacattaatatcttttaaaaggtacctaagtgattgtggtgaactgttagtgttgaaacccagtggtgtggaaccagccttccctgtgtccatcaacagaatcactgggcccccagtcacccagcctcggctccagcctcatccatgtccccatccatgaccccatccgggctgctgctggactgctgcaatagtctactcataattgggctttcctagtccatcctacctgttataaaagtgtgactaaagaaatgatcattgaaaacaataaaccaacacaggcaaactatacatttatataaatgtttttcttttaaagggagaaccatttaaccccattcaggggctagtggcttgctttaaatatattgccacgtatcttcagaacttttctgtggaagccagatctctctgcatgacttgagttttggtgactgactcctgtgagaatgagccattttcaagttcactgtcatttgcagccaacagatctactggatgagtcggagtgagcaaaaaatcattacaaagcaagtgtggcatgagatctgtacttagtgtagtacctgaaagaacttcaaataattaccttccaaattctttaaaaatttaaa

SEQ ID NO: 219941 - DNA, 726 bp, Homo Sapiens
acagaacaaagtagcttcttcctttatcattcctctacccctgaaccactacacagattgctttgtctttgtatttaacattccaggtcttattattgatgctttcggagagctaagagaccagcaggaacaagtacgagaagatatggaggtaatgttactctaactactaatcccagctctattttaatatccccagaagcaaatagattttttaaacaataggttttactattacttagggccagtactaagcaagaacgcagtttgttttccatgccctgttctctgcaccctgccatacccctgccaggccggccactctgctgcctcctccactgtcccacaataggagggagcagtatcctcagctaatcaggagctaagtgtatggcactactgagtgaatgactaatagccaatgtatggcactactgagtgaatgactaatagccaaaagcattagaaagaaagttttcattatccttcaattcgatagaatcatgacagtttcctctcctgcctatattatgccaacaaatgccttttctgcctgttatttttcttagactaaatgtttcatctgtgggattggcaatgactactttgacacaacccctcatggttttgaaacacatacatttccagagcacaacttagcccacttcttgtgagtattcttggtttacaaaagttattggcagctggtacggaaataaagcccat

SEQ ID NO: 219942 - DNA, 661 bp, Homo Sapiens
taagagcagagtctcattatgttgcccagtctggagtacaatgatgcaatcgtagctcactttagcctcacactcttgggttcaagtgattctcccacctcagcctcccaagtagctaggactacagccatatgccaccatggccagctaatatttttattttttgcagaaataggggtcttgctatgttgcccaggcttgtcttgaactcttggcctcaagtgatcctcacgccttggcctcccaatatcattatctgaattcacacttgaactgaaaataataaagtataaaagctttataaaattgtttaacctatgaaagaattgtacatggagctttatataacaacatcatatgaacaaaccaatcttttgtatcaaaatcatgttctgactcataatttgagtgatatttctcaaatatggggtaaggagtacatgcaagatggaatggagacgtgagtttagtgtagctcattaacacggtcttcttcctgaaaaaaaatgccaatgttttccttcctagccagcatatgtgaagacttctgatgagacaaaaattgctaaaggaagtcttagaggtttaaagctggaagaaataaagctgtgcaagcattgtttttccagaacaagccagaaaggtacaggaaagttttgag

SEQ ID NO: 219943 - DNA, 726 bp, Homo Sapiens
  misc_feature (656)..(656): n is a, c, g, or t
tcaaaaacatcttttattgattttgtggcaagtactccacagtcaataactcgcacatctgcatatggtctgcttgcagcatcggtcttcagattttcaatttgttcgattacttcaaaaccagaaataaccagtccaaagactacatgcaccccatccaggtgtggagcaggctttgtggtactttggagcgcacggtgtaacactctttatgaaaaactgggaaccattggtatgtttccctcgatttgccattgataaaaggaacgctctgtcatgtttgagaataaagttttcatctgtttgaagaaaacacaaatttgtcagtctccaattataagtcactttaaagtaatgttcaagttataaatagaaagcaaaagatgaaattcctcttctggtcagtacagataacttgactgaacactcagaaaagaaaaatttaagctaatcaaataacaaaagcataaaaaggccaaaagatactaattaaagccttgaggaaaagaacatatatttaatacttcacacaaacagccttagaacagtcacttttagtagtaacatactttggctaaatgatatttaaattattaactttcagggaaaactaataaaattttagaaaaatctttagcttactttctccaaatttncaattagcttgcctaatgtgctatacatggaagaaagtcaattaatcttttttaggtggttaaattttta

SEQ ID NO: 219944 - DNA, 633 bp, Homo Sapiens
gtagagatggagttttgccatgttggtcaggctggtctcgaactcctgacctcaggtgatcctctcacctcggccttccaaagtactgggatcacaggcatgaaccacagcgcccagccattgactgccatcttgatttagctggattcatgacaggccacctggacaccttctgcacacacctgcgtcctaccccacatggggtcagggcagagccaatcaccgggcaagccgggagtagagcagggagcagagtctgagctgctcatccctgatgaagggcatttccttctctcatttagggaaaactattgtgagtctgttttaaaacctcacatattccttatatctcatggaataggtaaaagaaggccaagaagttacagaaagggacatgttagtgacagaagcaaattgaccttgaggaccctttctgcttccccctctgtgaagcccctcctgctacacggggctttctggggctgagagaaccccctccccacattccaggctggacctaaggtcagctgtgagaaatcagaaaaacaaaaggaagagagtctgcacaaatgaattgagagggttcacgggagaatttggacttgtttgggccttggtggatacacggctgca

SEQ ID NO: 219945 - DNA, 692 bp, Homo Sapiens
  misc_feature (626)..(626): n is a, c, g, or t
  misc_feature (642)..(642): n is a, c, g, or t
tttataacatttcctttatttatcaacagcaacgatatgacattacaaagtgacccgtgacatcttttttaatcttgcacacgcactgcagcaaggttaatcctgtatgtgaaaacctctgagtgactatctcaaagtgtatatgtcatataacctgctgagttttctgatattgtaatactagatacaagatgtctgaataactccttacatttataaattcttatttaattttatagctttaatgcggtccatcatttctaataatgatattggctacaagaataatgatcatattatttatcatataatttaccatttgtaaagcaacaaattgcccattaacaatgaaattgtagttacagcatctaaaattattagaaaattatattagcatggaaatatgttcatgatatatcactgagtgaaaaaaatctggctaccaaatatgtagtctgactcattcttatttcaaataataaaaaatatgtgtatgtttgaaaatatgcacattagtatttggattttatatatattatggacatcattatatatatatgcatacatatttgtatatacacccagatagcacaggagagagacagagtgggagagaagaaagaagnaagaggaactattctnttccttttttttcaacttaaattcagcttccggggaaaggtccacctgaa

SEQ ID NO: 219946 - DNA, 696 bp, Homo Sapiens
ctgctggtggcattccattgtacagatataccagtttgtttaactgttcacctgctgaaggacattttggttgtttccagtatcttactattataaactgcatatgtatagtgtgtgtgtacatacataaacactaatagtataaacagtatatacataataatagtatatataaatagtatgtataataaggatgctaggaacttccatatacaggtttttgtgggcatgtaagttttcatttatctaggataaatgctcaagagtgtgactgctgggtatcatggtaagtacatgtttagttatgtaaaaaactgccaaactcttttccagagtagctgtaccattttacatgctcataataccttactttcaaagaactatgtgtgatggcttttttttcctagcctaatctgtgattaacctattgcttttttccaaaacttttactctttaaaaatgaaataatttattggttcacaacctattccaaactcagacattaatgcaaatacaaagatctgaatcagaaactctgtaaccaaagcaacaactccgcaagtttttcttcctgtcatacctttgcaaggtactctattttccattataggtgagacaggctttattggccttctagaggaaaaacattttcatatttcttaaaaagggggtcaccaatttgatggggagaacttt

SEQ ID NO: 219947 - DNA, 719 bp, Homo Sapiens
ctggtgtccagttctctcaattaagaatttcatttcgtagtgtggaagcataacaagtgcctctgggtccccagtcttggtgctgtgaatggggttagtggctgtgccatgactgtatgacctggccatcacaggtgaacttacaacatagtccctagcctcaaaggcatacgtgggtttccctatcgtcctcttcatgagttctttgtgaaaacagaaagactgagtctgccaataaccagcaagagaacaagataaaataaataaaattaaccataagactttaacatatgacaaacaactggtaaggattttcaaaatcttttggtcaactttgatggtatttttccatacaatgaactctaaaatatgaaaaacgtacatccatattttagatataaaagtctcttgcacaggccagaaaatgaaactttaatttaagcaataaaattcccctttgtagactgcaaatggagaacatgctatctagcttcatttttcttcaacttacataaaaatgaaacaatggttaatgttctggcggcatctctaaacatattcagtgaaacaaaatttccttacaaatgtcaacagcttacaacaaataacattttatcctgtttaattatttagaaacaaaatcagttatgctgagatatgtttgcatgggaattatataccttgatccatgaaacaaatttttggccattggatcttaa

SEQ ID NO: 219948 - DNA, 689 bp, Homo Sapiens
aaaagatgaaagctgaaaaaagttaggtttggtgtaggttacaccatggatgttggtgcctcctactggtcctaacaaaaatataagtggtaccagcaggcactacttcgcataccaatgtgaagtaaaaattccctttcatctgtggtcaagtatggaaaaattatgaaggtcctcattaaatccacattttttaacccattaaattatccttataaaaattcagataaactactgtcataaatgcaactgcactgcctcaaggacctaaaaactgttttcctaatcaactagatggcataatcaggtaacagcagaaacagatagtctagtgaatttccgagagtcaaaatatgctactttgatgcttattaaacactgaaaactttcacaatactaactccagttaagttggtgaggttaaaaatgactaaactaaaaataatggttcaattaaaacatcccacagggatctactgtaaataatagctgcaaccaagttctgttacctcaagacttgaagtcccaaagatttcccacagtaggtggctaataaagaaatatttatgagttattcttactacagagatgggactttatgagaacctagcagagatacaaagacttacataagacacatggtactgtatagaaggggattttcagttgagtaagacaaggcttttggt

SEQ ID NO: 219949 - DNA, 674 bp, Homo Sapiens
aagaggatctgaaatatcagaaacagagaccggaggcaaggcacggagagggggtccccttgaagcataagattaaagggctctgctggacaaagtggaaatggccacatttgggcacagagatgtacagactgggcctccgaaagttgcataaacctttcccacaaggaattcacattcagctgatagtggcgttttcctcacttactcttattaggtaacagattagggtctcactgtttaataattgttttattaaaactaaagaaagtttgggaaccaaatggctccaaaagccatttgtcctccaagcgactacagggcaaagtagtgagaatcatgcccatctctctgaaataaacaatcaattcaggggcttctttctacagcccaaatgttggctagatggaacagaagtgactcaatctgtcaaatacaaaatcaggagtcaccccttccagtttcagttcatcggtcaaatggaatcatatccttcctctgtttggcttttctatgggaactgcgcctttttactacagctaatgttatcagaagatacaaggggaaggaggaaaaacgtggcttaattgtgaaacacgcataaccctctgcaccacaacggctttggggttacccctgagacttggaaaaactggagaacacttggtctgtgt

SEQ ID NO: 219950 - DNA, 666 bp, Homo Sapiens
acagtttcagaaatttactatattaatcaacacactgaaaacattttgattcctaagcagctttgagtaccagtttttttccaggacacattcggaatgatgcaggtggggatctgaagaagactttcacagtaaaactttcccctcaaggtcgagccttccataagctggtcccttttaggaagatgggctgtcagggaaagaaagacatagtaacattctgactgtggggctccatcccattcctctctttttcccactttttctttagaaatagcattccagtacaaactctaggtggaggaacacatgaaactgtttcttctcaggtgcattaatgatacattcccttctctactgactttgcaccttccaactcctcattgctgtcttcgaagagcaggaaatgctctttataaacagatttatagccctttaagccatccaatacagattgaaagaaatatcatcaccacttttaactaaagcattctgtcttgcaggaaggtatcatcaagattctagtgtgcagatttagcctctgtctaaacgtaccacatgagaagcttagagcctcaaattgttctttgggtaagcgttttcttgccattgattggttggttcatctccccaaattaggagacaattttttcattgggtaaaggt

SEQ ID NO: 219951 - DNA, 614 bp, Homo Sapiens
gtagaataagcaaatagactccttttcttcagttaggttcactgatttgatttaggctctctataaagtcttctgtctcaacagaagtagaaagagatttgtcacaagagtagcaagaactattcttaaagtataaaacactttacccatgtgcactgagggcctgttgatcttaaatgagaattctataagccaaaggcaaatactgtatatgaaagaaaacccagaacataaataggaaaataatttcaagttagctctgttaatctaatgatcgtaagttggaaaacaaaatatatcactatcttgtctttaaaatattaattccttgtgttagcccctctgacattacaaacttattatatatttcatcagtaggcaaagaactgtacaacttacctgtaatgaaccaataggattaagctggttctttggttgcttggaagggtcaggcattaaggggtcaggaactgcaaagctaaatattttttaaaagtgttataaaaccaaataatttcccccgaattatgaaataaatgacaagcattttctaattaactctctatgtctttgctcttggcattccctctacatggaaatgccttttctaagac

SEQ ID NO: 219952 - DNA, 660 bp, Homo Sapiens
agatccaattccccaccacacccctttacctttgctcattttctttgaagttctctgaagaccacgtgctcctgaattatggttttgtcatcatcacttgaaggttgctgatttagggtgaagagtggaagagcagagcaaaggtgtgggagaagagaaagggaagaggagcaaggagcaagatggagacttgtttcatcacttttctgtcgtatttccggccaaagtattaaccacactttgctttcccggctcactgggcagtcactcagtatacagacccccaggggtcccagagaaatgtcattctcctcaaaatgtaatagccttcagcccagacaaaagcctgagtcagacaaatgataggctggtgagagagacttcgctggctctcagagcagactggagcaaggaggaggcagaaatgttacctggcaggcaagctctgagtttttcccctttctctaggagtgggtcaggtcacaggcctagtcaatgtgttaggttgcacaaagtagactttcaaaggccactattggcatcacaaatgccctgacatgctgtttgacattctgcattgatgcacagccaactgcccctgtctatttcgatcagtaaatctgagaggacaccctttacagcatatggcagagtccttta

SEQ ID NO: 219953 - DNA, 635 bp, Homo Sapiens
ttgtcactggatgtttattaagtattttagtttcataacttattttcataaaccttttgttcactatttgtttgggtaaatctcatcaaatttaaacacccgagactcttaaatgttctggagttttgtgggaaagtaaacacctatttgtaagtattgatatgtaaaaagttcaaattttagtatatgaccaactacaatttgcatttctctaccaagtaaccctctataatggaatttcactgtaaaacagacacttatgtccagcacaaataaagttcacaataattgtttatcacaagtaaacaatcagcaaacttaatgttttacttataataaatacatgccatatacttagattctagaaagtcatcactcactacttctttgtggtaggtagcttcacagagactgtgaaacagatcatggaaagaaactgattttaccatgtgcgaagttaaagtgaaccacgtatcactcagcgcacggtggctcacgcctgtaaacactgctttagctgcatcttgtaagttttggtttgttgtgtcttcattatcacttcatctcaaggggtttgtaatttcccttaagaattttttctttgacacattttttttttttggtgttaatgacag

SEQ ID NO: 219954 - DNA, 635 bp, Homo Sapiens
tagagacggagttcgccatgttgaccaggctggtcttaacctccttagctcaagagatccactggcctcagcctcccaaagtgttgggattacagacaacagccaccatgcccagctaattttttgtatttttggagagacagggtttcactgtgttgcccacagtggtctcaaactcctgagttcaagcgatccgcctgcctcccaaagtgctgggattacaggggtgagccaccacacccagttccttctgcactttgaagctggcccacctgccaactggattgaacaccatggcaggggaggcagtgtttctactgtccaaacaaaagggggcacctatgcaagtatcttgccccaggccttgtgggaggcataattccatctcattgctgcaagcaagttaatggagatgttaataaaaacactacattaatgaaaatgctgaggctagaacctattctgtgcctgtaagacaaaacaattggggtgagatttctgatatccattctttagttcctttgggcctaagtaaagcaaacttacaacctgggacacaacttattttttcccaggttgtaagaggacagagacccttctggtaaaggaaagcaaattgcctgaaatgcttgagg

SEQ ID NO: 219955 - DNA, 536 bp, Homo Sapiens
agacagggtctcactctgtcacccaagctgcagtgcagtggtgcaaacttggctcactgcagccttgacctcctaggctcaagtgatccttttgcctcagcctcccaaaatgttgagattacaggtgtgagccacggtacccagacaaggatatttctaatttctttgtgctttgaggagaaaatacataaaaagaaggaagtagtgacaatgggtcagtcacaaagccctaattcaaagggtttccatctctcgcacatgcagaagaatgaaaaagccaatagttcagagaggccaggaaatatattaagaagttttatgaacacaattatcacaaatcagaccaatgttgatagatgatagccagtagtcttattagacttattaacattgctttgatgctagagacatccatagcctgttatgccaacaaccataaagaaacatttcttccaaaaacatgggaatatttcattattaacaatttggttaattttgatttatgtattttcatcattaatcacccaacataaggg

SEQ ID NO: 219956 - DNA, 532 bp, Homo Sapiens
ctaataattttagagtttaattagctgagacaaagaaagtatttgccacttaaattcccagacagtgacttggcaaaatgagacctactagattaagagtaaaaatgaagagaaaagaaaaacaaattaggtatcatttcatggtagttgggtatcagtatatgagaacggtaaatgtttcactttttaatttccagattcaaattattagtgcagctcatgtagagatacaggaacaagagatttaatattatttgaaataatattgaatactgaataatatcattgaatatataatattgaatattattatttcggccaggtgtggtggctcacgtctttaatctcagcactttgggaggctgagggaggcagatcacttgagcccaggagtttgagactagcctgggcaacacagggagagcccatctctctctctctttctttttttttaaattcattacttaaaaacagattggggcaacggtttgtttatttacttgcttttgacatcattatttgctcccttcaa

SEQ ID NO: 219957 - DNA, 600 bp, Homo Sapiens
  misc_feature (89)..(89): n is a, c, g, or t
  misc_feature (500)..(500): n is a, c, g, or t
ctatatataaatacatctttattgaggtctgctaaaatatcagttgtttttctttaaagttacatgcatatttcgtaatattgattccncagtacctgacattttggtttctattatcaatggtatcttttttaacattacatttcctctttgatgctgcacttgtatgttaattttatatcctggggaactctattaattctaaaagattttctgtccattcttttgagttttctacataaacttctgcaaacaatgacagctttatttattcctttataatactggctagtattttcttggagacgaagactcattctattgtctaggctgcagtgcagtagtgtgatctcagctcacggcaacctctgcctccaggttccagcaattctcttgcctcggcctcctgagtagctgggattacaagcgcgcatcaccacgcctggctaattttttcctcgtgcccgattcttggcctcgagggccaaattccctatagngagtcgtataaaattcgcaatcatgtcaaagctgtttcctgtgagaaattgttatccgcttacaatttcacacaacatacaagccggaaagcataaagtg

SEQ ID NO: 219958 - DNA, 592 bp, Homo Sapiens
  misc_feature (399)..(399): n is a, c, g, or t
  misc_feature (480)..(480): n is a, c, g, or t
  misc_feature (502)..(502): n is a, c, g, or t
aatatataattaaatgtaactcatacttcgtcacttatggccaattaccataattcctttgtatttctatgattgtgttggcaacacaggaattaggtaggttacaaaggcaagagatgagaaggacactgtggatacaaacacataacatataaagtcaataaaacaaccattatttatggctctatgttcaacaaaatttgagctctttaaaaaaaatctcataaacttttcaagaaacaaatatcaaatggctacttgtaaaaaatgtgttccaaaatgttttcttttttcaaattcatgacaaataaggcaatcacatctatccccacccgagtgctccacaatttatagattctgatatacaacagaagcactctacaggaatgctgaagcggngcaggctgttcccgtggagactctgtggcctctgaaggaaaaccttcacctgagttggccacagtgagtgtcttatgccgncctgagaaacactctatctttngtcagtggtgcaccagcttcctagttcctctacccgcgctgcctcttgctctaggagagcccgcccccattctttgacagatctggaaga

SEQ ID NO: 219959 - DNA, 530 bp, Homo Sapiens
  misc_feature (433)..(433): n is a, c, g, or t
  misc_feature (471)..(472): n is a, c, g, or t
cttggataactcttaggcaatccgtttccaggtcttcacattccataggtactccttcctaatctgtgtgtttaatccatgggttttcaaaacacatggattaaaattttacttatttgaggatcagagtgtattatggataaggtagttaaaacttattttatcaagccataccatgaaatactccaattgcagtcaatcctcacaatatttcatcttataaaatactgtttctatctgctgttaacaagaaataaggaacaaatttatgatgaaaaattatagatgtctatttaaagatgtgcagggagttacataatttaaaaaacaattatttgggtctaggaacagaagagtttgaagaccactgatgtagtatatgggagatttgaaacattttttttcttttttttctttttgagacggaatgtcngttttctgcccaggcttgattgcatgaatgaaaacgtnntctatcgaactcactgttttagcggttagccaatcttccttcttcatatcctctgtat

SEQ ID NO: 219960 - DNA, 543 bp, Homo Sapiens
  misc_feature (310)..(310): n is a, c, g, or t
agacagggtcttactttgtcccccgagtgcaggggaactatcttggctcactgcaaagcaaaataaaaagcttgaaaagttttctggggagggagctacagttttctatcacattcttaaagaggtctgtagtaaccatcaaaaatggttaaatcactgattcagagatcatggggcttgacaccttgtagaaactcaatacacatttactgaacaagtgaatggattcaggggaactgcagacaatgttagttgtatagaaccatttgtttttgagagtctgccataactagataaatgaaacacagtnccacttctatgaccaatcccttcccttgcttatacagactccttttgaggaaactgaggctcagcagggttaagcaacttgcccaagagcacatggctaggaagcagtgtctggtgccaaggcctttgctcaatccactacactcttttccctacccaggcacactgtaaaatggggtctaataccagctcctttgttaggaagctcaaaagagggcatctacattgaaaggc

SEQ ID NO: 219961 - DNA, 587 bp, Homo Sapiens
cgaggtgagagttgtatttttcttacataaaagatctgttttacaaggttattttatctggttaccagtctaatgcataaaagacagtggtatcctgtctcatgtacaaagagcaatgctgcctgggacgcctcccgcatgtgcggcggcaccactctgatgatgctcttccatctctccactcggtcccaatattaaagtttcttcaggctgcttcatttttccacgatgcgcctctcagcgaggctgtattttgtaggaaagttccagtgaacgatgtaacaggtggagaatcccagatccgaaaacagagattggaaacacgcaaagggacccgtgtgttgaaacacatttctaatcagataatcgggtgcatctgttctgttaaatgtccactacacttataaacaaattaaccaaattcagaaataaccattcaattgtaaaatctgtaaggaataaggaaagaattatctgtgaatcttgaccattttcctgaaaatatgctggaaaatttaagtgttttgaaacaaccagaatcctaaattttccagtcacttactaccattttgaagttccacatgttt

SEQ ID NO: 219962 - DNA, 601 bp, Homo Sapiens
gcttaagtttcaggcattggttctcagagctgcaatacatgacagtcctatgacttctgcaatttttatataagccacatatgcttaaaaatacaaaaaaccctctcccataaattgtgatactaaatgagtgttaattttttagaaattgtaagaactatatgaaagataaataaaaataatttaaaaagacttttgtctttgctatggatgtaatttctcactgcagaaacaagacaaaatcatgtaggttttagaaatacaaccggaggacgagacatttctacagaggcttcaagtgggtattcaagatgaatagatatattctgtaatctccaatgagaaagaataatttcctccacattattagctggtaagtactcttaacgctaaagcaagttaaaagtgggaaaaaaagctttttcaaaagcatacctaccctccctgttctctctcccttccatttactttgagtgacacactatccctgcgaaatccctgtaaaagtgccgtttggaatctttggtcattggaacttgaacaatggctggactctttaaaaaagtgggaaaatttttttttttgtccaaagctcgctttt

SEQ ID NO: 219963 - DNA, 586 bp, Homo Sapiens
tgcctctcaggactcagaagtatattctgaaaattttttcttacagtaatacgtattgattctgtaacagttatttttattttgagaaaagttttctaaaaatgtgttaaaaaaatagaagctttcttttacttagttccttgaaagaactctcattagtttagtcagattgatttcttttgaaaaacaactatattgcctgacagtttaccactgaatctcagcagcctgccaggcacacaaataggttttactaggctgaatttcttaaggtttcctgaagaaccccacataaagatggtcatttatctttatggatagattttccataatggatttatggatgaatttatggatgaaaggcagtttgccagtcctctaccaagttgctatttgcagacaggtgacatattcaacaatttcaccctttaaaactttcaggtcaacataatgttgaattaaagaagccagacacaaatgagacataaggtatagttccatttaaatgaagttcaagaataggcaaatgtgagacacagtgaatgtagtcagaatagtgattaactgggagggaaaaatattgact

SEQ ID NO: 219964 - DNA, 634 bp, Homo Sapiens
aaagcaagttaatgtcaagatggggaggatcagtaacacattcatcaagtgagttccttggtacagtgctattgagaaggagacttaagaaagattcaaatccctgattataaatatcactacatgagaatactaacctctcctaatatattaaatactatgaaactcaaaccttactatagaaattcaaatatattacgtagaaacaacactaatggctgcaataaaggcagaaaacttgaaaattaaacatgaaatgattaaatcaggattatagctaataaatttaacaaatcttccagagttcaatggaaaaatatatgttcacacactggcttatttgcatactggtcttatacaaatttggagaaataatggagtgttctttctctttctgtgcaaacatttttttgaatttgtcaaacattatttttagactctaagcaagatcaggcctcaactctctatgctttttgaaagactcaagacaaccttaaaattcaatctaggcctatcacttctatttacacatacagtggtgttactaatctgggacacaaaattttataaggtggcttccaagtaaggaactgcccatcttagcctcacatgggagtattaatacaagtgaggc

SEQ ID NO: 219965 - DNA, 499 bp, Homo Sapiens
tttgaggcagcatcttgccatgttgcccaggctgctctcatattccagggttcaagaaatcctcccaccttggcctcccaaagtactgggattacagtaaaactcttaaaacattttcaataattgagttccttgaaattttttactggaagaaaagagaaataaacaggacctacaactcagtacattactcagaaaactactaacaggaatttctgaaaataatttttgcatttatcacttcaacttagttataattcaagaatttaaaaattattattttcctgatacatttaattttcctgccaaagtacaaaaaacatgttttaaaataaaatttaaaattgaaataagtgggagccaactaactaaacttaacttttaaaagaacaatttttccatgggtaaggaccctttaagggcacaagcttgtagggggggaataattttaaagaaatttccccccgcaggatataattaacagtcttcagccaaatcc

SEQ ID NO: 219966 - DNA, 506 bp, Homo Sapiens
gcatactgaatacaaattcaggattcatcattccttgggttcaacccacctgtcaatgtgcaaacatactagtttctataaatagacaaagtaatttgatttatagatttataactgagttaaaaaccttcatatatgactcagttatcaaaataagagagataatatctcatttgggatattctattgtatttggatagaggtagagcatgcatgagtgagattatgggtataagtataaccaaacgcatcatacccataatttctccaacatgtttatagtattacccccaattaatgtgttctggatctagagtatgcatgagagccatgtgcctagatatgcaagagtaataggactgtgatcatgcctgtgactaatcaagagacaagggatcaaaaattggtccaaaggcagtttattcagggaaattataaactactgttatgtgccatgtgaccgttcaaaacatggcagacattattttcaacaagggggctattaa

SEQ ID NO: 219967 - DNA, 561 bp, Homo Sapiens
ttaaaatgtttcaatgcacataacaacagaattaaagagataaaggcaaagagagagagagccttagagtaatgagacattacctttggagcgcacggtgtaacactctttctgtaaattttacacaaaaatggcaagaaataaattgtaatacacttttaagacaagactgaatctatgttttaatatcaatataactttgaaattaattattttcaagttttatgcagagcaagaaagcttttttaaatggagggctctaaattttctttcatatgggatatttacgtagagatgaattatgcttaagaaaagcatcgtggctaagtgggaatctatttagatccttataattgtaacatagagtgccaataatagctattaacatattacatttcctttcacaaatcccagaaattagctaagacaacattttctcaaaagagaatagtgtatcttgcatacatacataaatataaaaatctgaatgcccaggaccagttactaccagttgaaagcaaaaatttcattagaaaaaagtgagttaagatcattcaaaaa

SEQ ID NO: 219968 - DNA, 616 bp, Homo Sapiens
aatatttgcatattctttaaattttctacaatgacccaccacatgaattcttttaaaagaaaaaaatggtaaatatgaaatagaatagtagtgttgacccttaagaggaaaaagatggtagaagacactatgttgcttacagtagactacaaatgtgcgtgaaatttgtaaataaaagatgaatacttataaatgtcaccacctccctctctgatgtttctgaaaccagagcatatgtggttaaccttgctctagctccagtccatccatccatcatcatgctaaaacatacagctgtaggcagtggagaagagctgtatgtggtcaggaaagcgggagacaggaattccagaaatgtctactaaagcagtgctttaagttttaatttattcaagaaaccaatacatatcagagcataagtgagaaaaagaaaacaattttaaaaaatacaaaggagtccaggataatagaaatctttcttcattcacatattctagctagaatagtgagaaaaaattctccctcaaacctggacagtccctttcatcttcagccgacacggaagttttatctggagaatagaatcttggtacactaacctaagagacggccgggc

SEQ ID NO: 219969 - DNA, 685 bp, Homo Sapiens
cagagttaaccagcccatagcatctttcacctttccctgagcctcctctccagtcccaggggcatctttggaatactgcagaaactgtgccacataggtcatgatggacttttcatcaggatcaacaacatccacatcttctggttccagcaatctggggatttttaattcttgttctgcaattctgaaggcctctctcagattgtctttgttggatctatgcttcacactcttcatgtcaattaggtctggtcgcaaggcatgaatgatggccaaaaaagccatcccatttctccaacttgacttaaaatcggtcacattgacagactcataggtggcgcattgttcctgagcccacaaaagaagggcctttcttgcagacatttgccatcttgcttgcactttagagcatttcttagctggaggacttgaggcaggagatgagtcaaccacactcacatcatccagggaaggctgattgtaattgcaagaaagagtctgggcaagcttctcaatatgaaagtgcaggataattgtcccaaatagggccaagataaaggatgggtttccatcaatgaaatcagtaacatgaatatttttttagctaaatggaacggttttcttaggaatgtcaaggcctgttctatattgattctcacctggaggggattagatccttatcccc

SEQ ID NO: 219970 - DNA, 684 bp, Homo Sapiens
aacgcacagaacaaccttttgaaggtgccaaatttaaagatggtaaagtaacagagaagtaaactgtaacctaattgctatggcttcagaataacccagtcaaaagactttcaacatgaaaggaaaggaatttaaattagttgcccttgagttcaatatttaaaggttctgtattttttttcctactttagcaagggaacaaatatagtcctagattggtccaggggtgtatctccccttctcaaagtaatttgcaggttggactacaaaggagatatagtaacccaatgaaaacagtagaagcaagacaggttcttggcatctgcttatgctgccgcctgtatttctgcccatgttggctcaggccaaacagtgcagcatccagtggacggctgagggacctgtgtcctccacacttcgctcaccagcagggagtcattattactccttcacattgggtacttttgaagcacttgatagaagctcttcttaatggaaatactgaggattaaagaacaattctgagactcaatcattctgaaaggaaaaaaacacaattgtctaagtcaggggaaaccatctctgacagatgttctgctaaaagaagaagacagctccctttttctacataaatctggagggcttaagggctgcagaaagaaactgcttaataaattccctcat

SEQ ID NO: 219971 - DNA, 553 bp, Homo Sapiens
gggagcaaggctagggtatctaggggctgcacatgtggtagataaactatgaagaaacactataaaagtcaggatagtgtttgcttttgtggaaggaagttgtaattaggacaaaacacctggatggacttctgggatggctggaaagaactacttctcaacttgggcggggttgcacaagagttaagcctataagagttcattaagctatacatttattttatgtggttttcaatatctgtgttttataataaaaagatttttcttaaaaagttatagaatccccattgcctacaaaataaaacccaagatactaagcataaaataaaggccttttataatctggtcccaaattagacttcatcttcccattatcatgccctctcttatttcccttatctgccaccactcccccaacaaccctgacctaaccactctccaagtaagtcatgctcactcacacctgctttgtcagttatgtggttcccttttgcttattcttaaaattctgctcatctttcaagatcaagctcacaagctccctccttcaacc

SEQ ID NO: 219972 - DNA, 550 bp, Homo Sapiens
aacaagtaaagttgttagtatccaggcactgaattataccttcatggtatcaatcaaagctatgatcagaattttatgtaactgcttaatcacttctttaacaagtgtaccgctacaggtaacattaaacgtctctagcaatgatctttatcgggttctcttgccttgactgaaatattattaatacttcttatatccattaacataaaataactttttgttgagcaaaaatagtgtgaaaacattaagatgaatgtgcgctttggaaatgtttaaatagatatgaaatgattaaataaaatcacagtcttgtgcaacatccatagcttacagttatttggcaactatgaaaccacagttactaatggaattaagactttttaaaaaattgcaaatgtacttatttgtatatgaaagaggtattcagctattaactcagtatttaataaacattgatatgtaatttttacttgaaaaggcctaaggtgtataataccaactagttcatagagctttttttaaaagagactttttttaaagcagttttaag

SEQ ID NO: 219973 - DNA, 709 bp, Homo Sapiens
  misc_feature (549)..(549): n is a, c, g, or t
attaaattatgggttatttcacagttatcaaaactaaataaacaacagggtaaaaaatatgcacagattaaatctttaatcagcacaatataagttgcttaagagtactctgttcaaaataaaggtgttattaaccacaggaaaagctgtttttaagtaatctgaataaagttttactcagtttcatgactatcaaaaagtcttgatataacactacagacagaattaaggggtttaaattttaggattaagaatttagctatctgaataatttaaatttcaaacatttttctttccctacatttcactggcaaaattaacttcaactattattcaattctcctggattatgcaaaagctgctgaagatttgatgtatgacacatttggctgacactctattgcaacctatgaatgggtttaactattacacagtattcattttcctttcaaagattttacacaatagtgacagtaagataaaatatgtagtaacaaaaaattcaggaaaatggtgcttatatgataaatattctctacttacagcagncaagaagtcatataaatttagttaatattttaccacaggggattacttaactttctgtgctgaatgccaaaagtaaagcattgcccatgtaagtctcttaagttttaatggaaccagagatagtgtcgacagacagaaaattaagttcttccaaaggcct

SEQ ID NO: 219974 - DNA, 703 bp, Homo Sapiens
atttagaaaaaaatctgcttttcatatctggttttcctatttaaagctatgtgatttgaggaaaatggtttaactcctctgagctttagtgtcatctacaaaatttggataatgatactgagggaagctgaaaagccgtatcaaccgacttatacaaaaaataataaacattcacttccatttctaatgcatggggctgaaaaagtccttgtatgtggaatattgttcacctttaaggaacctgctctcaagagctgatgagggactttttttagtgcagttctgttgtcactggctgttgggctcatttagttggcaccaacaaatctctgtgaacataaaaataaaataaaataaagattgtggaggaatagaatacaaacacacagtaaggtgagatttgcacaacagagtaaaggatgtgtgcctgattctttttgcattctctttgaatcatttttagcctttattctaagtccccaattattgtcatccttctcccaacaagatcgtttctctccaccgcaaatattctggccaggctctctgggtaaccatcttgatgtcctgagcactctggttgtactgagactctgatttatgttcaaatgatgctctttcatagccaggcttcctgctttgcccaaagagcatttcatttttcaagcaatttaagggctcctttctcccccactatttatgt

SEQ ID NO: 219975 - DNA, 659 bp, Homo Sapiens
cttgatttatattttcatgacacttggtcctaaacttcccaacatttgctcaatgaacaaatgacaaagggccaatttcatctggtaaagtggtcatcacaatgaaattgctattaaatcaagaatgaaagaaggcttgaaactttcttttgccaaactctaaaaaagactagtccttctatttagaaaaaatttcaggcagtaattgggaataattcagtccccagtcctactaggttccccatttgttttgtagggacaacaggagatttaaagggattagtagtcatcaaaggccttgagtttctttgaagagacaacattcaagaacaaagaagaaagttggtttaggagctaaatttcacatatttttggtttggcatgaaacctaaacctgcccctccaccaccattacacagttaagtccacagtaatggctttgactctcattaattatatctaattcacatttttcagggtcaataggcagttagtctaacatggaaaaatagaagcagatagatgataaactaaaaccaatcctcactaagaaaaatactgacattgaatctttttcaaactgggccaagactgagtcaatttagagttatccatacagacatagtgaacacttacgagaagttaattccacacttgga

SEQ ID NO: 219976 - DNA, 661 bp, Homo Sapiens
  misc_feature (525)..(525): n is a, c, g, or t
  misc_feature (596)..(596): n is a, c, g, or t
  misc_feature (627)..(627): n is a, c, g, or t
  misc_feature (642)..(642): n is a, c, g, or t
aggtacagaaacagccagatttattacagcttaagatatgtcccatttgaacattaagtttactatgtaaaaaaacaaaaaacaaaaaacaaatcctattagccaaaattaaacataagagggaagctttaggctacaactaatttaacaatttctcccttttgtcatcttctcaagtttgagaccaaaactttagacattaatatcactttgtcaccatcaaaaatgtacttatttagactcgaatctcactgtgaaacagcagaactgtgggtttgtaaagtggaaataaaaacttcagcttattattttgaaattatttttatttgttttttaaagtgttagagtacaggggacctccttgtgttgaaatctgctatttagagaagaaaaacaaaacctggccagttttagaatctacctgttgccttaaatttttagtttaattatgtcacatccagcatgagtgactcattttggtttggtttgtttggacctagtgcataagctcagtccagaatcctngtgccgaattcttggcctcgagggccaaattccctatagtgagtcgtattaaattcgtaatcatgtcatanctgtttcctgggtgaaattggtattcggttnccagtgccgacaaanagcagggggggataagggg

SEQ ID NO: 219977 - DNA, 660 bp, Homo Sapiens
cagctttgtttctgtcaacagtgagtgaactacaatactcatatatttacaagcatttctgcttgttttccaaattaccagaagagtaaaatcacagaattaaaagttccaaatatttttcagtttcaactactattaacaaaatatcccctagaaagcctggaccacttcacacaccccaccagcaatctgaataactgttaacaaaccaacatctttgccacttgctaaaatgtggaattctttcttgagctaaaaacaaacgaaatcacaaaattggctaagtattgaaaaggaaaaattattatttccttattttattatccatgaggttaaacccttcttccagtttttatttcttcttttgaaaacttgcatttcttcctctgaaaatctgtcttggatacataaacatttttaagagtgataatatatatattgccaagctgcctttctgaaactctaggttgttgcatttaacattttacacaccaatcagcaacatacaaattttgcccattgacaaacaagccattcccacaggatcttaaggtttggttacagcagaaatgttatcaaggtggaaggaaagtaataaaatatgttttcaacaggtttttaaaatagatttgtaagtaatttaaactatgtatgtgccta

SEQ ID NO: 219978 - DNA, 550 bp, Homo Sapiens
catacatatgtaagtaagacacagcatgttaagtctccacaaaaattctatttcttgctgtagatgcagaggaattaggtggacaatggttgttcatgcactgaatgccactgaggaacatgaaaactttcacctattgcatctaatcatctcctgggatgcaatttgtgggatagggcaatcagactgatagctgactttgcacagattcaatatgtaagatgaatataacaggctgccatcttgtgctcctgagtacaaatgattttcactagttcaccttcctgggtacctaagtcagcattggctgctgctgctgttgctgttttggtattataattggatagatgagaaatcatttttttccagtgttttcatttgaaacctccatttctgcttaccacacacacacagacacacacacggaaattcttaagagctgtaggtccatcatccaaggacttaagtgctatatgagaagaaaagcatttgggttgcagtgagctgaaatagcgccactggacttcagcctggggcacagagcaatact

SEQ ID NO: 219979 - DNA, 604 bp, Homo Sapiens
agacatggtctcactctgtcacccaagctggagtgcagtggcgcaatgatagctcactgcaaccttgagctcctgggctcaggcaatcttcctgcctcagccttccaaagcactgggattccaggcacaaaccaccgtgcccagccagcgcttcacttctttgttgccttcaaggtaatgatataaagcaacaattcaataccaagttggtaaaataatttgtatttcaaacagaaagactgcctaaaaatattaccttttgctcctagcacccagacaaacaatgaataaagggaaataaggaaaccctggcagctgagaaggcctcctagtcaatagatccagtttctcccaagttcatactgcagatgaacttgtagttcatttaagtatctagatctctttccttcatgtagagaccttaatcaaagactcttctcaggattttatttcacagcctaagaaatgtttatttaatttaataaaatactctttttctttaaggttgggtccattaccaaatactaagtcatgttgagaaaattatgtatatacatacatatggggatatatatatatatatatatatatatatatatccccc

SEQ ID NO: 219980 - DNA, 549 bp, Homo Sapiens
aaccctacaaagaaataggatacaaggaaattagcatgtgagaaagacttggacttatgtgaagaagctaacagatgtgcaaaaatctagaccagattcccatttcaaaaaggaacttgtagagtcactggacccatcctgacagtgaggcagtcctggtagcatgtcatgtcatcctgtgacactagcactgtgcacatacataaaaaaaaatgtctgttccagtgaagccaggaagagaacagacgggaaagcctgacacagacagaaagagggacaggcttgtcttgactccatctgccatttttaaacccaagacacaataacacctaaggaatactcacactaacatttcattcaacaatccctccactgcatgtcacatgaaataagttagacaagagcagttctgcctaaagtatatgctattctgagaggcatactaattctttgcaaaaaccctaaacagaactttcagatggttttgctgggaggagaaaaaacatgtgcctttgagggtaatgggatgggtttcaactgcttaaagag

SEQ ID NO: 219981 - DNA, 567 bp, Homo Sapiens
taacaaaatggaattaaaagatgagaaaacctcgtagtattttagtctggtacttttagcatccccaacttttaagattataaattcacaatagtgaacaccctagtgacaacttttaaataaaatactggatagctgggcgcagtggctcacacccgtaatcccagcacttattttttttaaaccattatcagatatttcatgttctactagtaaagggaattcgcattttcaatgtcctgtctgcattcctcctagcctctctctgctcaggttttggaaaatagatctttcaaatgcaattgcagcatccaaggaaattcccacccatgccaccagtgctcatcctgtgggcaccccacagtcagcagtttaagaccattctggatgaatgcaaatgcttgattcaattttcccaaatcccaatcaactagcttccggtttttattgtatgcaatcttcccaacattgcagtaaaagcaagctaaatggctgggggaaaggtaaaaaaaccccgggtgggaaaatatttttctcaactcttaaatccatttttgttagaaaaaa

SEQ ID NO: 219982 - DNA, 592 bp, Homo Sapiens
tatgtttgctttttggctctccctccagaatgtcagctccacaagagtggggatttctatctgctttgttcatcgccgattccccagtgtctagcacagggctagccatgtaggaggaactcagcaaatatttgctgaaataatgaatgagggtcccatacattgttatctgtttcatacaagctagttcccttccccatgccaatggcagatgagaatcaattcaaaactttcccaagcacctggttctgtgctgggttctggagatacagccatggagaccctgcctatggagctcacagcccagggcaggagacacgtggctcaactgatatccacagtgcaggatgagcaatgctgagagggctgtgcggtggcagggtcagggtactgccagctgccactgcacctaccacgttgaagaatcttctttcattgagttttcacgacagcccttactccttccattatacagatggggaaacttgagcagtcttcttcactcaacagctttttcctctctcccttgtcagggagccatgccccccctaaagcttgagcccattcacgattatcctgttcctttttccag

SEQ ID NO: 219983 - DNA, 582 bp, Homo Sapiens
caacttttcagaatagatgaacactgaagcttcagtgtttaaacctctcctggggttttgtgctcaagaagttggtatcgggttgttttaacagtcgtcatctttatcaagtaatacggaaaaactgggcagagcttttaaagaatgaatgacgatgacacaggcgttttctgcttacagatttcctcacatccttattaggctattaggatcagctctgtcgtgtgctcagttttcatgttttcttcttcatgtgaaggttgtagctcaagaaggattgctgtactctgatattctcatcagagtttcagagtccatctgatttctttcagcagtaaagattgtaactactcattggcttttagctagcatttcatttttaatggctctaccattttaaaattctccattctttcatggagatcagtttatcccagggacgtgtgtgtacacgtgtgtttataaagaacagtggatgagctgcttaactcaggttttaacagcagccttgaaactttacttcttacaattttatttcaagtcaggttttttttgtggccaagaccctccggcttagggttt

SEQ ID NO: 219984 - DNA, 637 bp, Homo Sapiens
  misc_feature (573)..(573): n is a, c, g, or t
tgcttaagtatttattttctaaagtaaggactaaattgtctctcttccttaagtaggaattaggcttggggaattcatgtctttaaaatgacaaagataacttaatacaaatggcacatcagcctttaaaaaggcttaatttggtttcattttgagacatcaggtaaacctgaataaacatatacagaaaagggataagctggattatgtgggatatttctaagaaatcaggggtcagcagaaagcttttctactcttagcataatatttggtattaaacttcaagttaatctaatagtatcaaaaaaactgtattcatataatagaatgtctgttaaaactgttaggtcacaaagtatgcaaagaaacagaacaggcaagttgctttttccatagtaatccaatcggatttttcttaaacaagttaatatctcacaaaatataaatatctacaatactcatggatgcagagtgctgacctaaatgttataatttattaacagcttcccttttttaggagtacaacgtaatgaaaataatatggaatgctccacatcaagtttattgtgggtntacaaagtactttttagagtgttaaacctggcttttatggggtattagaaaaagtaagtttgaa

SEQ ID NO: 219985 - DNA, 582 bp, Homo Sapiens
acaaatctgcagtgacttttttatagtttccaattctatatggaaattttccatcttttatctccttgaatacagtaaacatacttaaagtctacctcacaatgcaattatttggtgcccctttgggtctactgtttctgccagttttcattccgcctttctcctcctgtatccagggtatgtggagatactgtatttgaaaaagtacccaaataatttgaggcctaggaaaatattcttcctccaggtttctatctttcaggttcctaggggcattagaaacctaaggtcaccttagtccacttccaaaatctcacaatttactaatccaccttgatgatttaatgctaaactacactctatgtgaatggtctacttctgtttcaccattatccctaggatgctgtccttcaggatctctaaccaaagaattctaccagagtcacaaccttggaggtcgtatacttttaacgttcgtccttctagtcttccaaagtacactactcatgttttcagcctctttttggctaacaaatccccccttcacagcaaaagccgactgaatagccagttcaacctttg

SEQ ID NO: 219986 - DNA, 599 bp, Homo Sapiens
  misc_feature (480)..(480): n is a, c, g, or t
taaaatcactctttaaatctcttgcccatggtttagccctgagaataaacctagaattttttacactaattttgtactcctgcttttacattggattgcttgtcttagtgagttgtaagagttctttatatattctggatacaagtcctttatcagacagatgattttgcaactaatctcaattgtagcttgtcttttcattttcttaccacggtatcatactaatgtaaggtgttagtaatatgagaaaactgggaattctttatagcatctttgcaatttttctaaaaatctaaaactactcaattttttttttaattagtggaggaactattagcgtaagagataaggcatttcagccaactgcaatttgtgaacctttctggattctaatgtgaaaaaaaatctatttttaaaagacatttacaagacagaaaataagttcaaactggatatcagatcataagataatataaggtnttgtaattgtttaaaaaaatcttctctgttaaagattcatattaaagaaattaaaggccaggctggggggcttatgcctgaaatcctggcttttccccaaaatccaaaaccaaaccaaa

SEQ ID NO: 219987 - DNA, 596 bp, Homo Sapiens
agatggagtctcgctctgctgcccagcctgaagtgcagtggtgtgatctcggctcactgcaacctccgccttccaggtttaggtgattctcttgcctcggcctcccgagtagctgggatggactacaggcacatgtcaccatgcccagctaattttttgtatttttagtagagacggggtttctgtgttagccaggacggtctggatctcctgatttcatgatccgcccgcctcggcctccctacctcttcctttacttaataagaatgcggtctaaattttcaggtgccaagcccccaaactcctcttctagccttctgaattgtgtaataaaaccaggaaacaggtgatccagctgtgcgaaaacagacctcaaatgtatttccagactaaaaagccagacttgcagtgaaatcctatgttccaagtcatcagatcagtttaaggactagaagactagaatgactgactggttctctgaccaggaagaacaggggtggagtttgggagagccttcttgaccccagaggcttttgagggttgttaacattagaagtcaaaaggccttttagccccactgccctaatggaggacca

SEQ ID NO: 219988 - DNA, 644 bp, Homo Sapiens
ttaataagaactgtaatctatttccccaacttcattattaagtgagttttaggcctaggtcttccagaacagtttcctccaaaacatacagtgtaatatctggttactctttatgtgtgcataagaaatgtcactgtgacaaatgttataaagaaaaaatttgattaccctaaaaacaaatacataaacagcccgcaagtttagctcctaaagtaggaaagaataatgtgaaaatgtttctggctgtaccactcaacaaaaatttgcccgccaataaggaatcctttcttcaaaaattggtcatgatcattagccaaactgtaaccagtaacatccagctggattatggagctaataaagaacaacagaggggatccacaggaaattcaacaggtaacttacaactggctctctcatcagactggcagactgggtctaatccgaggtcagatgacatgggggattatggaagccaataacaatcatatttaaataaatgtcctttacagaacaccaccactttccttataaaaagttcaaaggactatttttacccctcacaattacagtaaggaatagaagccccagcacagcttggaaccgcaaaaattttttgaaaagggaattgaaatttgtgttttttt

SEQ ID NO: 219989 - DNA, 562 bp, Homo Sapiens
ttttaggcctaaacccagaaatggctctgtgagcttggaagaataactaagtagataaccataagaacagtacctgctccctctagctggctctgcgggctctgcagaggttagttggtgcagctgagaaacaggtttttgtctaggccagaggaacttccttccctaattttttttttttttttactcccacctctgtgttatataaatagccatccagattgggaggaagtgagcagtagaggcaaaactaaatgtgtgaatgaaacgacgtgctgccgtcctttgaaagttttaacatatttggaaaacccagtgtttttttttttttttaaggttttccagtgaatgacaggatgcattttttgtgccaaacgagacaatcccacactattggggactcctagagggctaagcatccatccctcatcacggggcctcaaactcgttttttaattcacatatccagaaagggagaattgggcaggaaccattctaaaaacttccctgcaatggatttttgagttaggtggggtgccttcttttactcagggaaagggct

SEQ ID NO: 219990 - DNA, 505 bp, Homo Sapiens
caaaaggaaatgtggctatatttattcaaattttaaaaatattcccactattggatcttgaaattgcacttccaggaatctattccccaaaatgctaccacacaacgcaaagttttatgtttcagatcattcattgtggcattgtttgtaatagcagcaaactgggaaaaaaaaacctcctgtccataaatagaagtaccgagtccatgatgacatgcatccaatgcaatattctgcctctaaatagaatgaggcaaatctgtaagtgctgaaatgcaaagagatccattttgttcgtttggagaagcacgttacaaaatcctatgtcagtaccatcctgtctttgttcttctaaatctatttatatagctacatcatcatccaggaatggaaaaacctgggaccatataaagcaaactgtttattgcagttagcttcacgcagtgggactggtgaagacaaagaagtttacttttttcatttcatttccattccttgaatttct

SEQ ID NO: 219991 - DNA, 584 bp, Homo Sapiens
  misc_feature (470)..(470): n is a, c, g, or t
agttctattgcacagcatggtgaatagttaacagagtactgtatgtttcaaaattgctgagagagtacatttcaaatgttctcaccacaaaaaatgttaagcatttggggtgatgagtatgttaactagtttgacttaattattccacactgtatttatagattataacattactttgtaccccatacatttatgtcatatgtaattgtcaatttacaataaaaagaaaaaaagagatccctctacttgtatacacgctattctaaaaacctgtgccaaatctgatcatatacaagagcacagtagtcccagctaccaaacaagacctcagactggcccccttgctaatttactcatctcaccgggaccttatcttccttgacgtaacttggaataaattaccaaactcacacatctaggttgggttttgtctgagatagcaataataaaccatgtgccgagtacagtgncaaacatgcagggctcagtgacagctccagctactaattaaccctcgtgcccaattcttggcctcaaggccaaaattcctattgtgaggcgtattaaaatcggaatcctgtgat

SEQ ID NO: 219992 - DNA, 573 bp, Homo Sapiens
tgaaaccattaccataaagatccttccgaagtaaagaaatttggcattatggcctgattaaaatcccattaaatgtacacaggacaaggtctaattatttaaaaggaagccctcccttacctagttccctgtccacctctttatcctcatcattttccacattcttcagccacactgcagttactcaaaagcaccatagtatttcctttctggcttgcttactctactccttctgcctggggtaccattcccaatatgtggcttggtaaatttataagagaaacttttaaagatttaattcaaacatcattttgtttctgtttttttttttttttcctctggcttccaaaactggtcctctctggtagaactgatcactctagttatttggctatattaatcttccttcacaatgcttaaagattcttgggggcaggaaactgtcacacattcatctttgtcttctcagaagtgatgtgccgaagtttgactttgacatatttgccccaaatctgctatgactttgattttggcaccagaaaagctgactgccttttaaaatttttttgggaa

SEQ ID NO: 219993 - DNA, 699 bp, Homo Sapiens
atgcaagccaataatgggaatctagaaaactgccactaaggagttaagtaaaacagggaataatttactttatcaatgatccaaaccagcccctgaatcatcagatgatatagaccaagttgattcttagatttctatcgattcagttaacaacatacacatattacgttgctccataacaaagtatgacacaaaaacagtaaggaattagctcaactaatacttaactacagaaggcttccaaagcgtacaaaataacacaaacaagtgtgaatgtcagcataatagatactgttgaaagacttatttgagtatctcttcctgtggctagaaaacacatctggaaaaacacacaattacaatacaaacacaatccaataaaagtccaacccctctctactgtgcagggaaaggaggggctcaaggccatagaaggagctatgcttgaatttacaaaactaccagatggccaagaggggactagatcaagggtagagggcggaatagcattgttgttcagcgtgtaaactctggagcaagaggagttgggttcaaatcctgagtttcccacttacttgggcatattactttatctctttacacctatttttttatttataaatgagaggataaattcattggggttggtgatgggaggaggaaaacagtgaaaacatgtaaaagtgttcgggaagtaaa

SEQ ID NO: 219994 - DNA, 626 bp, Homo Sapiens
aactaattagtactaaaagagatttgccaaagcttaaatggaaacaaagactactattaccacatggcatatattctaccatgctgttgaaagtatattcaaaattacaatggtacttatttaactttctaataatacaaacaagaaacattctggaaatcaatcctaaggtagcactatttggagacattagcaatgaagaatgaacttggagtaaagagtcaacaagagtagcgtgattcccttctttctcctcataaaaacaaagctcttctggtctctggtccgccctcatccctccccattcctggtgtgcatttgtgttattctgcagataagactttctaataccatgtcaggatactatttcaagacttcctattgtaagcattgaagtattttattgtgttgcaatgtagctttttacaaaacaattaaatgatactgcaacaaacacagaatgatacaatataacttcataggacaattataaataaggctcaatttaaaggtagtagttaaaaagtaaagacttagaacattaaaaaataaggtgaaagttttcttctgaaatcaaataatattttataatatataaatatggtctaacaatattccacttaaaa

SEQ ID NO: 219995 - DNA, 656 bp, Homo Sapiens
cactgccagttctttttatttacattttccattcatcttcgtttgcgggaagccgtattttagtagattctccaacaatggttcacatttcctgagttcttgtatgttacaaagtgtttgttggatttatacatgattgatagtttggctggcaaccctgtaacatttgaatcctctcacaacatatgagaaattctggtcttattgatcccaccacctgaaagtagaaccaggaaaactccctagcagcctatgaaaggggcatataacataccctttttcaatcagatgtctttgtatgcaacttcttttttgaattcagcaatttagggaggcatctcatgcagaatccttttgttgctgttccggtgcgggtgggggcattcttctacctattcctgctgcagaagtggcaaaggtggggcagggaggcagcagcactttcttccagtgccctgtgtggcagtggagtgtcagcagcttcttccttagtccaattctaaggcatgggtttacaaattgctgctggaagcttaccctcctggttcacctgccttctaataattccgtgagccaaacaaaattctttcaaaaaacttttcctgcttaatcaagcttggttctattgtttcaaggccagacttccaaccttccgc

SEQ ID NO: 219996 - DNA, 633 bp, Homo Sapiens
gtttgagaacggagtttataattttcctcatgccaagcaaacaagttaacccctttggtgacatatacagaataatctggacaaagggaacacaaatctcaagtctgaacatttcttgtgctatttgccaggaagttgtaatattgaaaaactgtgctcttctgagaatgggaaaatgaggacataaactctggttccaaatggttggaagtgcagtttatgtggtcaggttgtttttcccctttcattaaaaaaactttcaagattccacttgatccgggtttcttcgaaaatgtattactttttacaaatataattcttatagggacagacttcagctgtgtagcaggcaaagctacagaagagaacgttcttgaaagactgctgggtgtttcttagcacaaaccacctctgaaagagtatcaagctcagtggttggtgaagcaaagccaagttcctgtcccacccatctctgggatgaggagttctccatggtgaccctgagtcaagcttcttctgcacccctctgcctggttaatgaggacttaactgaactgcccatctgcaaacaaaccctttttgcatttttttctctagacacgagtgagttatgtcagaaggtataatggggaa

SEQ ID NO: 219997 - DNA, 677 bp, Homo Sapiens
gaaggaaaaaaataaaactctttatttggagaaacatgattgtatacatagaaaatcaaaagaaatctataaaatactactagaactaataggtttttaaacatgatctcagtgtacaggactaatattaaaaaagaattgtatttaaataccctattaatgaaccactaacaatgaaatatcatttataatatgagggcacttcaaaatgttcatggaaaaattgaattaaaagataaagaatataaactttatttctcaacataagctccatcgaggtcaaccatggttgtaagtgatgacaccagtcatttaatccatccctaaaaaaattgagattcatggaaatttaaccatgtcttttttacatgattaaatgacgaaaaatgggagccctttgcagattttttaagattaggaaacaaaaagaagttagaaagagccaaattaggactgtaaggtcgatgcctaatgatttctcattgaaagtcttgtaaaattgcccttgtttgatgagaagaatgagtgggagcattgttgcggtagaaaaagactggtgaagctttttccaggaatttttttggtaaagccttagcaaacttttttaaaaacactcttgaaaacagcaggaaattattggtgctttggcgtctttcagaaagtccaccaggccaaaa

SEQ ID NO: 219998 - DNA, 569 bp, Homo Sapiens
  misc_feature (431)..(431): n is a, c, g, or t
atgattttaccactacctttttattttgcaggatgtgtaacaccttcccttgctttgtctgcttggcaaactccactccccttttagggtcacttcttctcagaggatgtgtctaactctctgcctttcatgcataataaaggccctgtcatctattctcccagagatcttgatatctttttataacatcaccaacattatatcactgatactcttcatagcagactgcatgctccatgaaggtaggaataatcatctttacaacatcagtgccttgctcagtgaatggccataaaagttcagtgagtgaatgcttaataacttgaagtgaaaggagataaaaaaatcatagtaactcagaatgcacagcaactaactgagaggttgccttgtccaattctctaattcttctattgcttagctaaatatantgtagggttttccttctgattttagaatattacaatttatcttccttttatagaggtggaaaacaagacccgagaagtaaagagatttatctgccttttaggagcagagttaaatttagaaaaaaaggtttaacttta

SEQ ID NO: 219999 - DNA, 553 bp, Homo Sapiens
gggactcagttttttattgaataaaatggcctacagcctgatgacagtaatatggcccttgggttttgaggaaaatatcatgttgtaggttggccaaaaaggagatagcagtccagctgaaatttgttttcttatactggctttaaggcagtgattagaaaaggcctaagaggtgggttctgtaagggattgctggaaggaaagtaggaatatggaaagtcatgagacatatactggcatctcttcttgcttcctctcaagtcacatgcaaattcagggagagttagtatgaaacacacaatggaaatttgggctctaacatatgcaatctgattcttcatggacttcatttggccatatcagttccaacaatttcagccaatgtttaaaaatcttataagcagataacattttaatgttttaacaagccatttcctatctttcattctgaaaatccattttaagtcatttttttacagcataggggtccaatttagcttctgttcaatgaaatacagaaaaagatatcacttttgtttatttaagggtggta

SEQ ID NO: 220000 - DNA, 590 bp, Homo Sapiens
aatactggacatgaccactaaattgacttcatggcccactaagaggtaactacccagttggaaaacaatgatctagctcactcttacttatctgttgggactcactttaggaagcctcacctgaaggtaaggttaggtgaatttcttctaagcgactagtacagcatatctttatacataccaattatattaaaattacctgttttatgtctttgtctccccacttctcagggtagaaaacctatcttattcatctttataccaatctggctcataattaaactgaattatgatattctaactattaaaaaaaagaatgacttcactggtaagtattgggtttttttaagttttcttaaaacggtatcaagtagctgttctgaaattcaagcaaataaaggacaagttttacgttcacttgaacttactttaaacagtgggatgaagaaggtcaaggcttaatttatacagataactactggtttaagattcttaaggctggcttttctaaaattaaacggataaggttcaaaattactttcataagctaacttgcttttacaaaagaaatcccagaactttaaaggttt

SEQ ID NO: 220001 - DNA, 578 bp, Homo Sapiens
gtgacacgatgctgcattctaaaacttttatagttttagactatgtatgatgtgttgttgtaatctccatccaccataggatagagttaaaggcattctttgcaggcatattttgtatgccactgttttttgaaatgtgaaaaaaacgttggcatacttagttattttttggacaagctacacttcaagcttgtttttaatgttaatttgatagtgtgtgtttttttttttaaacaaatcaagaagctgaaaaatttttaggattgttggtgcttagtagacttgataactattttaaaaatgcgtgaatttagtaaaattctttttttctcactatgcatgtgtaaatgtttgtaacctggcttccctcttttccagtggtataaagaattgtgccgcttttagggttgggttttttttttctccagtaaaaattttggtcccctatttgaggtttccatttaaaatgggacattattcggtggcatattcaaatatttttggtagctgttttttttttggggaaacccctttttatgaaagaaaatttttaggggttgtgctcaaaaatgggtttc

SEQ ID NO: 220002 - DNA, 675 bp, Homo Sapiens
  misc_feature (8)..(8): n is a, c, g, or t
catacagnccttcagaaaagtttttaaaaggattttaaaaggacctttgagatcatctagtccagtgccccacatttcaacaccccatgccatctgacagatgggaacctaggggaccccttcgtcagagaatctgggaggttcattacagactctgcactctcgcctgcaaatagcctcaagccagatggaaacaaacctagtgtaaccccaaggagcgatgtgtttgggagctcacgtgtgcatgtgtgtgcatacacatgcaggcatatgtgtcgtgtggcgtgtttgcaagtgtgcgtgtgtgtcttgtgtgtgcaggccccatacttggctcctataaagccccgtcctctaatctcagatctctccacctcccttctgtttaagatccggccaaaccaaaacacaaatcagtttcctggcttcagttacctgcatatttttgggctgctctccactctgaaaccaaacagaaaaggggaaaaaagctcagaaatctcagtcagtaactctggaaccttcacgaagtctccagatgtatgagggatgcatgcagattcgatgaccccatttccacctgtgacaactggtttgaatccagactggtccttgggtcaacattgtttttcctgggaaatttagattgggtagaggcttgtgtatttataccag

SEQ ID NO: 220003 - DNA, 699 bp, Homo Sapiens
  misc_feature (659)..(659): n is a, c, g, or t
aacttcaggaaaagaacattgaaatattaatgaaacttgtcttgatataacaacaaggaatttttgggttaagttcaatttcctttgataactaaaaaattactaaaaaagattaaatagggagtgcattgtaacaatctgtacatttatagtaaactgtgttaatatcatgacacttaccatacatattaaaataaaaattgagatagttcagatatttatagtagttaatttttaaattctagaataatcaaatgtttaaaaaaatcaaattttctaattctaaacctcctgaattattatgtcaaatttacaaaccactctaaactttatcaacaacttacttggtttgtagaatatattaaatgtatcaattgatcttaccatcttttccatctatggattttgacacttcaatatcgaaattttcctgcatctgctggcccctaaaacaattgagatgttcttgctcaattaaattactttcttcctcttctagaggctgccaagtgccgtcaataaaccactgtccacgcattactggtattttatcagcctggttccagtacaccgggtagcactctccttgggtcacatccacctcgtagaggccgtcccgtacgcacacaggctcgatgttcacaagctccaccatcttncggctcgtgccccgtcgtactctggcacaagccgcaagcg

SEQ ID NO: 220004 - DNA, 636 bp, Homo Sapiens
tacaaagtatatattcctatagtttcaaatatacaatgatatgctgccttttctaaacacagacctttcattgacacagttgcaagagagatctggcaacaacttagagaacaaaaaaaatcaggataatcaagatacaccttgatacacaagttccttgcaatgttactaggtgctactcaaaaaagtttctgtggtcaaattaaacacaaaggaaattaaacgcaaaggaaaacagtggactcaatttcctagaatccaacagtggaatcaatttcctagaatcacttcagattcaattgaaatgatgatgccatcactctcatgcaatcctgtttgccatttacccaaaatgatgtaataattacacttgtatgaaataaggtctgttttaaattatccagcttacatccttcactataacactctctgtataatattcttatgacatatacaagattcaagaagccaatacctcagtccacagcaaggaataaaatgcagccactggttaccagtactatgtacatatgtacacagatatgtcacattagaacagcaattcagagttaattgccttggggcaaagtggtcatataaaataaataatacaggtcttgggaacagctttggagc

SEQ ID NO: 220005 - DNA, 778 bp, Homo Sapiens
aggtgctggtaatctattgtgggatgtccatgaaggatgaaataggaaatagttaatgtgtcttttaaaaaatattcaggaaaacaacagtatataatattctttattttttaaggaacatttcctcacgtaatagaattacattagcttacagtgaaactcatttatttccacaaacgaaactttcctatacaacaaagcttgactatctctcaggaaaacatatttaatgacttgtgtggaggagaaaaaattatgtgtggaaaagtaactcaaaccatacaagctgtaatacacagaaatgccacagtatatcctattagcatgtcactttatgattcggaaatttggctgaacagggccatatcaacttcactattttatccttcctctgcatctgaagtgagaacagtgcattacactgaaattccaattggaaacaaagacagcaccactatatttaaaagggcagaaaacctatcttatagaacacttcatcgcctcgatttcccagcctccaaagtttcaagtgttacactttcaacacgttaaaagcactcaaattccccatctttcaaggttcatatcaaaatcatattcactagtttaaataggaatatgctaccaaatctcacaacattgacattttaacaaagagaattcacattaaaagataactgctttaaaatgagtgcctgtgtttgggaaagcgctattattcttgtagtccaccagaaaccgactgtagtaataaaaatgaatggtgatgaaggcaagg

SEQ ID NO: 220006 - DNA, 672 bp, Homo Sapiens
aaaatatgccttcttaatcagtggccctgaagagctctatgttctctcttaaggaccaatttgctattattgttgccaagtaaacaaaaaataccaacaagaactaagcacagatgagactttcctccaagaatcaggatcatcaagtattaaaatagatccctgaatagtttagagaataattggattatactctctcaaaatccctaaatcattctacttctgtaattgtatgagctactctatttttcccgtgactttttcctattgcccaagtttggcttttcttgacagcaggattctactttgttggatgctctttgaaaaagtctgtatttaatggtttttagaaaggttgtagctttcatccagcatttgcaggctctcagcttttgcttaaggatgaatgcgtctcaacacagtctcttctctttgtgatttccccaaacatcttaacatctgaagatccctggaagtgacgagcattgagaattcatcggcagtcatagctaagtcatggaaaaccaggattggcagaccctttacggagaacggctaactgcttcttcaacattttagttattgcaagttcctcttcttttatcaaactcaaagccccccccggaacagaccctcgtgccgaattcttgggcttgagggccaaaattccta

SEQ ID NO: 220007 - DNA, 437 bp, Homo Sapiens
taataacccacctctctgctacagcaaccacaaatgtcacaggttcctaaagcctccaagaatatttgctttacagcaagaagtaactgctttttttaaaaaaaacacacaattttctcctccaggatagacaatgggtaaaaatctagctgttaactactagccagagttatgggaaggaaaagaatccctcctttttctctcaaccagttttcctttctaacccacttactttgccaactgctgatgaggcatgtctaattttgcagagtgatactagaacagtgagaggcactgccagctccttcttccccggtccaaagcaccttcttccctgaaacacaaccttacaactgcaagtattagatgtcacagcgagcaagcctttaggagattattttaaaatgaccaaatatacaccagtaagagaaaacttc

SEQ ID NO: 220008 - DNA, 527 bp, Homo Sapiens
gaaactcagagttatctggtattcaaggaaagcccgccttatgaatggcaaagactcaaattcaaaacacaaaagtaattctgaaggaagagataatttaaagaaaccacacaaacacagactaatgagagttttcaaaaagtttcaagaaatcccacagttcacaaaataagaatatgattatttttaaaataacacttaaagaaatcctgaaaatgaatatatctgtggtatatgtgtgtgggtatgcacaatttgtgtgtattaaatttgaaaatgaagagcattaccaataaataaagtaatatacatttattgctttcacacaatagtccaaaagatatgacaataaataatatgagtgaaatatatatgatacattgaagatgtgtaaggtctaacattaaacaattgaattctaggttaagaacacgaaaaaccaaggacaggaaataatcgtggaaataatctttgataaaaatttctgagtgctgaaggaaaatagtttcgaattgagaaaattttct

SEQ ID NO: 220009 - DNA, 541 bp, Homo Sapiens
  misc_feature (541)..(541): n is a, c, g, or t
gggaaatgagaattgaggggcagatgacgcctaatccagaatatggacaatatggccagcagacaaccactgaaggggctaaatagcaccttagggattatctaactcaatccgctctttttacagtcaggaaatgaggtccagggagaatgagtgacttgtccaaagttacacagtaagctaatggggaaattggatttagaagccgaggacttcgtgatttttttttgttgccagtatggtagtccccgcttatccatgcagaattggttccaagacccccagtggatacctgaaatgtgggtagtacagaaccctatatagactatgttttttcctatacatacatacctatgataaaatttaactcataaattagccatagtcagagattaacaacaataactaataataaaatggaacaattataatatttggaatggcacataatttaaaatttatgacttatttctggaatttcccatttaattaatattttcagcctgcagtggatcttgggtatgtgaaaacctagaaagcn

SEQ ID NO: 220010 - DNA, 649 bp, Homo Sapiens
attacagaatctgtaagaggggaaaaaaaaagatgattctcttcagagccaaagagtctccaggaatgcattattttaaaatgcatgatggatatgatggactacataatttcctagtttgcttccacatcaataaaacaattttctaaaaagactattggtttattttacacatacactatcaagcgaaatacggtatcttgttcacttgtctggctcattgctgactgttttccttaaaagctgggaaggctgtgggtcaattcagctcgccacctgtttctgtactgcccacaagctgagaatgaattttgtacttttaaatggttggggggaggggagaatattttctgacacaagatatatgacattcacacttgagtgtcaaagtttttaggaacacagccacgcccatttgtttacactttactccttccactttacaatgaagaggtatgaggagctgctacagaaaccttctggcttgcaaagtttaaaatattttttacctggccctttaccaaaaaaaagttttccctgcttaaaaacacattctgatagtgaaagagctttgcatttagaaagcagtctttcccaggaaaaaatggaaactgggtggcatttgggattaaagctagaatggagtatt

SEQ ID NO: 220011 - DNA, 736 bp, Homo Sapiens
tggtggtggtaatctttaagaagtttggcataaacagtaaccaagtctttggtcttcaatgcattctctagcagcctttctcaactcgggttcagccaaagaatttaaccccatagaaaatgatttgaatgactctattctcaattctcccaggaatgagtaagttaattcattaaatatttattaattcattaaatatactttaggatattagggtataattctctagataagcctttgttgagaaaggctgcatgatgattctttcaatgatgtaggtaatacagtaagattttaaactgtaacacaaacacacacatatacacacacacacaagcacaattacaaaatgccttcggatagatgactagaaataaaaataattccacaacattctaaaagcatctttatcaatatagctaatttaatgaataaatgttatttgccatctgaagtaaaactttgagtttcagagctttactttacatcacaccagctgacctttaagatgttgttgaggacaagtcttaaccaatatcaaatgaataaatttctgctgctattcatcctggagtcagatgtgaagtcagtcagtgtgaagtcagagcatatgccctgtagctttcactttaggactcatattccaaagcactggattttctctggtcatggtatctatagcagatgttgctgaatctcgtgccgaattcttggccctcaggccaaaattcccttt

SEQ ID NO: 220012 - DNA, 705 bp, Homo Sapiens
atcatcagctatcattagtgttagtgtattttatgtgtggcccaagacagttctcccaatgtggccaagggaagccagaagattggccaccttgttttagaggaatacattcatatctattatataaagctacatattatatagtattatgtaatataatatagaaatattcataaagtaacattaaaatattttataatattctaccaattaatagcttttaaaaaaaattatttcaatttcaaagagactttataaggggtaaaggtgaagagctccaagacccactaatcatctgtaggtggcagtagaagcacagtatttatgtcaaagcagccctgaactatcaatcggtatggaaaaccggagaccatacataagaaatctggatctatttcatattcaaataaactgtgtgagtactcctacattcaataaattgcaactaacttctctgatacgaaacttttttaacttgcccacttttaccttaaaacctctacacagccaatcccaatctacctatttctttttgtctcattattttatttggtacggctttgtaattgtatctacctagaaacattagccattcattttttgagacatggcataacctttcttacggaaaaacccaaaccccagtcgaattcatatgccctgttacttgagggcctgctgggtgaagcacttctttaaatgcgc

SEQ ID NO: 220013 - DNA, 719 bp, Homo Sapiens
agtgttttcagtcgtcacttggaagactgccaagtaacagtgaacaatggcagagaagagactgaggttctgggaatgctggctgcaagccccctgcactgacagtcaggcctgcaatcactttctcaggagtcattggcctgaagccacaatcactccttccccttccaaggggaagcctgagaccccagcaggattcaggaggtcagggtaactaatagtggttttgattccattgcacagaatcagagtgggaaacgagatttccctgttacaaagataccatcaactctaccccttgcagaccacctactaaggagaacagacccatctgccaacttgggggacacgagtacagcagacaagggccaggatgaatgacacggcccttggcagagatgtaatatcttgaacaagttcagcaaccagtgtgaagttgtacccttcttaggaaatacacacggcaactctgaaagggggctgaagaagcttctgtgacattcccgccctttagaggagtgctgggcagcaggggtgtgctgggaatcagttctctcagaaaaaaagccctggtttagagcttctgccaattcctgtggtgtaaacagtctcatcatggttgatttcaagtttccaagcaactagctcacaagttcctgttttttgcttttttggggttttttttttttttttttaaagaatgagtcttcgctgtgtta

SEQ ID NO: 220014 - DNA, 711 bp, Homo Sapiens
attaaaaaagtgtgctgggatatttgtttatcttagtttgagactattaaaattgcatctgagcataaagcataagttagattttttttcttagcatacattttaatgactcagagaatgatttcataaaaccatgaaaatttcacacgattctggaattcttgcttcttcccatgagaaacaaagagtgggaaatggaggccagaagcaattttgcctttctctttaaaaagcaggctcttttttctctgggttctagtaaggtataaggccacgctggccactcctacgatggctgtttactgacttggcacaacacatgttgcacatgatatcttgtgctgcttccgcatgctatgattttgactctatcaactagaatactgaaattggtggaagcagatgaaatcattcttggggaaaaagtcacacacttagtagataattttcatcattagctttgaaatgttgactcttcagtagtacagtaagtgaatactaatattcagtataatcatctaaattttggactatatgtaataatttgatttagcctagctgtgtcatatctgttgcctactaataaaaaattacacttttctaattgtaaaaatacaaaatttttctaatttgaaaatacgaaaaaatggttaaatcccatgatcttattaaacttaaatgttacttaaataacatgcacttaaactaaaa

SEQ ID NO: 220015 - DNA, 699 bp, Homo Sapiens
gtacagtaattcctttttttttttttgagacagggcctcactgtgttgtccaggctggagtgcaatggcacaatcatggctcactgcagcctcgatctctcatggtgggctcaagtgatcctcccatctcagcctcccaagcacctgggactacaggtgcacatcaacacacccggataattttttatattttttatagagatgggatttcgccatgttgctgaggctggtcttgaactcctgggctcaagcaatccacccgcctaggcctcccaaagtgtgtgagtcactgcactcggctgagaattcttaatagactgaaagtgaagtgaagaattccaaaagggtcagggcatggtggcgcatgcctgtaggcccagctactcagaagcctgaagtgggaggactgcttgagcccaggagtttgaggctgcagtacgccatgaccatgcctgtaaatagctattgtactacagactgggcaacatgagactctgtctctaaaaaataaaaaataaaaaaacgaatcctgaaagggccttggtaatccatatgccactggaactaggaaagaaaggctctccataattcctaggtgtggagggaatggcaaaagcccagtgcaaaccccaccttgcctggtaaggtggtcccttacccacaagcaactttcttccttttaccttacattacccttcc

SEQ ID NO: 220016 - DNA, 665 bp, Homo Sapiens
tgttgtatccattttgttgcatccattttgttaagcctatccaatttattcatttcagctgggcacagaggttcatgcctgtaatcccagcagcttgggaggcagaggcaggaggatctcttgagttcaggagttcaagaccaacctgggcaacaccatgagatcctggttctacaaaaataaataactgatgaaacaatgcattcatttcggatatattttcagttctagattttctattttgttactttttttctgtgctcaaattgtctattctctcaatcattctgcctctcgtttttctttaacataaagaaaatttttcatggaattttaaagtctttgtctaaattccaacacttgggtgatccataaggtctttttctatcgattgtttcttctttagattatgtgacatcatttcttgcttcttagacataatgcgtataagaacagtggaaatcaaagtagaaaatttcacactaggatgaacatactgtattctctactaggtagcgaagctgagtagctgacctgtgatatcattaggagttgagctgggttggggctagagcagctttaagtagtttcagctcaagattgttgtaaacgcttaaggatttggacaggccctttccttcaggtggacttggaaatctaatctt

SEQ ID NO: 220017 - DNA, 653 bp, Homo Sapiens
gacagttttttgttccttttaattcagaaagggaaggaaataaaaaagtgtgtttaaattactattgcagaaaatctggctggatgctgggacctacctcttccaggatggggattcatgatttaatttttttgagacagggtcttgctctgtcgcccaggctggagtgcagtggcacaatctcggctcactgcaaccttcgcctcctcggttcaagggattctcctgcctcagccttccaagtagctgggattacaggtgcgcaccactgcgcctggccaatttttgtatttttttttttttttggtagagacgaggtttcaccatattggccaggctggtctcgaactcctgaccttaagtattaagtaatccgcccgccttggcctcccaaagtgctgggatgacaggtgtgagccaccgtacctggcgggattcatgatttaaagcaaaagaaaaaaaaaaaaaaaaatgagcggctgctcccacttcaaattggtaacacctcgtgccgaattcttggcctcgagggccaaattccctatagtgagtcgtattaaatttcgaatcatgtcatagctggttcctgtgtgaaaatgttattccctcacaatttcacacaacatacgaaccccgaacctaaaatggtaaag

SEQ ID NO: 220018 - DNA, 700 bp, Homo Sapiens
agtaaatttgccataggtgcctatggatactgtttagatctgctggtgacatttaaagaaagagcctttgagaaacatgcatacttttctcttttctcctatattcaatactcatatagcctaaaagatggaaactggttcaagaatttaaatgacttgttccctaaaaagttaatctcctcacctttgtgaaatatatcaagtgctttctataaataagggcaggaaatgctaacttcataagcatagtcctagtcattaaaataatttgatcatcttctaaaatttaagtatgatagtaacacagtaatatggaaaatctcaatatacttaacacttcctaaacagcacaatgaaatgttgttcaaggtctgaattaatttgctacaggacctaagcaagtctgtttgcttatcttttggctttaaaattctttaagtctaaaatggtgataattttagaataaactgacaatgtggggaacaaacttaaattcacaaacactacccatatgctcaaaaactctctgggataattagtttcttcattgtaactattgatgtactattatttaatctttccattagttctactcaaatagcttacaaactaaagcttgtttcaccagtacttaggtatgaaacagggtcttgttaccaaagacaagtaagaatcaattttttctgggtcttcaaggtgc

SEQ ID NO: 220019 - DNA, 638 bp, Homo Sapiens
aagagatgagatctcgctattttgccctattgcctctgctggcgttaaactcctgagttcaagcgatcctctcacttcagccttctgagtactggactacaggcaggtgccaataagcctggctcaaatagaggctttttagcttgagactctatcctgagattttgatgtggtaggtctagggtgaggcataggcattttttaaaaagctacaaatgattccaatgtacagtttatactgacaatgactgaacagaagtcacaatgttagcacacacacatgaggaactttgaagtggaagctactcttggccacttgcattacttttcccggtctatcttttcaccttatccttctgggttctatgaactgaaagggttaaatcaggtagcacagaaatctgagatgtgcttagagaagggatggatcaaacattaaatagcattgtcctgataccactcaattcatcaggtacaaagtctctaaggcatggactctgctgtgtttcctctgtgccttccatggagcttagcagaaagcagatgttgaataaatacccataaacaggagaaaacagttgccctggtgtcaacaactgtattgcctggcctaatctcctctgaagcccaggtgcttt

SEQ ID NO: 220020 - DNA, 614 bp, Homo Sapiens
atatataatgtgtgggcctggttcttgagcctgcagcacctcccctaggcctacatcccaacatgcctgcaactctcctgtggcaatgggtgcctgccccttccctgggatcctgcctgaaattttgacccaggagctacccatgaaaagtcaggcaggagcttttgccccctgcttctaaactttgccagctactgggcctccacatttgctccccttgccaccaccctccagtctatgttaagggatgtatctgtactttttcatagcctacctctaaattgataattttttttttttttttttttatggaagaaacaggtttcaccatgttgcgctggctggtcttaaacttccaaacccaagcatccttctgccttggcctcccaaagtattgggattacaggcatgaacctttgcacccaactgacttattcctttattattaattaattttgaaacggagtttcactcttgtttcccaagctggagtgcaatggcgcaatctacggttaacacaaattacgcctcttggcttcaaaaaaatatttctgcctcgggccaagcacgggggcttaccccccttaatcccaacatgaaacacccggcccggg

SEQ ID NO: 220021 - DNA, 692 bp, Homo Sapiens
  misc_feature (631)..(631): n is a, c, g, or t
cctttgcagcctgaggagtacaagcaatatgcacagtgctgggcttcaccccatttgccttaggtcttttaaacaaagcaaacctacttttcctccttcctctatcgccatttgggagagacccattatacctgatgggggaaaaaaagtataggtgatctcttgcaagaactgcacaattataaaacaaatgtttgactttgccttgcagaatcaattcccaattaattatctattaacacattataattatttaaaattcctttgagcaactgttgatctccataccaggtgccagtgtgtgaaacaaaatgagattctttttctggcttcattccaagtcacagagaaccttttggattatacacagattcgtgttatctctatttttttccttccctcttttatggaagataattaagagctgattaatggcatgtctgactccttatgactcattctgtttttttaaggtgaactgtttgcatgtgctaatacaacctttaaaaagtacagtatgtattgtttaaaacacaatctcctttaattgtgaaccaaacactttaaatagctgaacttttgaagtaaagaatttttagatttgttaagtcttagctaccctgatgtacanatgcactctcattatgttagcagaacctgtccaacagacatgtttgctaagtagtaaacat

SEQ ID NO: 220022 - DNA, 689 bp, Homo Sapiens
atgtttcaaatctatttttaatgttgcttgttgaacattaacattttcacacttccagaaatgacattaataaaaatataaacaaattgatataaaaatctgtgtagactaagctagaatttacaaactcttaataaaaggtgtatttaagctttctcaattatgggacaacaaataatagacttcattgcttcatactaaaatggtatttttgactaatcacaaggaaacttaaactaccatatagttataattataggtattcagtccaaagaggaagaaagttttagtgttactataagaagctgtatctctgaaaatgttagctccataagtgtaagcactcccgaagattataagataataaaatatggaaacaggcaaactctggggcgatttaaagtttctaccacttcctaatgattttctttaatagaatcattcgtgctaagtggataaaagttacaaattacaaaagaaagatacagaatacatccaataacaaattaatcagactgaggaacatttagtgtaaaactggcttaaaattttttgtcagcagaatttctcaacatttaaccctattgcaaataatacaaataacaaggagaatcttcaagcagttggcatttcttcaaaacacaaaggtccaattataagaaaaatatcacattattcaaaagtctaca

SEQ ID NO: 220023 - DNA, 776 bp, Homo Sapiens; identical to SEQ ID NO: 53109
  misc_feature (722)..(722): n is a, c, g, or t

SEQ ID NO: 220024 - DNA, 656 bp, Homo Sapiens
  misc_feature (500)..(500): n is a, c, g, or t
acgatatgcttcatttacttcagcaaactttaaaaagacactgtaacttttataaatgagcacattttccaaataaccatttaagaatataataaacagaatatccagattcttaagttacaagcaatagagactgattctgatttccgacaacaaaagggaagatgctgggtcattcaaaggaaatgccaaacagctgagcattcagtaggtcagaaatgagggtggcactagaggtttaagcagcaagagctcacagccatctctccaggaggctgccagaggacaacttgattcctatcactttctcttcccaaatcacacagggaaggggcagtttcccaaaataagctgtgtgtgtagggggagggggttggggaatgacggacttttattatgtgctcatattaggctgtacaaacaaccagcagactcctatacatacaaagttgagttttgaattatacatgtactttttttttctataaaacctacacgtncccataatactatctgcattagttttcctgataggaaaaaaagtattgcagaatgctcaaattagacttatttataaaaaaataagttcttgaaaaatcttaaaaataccttcagaagcagtagaattcataacctaaaatttattggcttttttt

SEQ ID NO: 220025 - DNA, 759 bp, Homo Sapiens
agggataataaatctattttaataacgttacttttgacaacgatttgtacatgtatttaaagataacaactttcaacccccacccttaccccagactcccattacaaattgaggcatgacctgcccttgccaggaagtgagcaaagctgcaacatcaaaactctgcacatcccactctcagaggagggtgactttacactgtgttgggaaaaataactaagcatttaaatttttcattgtacacctgtacattggtttagattgaatggctcaaattaaacaaatatagagagatttcatatatacaaatattatatcatgtataggtatattatatcatctatttgaaaaggataaaattttaaactttgactttgcatgcatggcccaaatcttttctcactcccctaatccccaagtgtgaaaaggctacccggtgccctcccggccctcgtccccatgaccagatgggacttcatgagaaggaaatgagcggctgacgctggtgagcaaagcaggccacaccgcaggccgagcccgtgggccagcgtctccgtggctggtttcacttttcctccacatgctttgggtaacgtaattattgctattcagtttgaacctccagaaagaagagacaggctccaggaccccacagactaatgaactgggtgcctttaggtacgtagaggggtaaaattactcttatatagccaatatattttgggacagggaggccacctttggcttctccagaaaatt

SEQ ID NO: 220026 - DNA, 688 bp, Homo Sapiens
ttaacttatcacagaggcaaaccctttaaaaatgctttggctgataaggggaggtgggtactcaccactgctggtgggaatgtaaactgataaaaaacctttgtggagagcaatgtgagtactattaaaatttaaatatacaaaccattcagcccagcgattcaatttttagaaatttatcttaaaaatacattcacatattctttgcaataggctctaaaaaatgagaaattacctaaatatccatccatacagcggtatttcacagagcaattaaaaaggagacagctctaaacgtatgacacaaaatgctctaagatatatgatccaagtgaaaactgtagggtacaaaactctgtgtgaaatacactagcatacagtaatatgcttatatatgctcgataactctggaagtttacagaagacaccagtcacagcgattgacgctggggaaggcaactgcacagatggggaatagagggtttcttttttgctcacgcatcttttttctatgaaaaacactgaggtaaacctctatgtgctaacacaggatgatccccaagacatagagttgagcagaggaaaaagtataatgtaaattgccaatgtgatatatatatagatatatatgtgtacatacatatgtacacatgcatatactgcatacaccagaaaccgcttatactgc

SEQ ID NO: 220027 - DNA, 695 bp, Homo Sapiens
aaatgagtatatatttgtctaataagcagaaaaatacaaataaaaacaaatcattagtagagcgtttctcataattactttaaaatgtcttagcataatgaatggtgcatacgctacaatttatccatccttatttatttattgagtcggggtctcgctctgttacccaggctggagtgcagtggcgccatttcagctcacagcagcctctacccaggctcaagcgatcctcctacctcagcctcccgagtagctgggactacaggcgtgcgccaccaggcccggctatatttttttctatttttggtagagacggggtttcatcatgttggccaggctggtcccgaacgcctgagctcaaccgatccgcccgcctcagcctcccaacgtgctgggattataggcatgagccaccacgcccggcctatccatccttattcatattatgtaggaatcagagctctccataatgtccactattataaatgaacagcataattcccttggtcataacttccattccaaattcttgctcagctctcggccccgtgtgacacctgggggtaaagaccaactacgtatgcgctcagaaactcaccctggggtctcttgctgccgggactgagtaccaaggggcctaggcagagggagcaacccagaaaagagagggccagacccggccccaccccctcatt

SEQ ID NO: 220028 - DNA, 639 bp, Homo Sapiens
atggtaatttttaaaaatcctcacataaagccctttaatggtgtatgtaattggaacaccccctggtatatctgttagatttacttaagtgcagccattaaaacctcagctaaaacttttatagctgaggacacaattcaaagagattaaaatccagctagattggattcccttgaggaaaccagcagacctatcaagagttcaaggaaaatagatgtcttagattaagtgaagtcaaatgcatacataacttccacaaaggaggctatacaacaaatataggacattgagtcaggatgtctgggagcttctggctcttggattcttcatttgtaaaaggaagggtgtagactagatggactagatgatcacagagttgcttccaattttaaaaatctgatttacaagtaagtgacactatataccaagtccatgtaggatcctaaatcagacagttgtgtgtttgaaaattccctcatttacccaccaggttccctgcttgacttaccttgaaagccttttaaagcatcaaaaaggcaagaaacatattcttggagcaagaccatattgagcagactttacattaacagatcaacttaatttcagtaagatgctttattggagttaaaatattgcaaa

SEQ ID NO: 220029 - DNA, 688 bp, Homo Sapiens
agagcatgtagcaaatttattatccgtgggtgagaaactgttacatgaagacacacagcaggggaaagaagtcagcatttaacagataatctgtgcttctcagacagggaaaaataaaaacactgtgctgcattataaacaggagagggaagaatccagtgaagaagcccttaaagtgaatgtcgtcagctaacataggcatctcatcaaaagaagacttcaacagagcagttgtttgagttttcaatcatcagtattctgagaacttcaagtgtgtattattagtgctaatgctatccatgttccttctctattttctatgatacgaggaaatcacatgaagctgccttaagtggtgaaaataaatggattctatttttgcagtattcctgcagtcttttaaatcacacacgaatactgctcccaaaattatcatcagcttctgcctcagacacttcatgaaataagctgaaacaatgtgggctgtctattaaaagactgattgctaaacatccctacatacaatgtttctcatccatttcaaaggtctgtagaaaagtttcacatcttcctggcaagctatttcatgaatgttgcacctttgaggaaaactttaaaataagggcattcagacttgtgtgtaaagcccaagaatctgctgccagaaggaatcaattttttcccacag

SEQ ID NO: 220030 - DNA, 567 bp, Homo Sapiens
attaaatttttatttgaccaagaaaaaactgtctagaattgcctgacatttaaaatccacttaaagcagattagcaacttcaagcatcacaattattcagcataaagagcctttgttgaaacatctttctcatttatttagaagaaaacatctagaacagaaccaagcaaaacttttgtatttttgtaaaaaatctcaattcctgaaactactataaacaatctactgaaactgtattcagcaagggacagatttacctcaaggccatgttcacctgcaacctgctgataagtctgttaaaaaacaaagcaaaaaaaagagtttttaaaaattagaccactgtagccacaatccctaacactggacagttaaaacaaaagttatcaaaatctgttcttttcttagctttacctgtatcactttataactcctgagaaagtcattcacataagctgtggcctccccaccttaacaaaggggaaaaagaatatgttaaaccaccacaggaatcttgggcgtaaaactaacatggggtttagtaaatacaagaagtacaagtatttcagg

SEQ ID NO: 220031 - DNA, 608 bp, Homo Sapiens
tcgtttattttgcaaaaataatcaggcacactttttattttacatcttaatcaacattacaaatacaaaaggaaaaaagtcagaaacaactcatcacagaggaaaaaaacatcattcagaagagattaatctgaacttcaacattctttgtgctcattttaaaattattaaaacaggaattcaaaaggacaagcaaataaaaaccaagtattttattaattaaaattgagaccctaaaccaactaagactatacaacttaaaaataagctgtcttcatcctagaaaagtttgatttgccatcttataatgaatatgcaggaacttactaatgggtaagtaaacaaattttcttttacaaacaagttattttgagttatagggatcctcctggtgactagatttttttttaatgactaaaaatgcctatttagatagtcaacctatccgtaaagctggacactaaatgacatagtgaacatttaaagttgaaactctttgtctaccaaatattttcctaaaactgtttttaagcatatacattaacttaaaaggtcaacctcttaattgtctatagccaaagaagagcttttggtccccaataaatttc

SEQ ID NO: 220032 - DNA, 672 bp, Homo Sapiens
ctttattttatttttaaagattcaaacctttccaattttttttttattttttaccccaaaaaaggtatcaatacttttcattccactcttgtcaactttagccaaagccttctgagctgcagccattttgctatttttctgttaatgaaaataagagagaaaaattgttatgaatgtaacatttattaatcatatatggaaatcaaagaagactgcatgtctcaagtttcattaaggaaggtaagcatcccccactaacatgcttcataagggagtgaaaaagttctgatttctattcagaattcagacctaagagacagaatatgttaaaagaggcagaagacaaaactgctgccttctaagaagcaaaatgttccaaccaatggtttacactggggagggggtagataattctggagggtgcataaagtacaataacacaaacaatggaactgacacaggccgcaattgtcagaggtaggaattacagccttgtattaccacatgatgaataattcacaccaatttaccatctgattttattcattttgctccatgggaaaccaaggacaacccctttgattattcaaaagaatgaccttgtggttgcaaaaaccatccccagaacccaccaaggaattagcctggcccttaatttttttcctctcccaa

SEQ ID NO: 220033 - DNA, 598 bp, Homo Sapiens
agcgtgagttgagtcacaattctatgtattgattgaccttttcagtgcccaaacactggccacgaagaaatgagatactgccagattatggagaaagttacagaaacagagacattaagcttaacgtgacagtcacttatcttatgacacacactaaatcctcatgtgccttattcatattacaaggcgagaaaccaaaagcagaataatgaggtcacaatgcaccactaccgccactcagccattgtttccaaacacccggaccttcttctttcacacggtctgctgagcacttcagaggcagacattgttcaccatggcccaagcctgttgacaaggctaaaggacatctggtcttatttgtaaaaatgatgtcgatgggatctgttttgtcacagagtatctcagcacttctactgaactgattaacagaagtaactatgacacatcaaaaataaaaatagaatataagctcaaggagggggagacatttattcactgcactcggaactgtgccacgttcacaaggacgctcattaaaaatgtgtggaacaacacatgaattgatgggaggggtgatgaaatgaaaatacttctt

SEQ ID NO: 220034 - DNA, 604 bp, Homo Sapiens
agggcaggcgacctaatgtaggaaacttaataaacccttgcattgatataatgatctgtcaggttttcatttgaacagttctccaacattctctgaactgccaaataaactgaatctaagccctattttttcttatgctaaagtgtgaatgattctggactatcttactgggaaaacatttcctaacaatgtttttaaaagtcataaggtcaaaactgcagttataagaaagaagggtgaatgcagtggctcatgcctgtagttccagtgctttggaaggctgaggcgggaggactacttgaggccagaagttcaagaccatcctaggcaacacagcaagacctgtctctacaaaaaaaaattttaaaattagccaggtgtgacagtgcacaaaggtgaggtgagaggagcacttcagttcaggagtttcaaggctgcagtgagctatgactgtgccactgcattcctgcctgggtgacaaaatgagactctatctcaattaaaaaaaaaaaaggaaaaagatacattacttttagcagtacattaagagaaatatgtatttactggaaaagaaaaccaaacccaaaaggaaaggtttccaaga

SEQ ID NO: 220035 - DNA, 649 bp, Homo Sapiens; identical to SEQ ID NO: 60478

SEQ ID NO: 220036 - DNA, 678 bp, Homo Sapiens
gtagagacaaggccagcctgttcttgaactcctggcctcaggtgctctgcctgtcttggcctcccaaagtgctggaagtacaggcgtgagccactgcgcctggccctaagttggttttttttttttttaagtgaatgccaggtatggtattctagctatggggttctaacggcaacaacagctaacatttcttgagagcttactgtgtgccaaacagtgcggcaggcactattacaacctcattttgcggagacaaaaagggaaggtgccctgagaggggcgtgcccaagtgccacagttggaagtggcggaagcaggacatacccccacgcagtctatgtgggggaaaccaggtgcactgtcctctctccacaatcttccctgacccagcatgcaaagtgtgcaatgcactgaaggatggggccctgggtgacaagagtgtggagaaggggctgggggaacatggctgatggggggccactggcaccaggaacgttggaaggcacccgtctggggtaggagcctaggattgagtccttatgctgaaaaggttggaggggagaagaacaagacataaggagagcacctggagaaaatgggatgggctggtttaaaacagaagttatgattgacccttggtggagaggccctaccaagggtcccagggcatccttttat

SEQ ID NO: 220037 - DNA, 660 bp, Homo Sapiens
aagcttgcggccgcgtctctgttggaaccggcggcgttgcgtctaaaaaggcgaaagccttgaggttgaaggtgggacgagcctaatgaagtggttagtcaacgaccgcaccgacccttaagcgttcttaagacgagagctgtgaggggaaactacgcaaggagcccttttcccttaatgtcccttcgactttcctttcacttcgaaatgaatgtggaaatgctgtcacgccttatttttctaattcctcgatgttgggttttttctcttctttatatctcaacttttaatgctcttcttcctatgacctttcgtctaaaaactgaccactcctttacaggtttttacggtaaaaaaaaaaaaaatctgtctttctttaatcttacatagctgaacgaattcattggctcagtatttttaagataactagtcagtatatactgttctgtaacttaaaagatgacctgaaaattaacaggccctctcccatttctcttctcactctatcccccaccgaagagggctcagaaaaaagtttttattaatatatttggggtcggagaaatacaaacatcccaaagaatacgatatccccagcttaaatgtactggaacgtttgtcagtgagtttcattttcaaatttaccctacatagggaatt

SEQ ID NO: 220038 - DNA, 515 bp, Homo Sapiens
  misc_feature (297)..(297): n is a, c, g, or t
  misc_feature (499)..(499): n is a, c, g, or t
aggatatggattgggaatcatggcctgaaggccaggccctgcctgctcagtcccagatatcatttgtatgtgacgagccctgcaaaggtcctcaccagctgggagtcactggctggtcagattcacgttggcagcacctgacaggatgtggctacaaatgaccagagcgggttctgtcgtcaaacttgggacccgtactttggagcataacggggaagaaagtgcttaaaggattgctcattgcaggatctcaagtttcccagcaggaactcgccatgcggggtcatgggggcgcanggacggagggaagggccttaccgtctgtcggccgtagggccaggggtaggagttctccttctgggccatccttagagagaaagggggaggagagctgggcggaaaacggaaacaaccgtgagaagcagagaaaaagagagagagagggaggggtttgaccgatcgagccggaagcgctagcccgagctggtaaagggagcangttagcacactagccc

SEQ ID NO: 220039 - DNA, 612 bp, Homo Sapiens
tctggcatttaaaagacttatatttacttagaaatgttgtaaacatatggtaaagagcttggtgttttattacatttcttgaaaataggtgagtggagaaatggaaaataggttaatcttttaaactgtatttataattgcttcctttccaaagccaatgagcatcttttttctctttttattttaggtctcttgttggtcatcagccatagtgcacagcagtttttagatgtgcctacatgaacagtacacacatactcacacactaacatccacatacatctcccttttcagtggcttaggcagagcagcaaaaaacatacttgtctcataccgaagggatttcatttacaaaagtaaaacccgttattgtcctctttctctgcagcctcccaatgcatttctactgcttttcataaaacactgctgcaaataatcaagcatgaccactgacatccacaagattgagttttaggaaccattaaatgagctcaccctcgtgggaagtctcctgttcaggctggtctaaaggtaattattcagcaattcctacctgtgcttttaccttgttcctatacagtgtttgaatttcatacactggtcaggtcaact

SEQ ID NO: 220040 - DNA, 619 bp, Homo Sapiens
ttgaatttaggtgacactatagaagagctatgacgtcgcatgcacgcgtacgtaagcttggatcctctagagcggccgcctactactactaaattcgcggccgcgtcgacttttttttttttttttattatacttcaagttctggaatacatgtggaatcttgggattttcaaaacattttctacactacttctttaccctgactccttcccttcaagtccagtcctggattatttgttactagaatactatagttttctacttttgcgtcttcctaactgatttcttagaaatttagttcaatctacttgcattctaattttagataagtcagccctgctcaaaattctgtgagtggcaccaaatgtagtgcacgttaaattctttcagaggatttagacttgatgtagtctggaggatgaagtccattaacacagactttcactaaccagctccattgcatccatctaacgggatcttccacattcccctgcacaagcctccccatgctccaccataccgggcccgcatggatgtccttgctcctgctgccaccctatctgacatatcaggttgcctcagtttctttttttcagtcgacgcgggcggcgaatatagt

SEQ ID NO: 220041 - DNA, 704 bp, Homo Sapiens
  misc_feature (621)..(621): n is a, c, g, or t
agagctatgacgtcgcatgcacgcgtacgtaagcttggatcctctagagcggccacctactactactaaattcgcggccgcgtcgacctttgccaatacagaggaatctggaaaagaaggcgccaaacagatatgcacagatttcttccaaagtcagagaaaactacttcaaagaagcccttctgaattctgtaatatggttgaaagtgtttttttatttctgattctttgagaaaattaaaggcagagccaaactgatatcttgtcagagttcgctactgtactatttatgttacaacttagattaattagcataagatatataaaagctttatgtggtcctggaatgtaatgaaatattgtgtctggaattggttccttccggtgggttcttggtctcgctgacttcaagagtgaagccacagaccctcgcgtgagtgttacagctcttaaaggtggcatccagagttgtttgttcctcccagtgggttcgtggtctcgctgacttcaggagtgaagccgcagaccttcgcagtgagtgttacagctcatgaaggtagtgccgacccaaagagtgagcagcaacaagatttattgtgaagagtgaaagaacaaagcttncacagcatggaaagggactggagcaggtggcacttgctgctcggtggccagcttttattcccttattggccccggcccatctg

SEQ ID NO: 220042 - DNA, 434 bp, Homo Sapiens
aattgaatttaggtgacactatagaagagctatgacgtcgcatgcacgcgtacgtaagcttggatcctctagagcggccgcctactactactaaattcgcggccgcgtcgacttttttttttttttttttttcacttttttaattttacactagtaaattcagcttcaaaccctggaaatttttgcactgagcacatatcacatttaaaaccagggaaaataatcgatgttttcttgttgagggggaaaatctctcaaattacaaaacgacataatgaacaatccacagaagggatacagaagtgataatttccataactcaagttgagtgatataaatggtggggtgggttatgtgagagaaatataccttgtcaaatgcagttttctgttcaggtggggggaaagcagctttttgttcagatggttgtgtag

SEQ ID NO: 220043 - DNA, 623 bp, Homo Sapiens
gagctatgacgtcgcatgcacgcgtacgtaagcttggatcctctagagcggccgcctactactactaaattcgcggccgcgtcgacgattgtatctgcctgatttgacaatgccaaattttttatgtaatcaccatttggtttgggactgagagctctttcattttctaccagtcaaaccactattagagtcttcatgttacttccccaatttgctagcaaggtagaatcagcatggatagcttattttccttattggaattctgttttggaagaggcaggtcttatagcagggcagactaattaatgtgctgaactcattccctcctgcttaagtgaataaaaacttttatttgactatggattataaagattgcctttaaggagccttgtttattttggggaaggagaatggatattttgtaggagaaaaagactttatatagtaaatgaaaagtctatgggctgggtgtagtggctcatacctttaatcccaacactttgggatgccaaggtaggagtattgcttgagctcaagagatcgagaccagggagactgcatctctatttttaattaaaaaggaaaaaaaaaaaaaaaaaagtcgacgccggccgcgaaattaa

SEQ ID NO: 220044 - DNA, 577 bp, Homo Sapiens; identical to SEQ ID NO: 60854

SEQ ID NO: 220045 - DNA, 638 bp, Homo Sapiens; identical to SEQ ID NO: 50204

SEQ ID NO: 220046 - DNA, 607 bp, Homo Sapiens; identical to SEQ ID NO: 49059

SEQ ID NO: 220047 - DNA, 348 bp, Homo Sapiens
  misc_feature (346)..(346): n is a, c, g, or t
tttttttttaaatcttcatagagacgccttagcagaagctatcggctttgacagtacaccgaaatcctggcagtgaaccataaattgaccattaccataaaaagagctgctaaacgagaaaccatgtgctcagtataaaactaatttcatgctttcaaaagcacacagtggcttctagcaagatagtggccctggggacttgccgagacagattgggtgaacacaaatggtttgctcctgatgcgtctgcttagccaagctttacgtgtactgggcagtaaaagaggttctcgagccttctattcaaacaaatacacacttaggctattaacttttaaagctggangc

SEQ ID NO: 220048 - DNA, 261 bp, Homo Sapiens; identical to SEQ ID NO: 53265

SEQ ID NO: 220049 - DNA, 427 bp, Homo Sapiens
  misc_feature (329)..(329): n is a, c, g, or t
tttttttttttaagttcactgctttactattcaataaaatagctttaaaaactgtgaaacagccaagtggccacattctaaacagcgacggagacctccaaaatattctgtccaccaaaaaaacacgaagtttctgaatatgtaaaaattagtagaaaatcaattaggtgacaaagtcattatagtagtggctttcaaaccctttataaaaaataggcaggaatcattttaaatgtgggaattattttatctactgaggatctgaaggcaggcactcagtatacacaagtgtgggctggcattgactgcagtgaggaagggcagggcgncttccatgggcttcactgccccttgggggggcgcactgccacttaacttcctggaggcaacttccttgttcccccaacactggctggggtcacagtcc

SEQ ID NO: 220050 - DNA, 438 bp, Homo Sapiens
  misc_feature (20)..(20): n is a, c, g, or t
  misc_feature (26)..(26): n is a, c, g, or t
  misc_feature (53)..(53): n is a, c, g, or t
  misc_feature (141)..(141): n is a, c, g, or t
  misc_feature (304)..(304): n is a, c, g, or t
  misc_feature (394)..(394): n is a, c, g, or t
  misc_feature (412)..(412): n is a, c, g, or t
  misc_feature (433)..(433): n is a, c, g, or t
ttttttggacctcaacatgnctaatncttgttacatatggaatattattaagnctattaagaattttgaaattaaccacatcagtgatttattcagtaagagcagttacgaggaagggaatggatagtgctggctgggagncacacttacctggggtgaggccccttctccaccattcatgagtttggtagtcacaagtgagttacttaaatttttggaacctgtatccacatctataagggtgacttaatcatgtttacctgacagagttattgggaataggataatgcacggaaaagtaccnggcatataggtagggctctatggttactacaatgattactattggataataaacaatttgtctgaggattatatttggcaaatcgggccnaaattaataacttagggnaatactccaaaccatttctgncaagg

SEQ ID NO: 220051 - DNA, 449 bp, Homo Sapiens
  misc_feature (426)..(426): n is a, c, g, or t
tttttttttttttagtagagatgaggttttgtcatgttgcccaggctggtctcagactcctgtggtcaagcaatcctcctgcttcagtctcccaaagggctgggattacaggcaggagccactgcgctcggccaaagacagggtaacataaactttaccctaaatccactgtgcatgcagaaaggggttgactgacgaatccttgtttttctgagactcgacatgcagacagtttgatgctagaggagctccctttcctagggctttgtcatatttctttcccattcactgactgaccttccttgttttcagccctctatttggcactgggtaccctttaactcagtagttctccgctatgggtattagttgtcagggagtgtccatacttaggtaccttaaggttcatgagtcattttttaaggnaaacaaaaaagagtagtttttag

SEQ ID NO: 220052 - DNA, 439 bp, Homo Sapiens
  misc_feature (421)..(421): n is a, c, g, or t
ttttttttttttaataggggaaggaggttgccactttgtcaggtttttggatcggggctgtgctagcctcaagataatttggaagcttactattttttccctatgttttgaaactgtttgaaaactggaaatgatcatttctttaaagtttggcacaactttgaaattatctgggcctggtgttttgttcagaataggatcttttacaacaatgggaaagttgttgtaaaggcttatatggaaagctattgacctgtatctttttgggtaggacaggcaatataaaggctctctcttattgtaggttaatacattttgggtttgaattctacattggaaattaacattgccatggctttatgtctatttcaaataattgtacttgttcaaacagctttacttgggggataacccaaaaacngggggagtaaccccatgg

SEQ ID NO: 220053 - DNA, 496 bp, Homo Sapiens
  misc_feature (348)..(348): n is a, c, g, or t
  misc_feature (391)..(391): n is a, c, g, or t
  misc_feature (418)..(418): n is a, c, g, or t
  misc_feature (424)..(424): n is a, c, g, or t
  misc_feature (431)..(431): n is a, c, g, or t
  misc_feature (437)..(437): n is a, c, g, or t
  misc_feature (453)..(453): n is a, c, g, or t
  misc_feature (478)..(478): n is a, c, g, or t
  misc_feature (491)..(491): n is a, c, g, or t
ttttttttaaataaagtattgtcattattcattgtttaaaattttagaatttattcttcatattgatttattactcatgttcttcacgttaaatattattctttaatgaggtctgaaataatactaacatgatactgagaagacactggcctttatttttctctacctatactctgttagtatttgggacagttttttatacacttgttctatataatattatactttaaatatataacagtattccttcaaatattcctagaatgttactaagcctgatacctctggtaaggcacccctctagtttagtgcctgtgtatatctttagtgaagccaataggcttcttncactccttttcaaaggtgtttacatcatttccataaatgctanggcatcaacacattttaggggtttcgntttttngttaatncattcntacagtttttggggtnactaccccggcggggattttcggcnaggggtagggggntaggg

SEQ ID NO: 220054 - DNA, 362 bp, Homo Sapiens
tttttttttcaacggttctatcttctacctttttacttttacagttagactcttccctcaccaccttatttttccagaaacctctacctgcctgttttatgactttttattgcccctcctccatttgtctatatcattattccttgcactatgcttccatggattgtgcttttatatatggagggtgcttttaaatatctgttagcttcccttaataaaaatccagcattcacttaagaatagctaccaaaaaagattcttcattcaacttagaaaacattgagacaattcatgaggacaattcccatttaacctcttcaattcttgttcatgacagagagagaggaaaaagtcagtgttta

SEQ ID NO: 220055 - DNA, 516 bp, Homo Sapiens; identical to SEQ ID NO: 61780
  misc_feature (321)..(321): n is a, c, g, or t
  misc_feature (458)..(458): n is a, c, g, or t
  misc_feature (469)..(469): n is a, c, g, or t
  misc_feature (489)..(489): n is a, c, g, or t
  misc_feature (494)..(494): n is a, c, g, or t
  misc_feature (507)..(507): n is a, c, g, or t
  misc_feature (513)..(513): n is a, c, g, or t

SEQ ID NO: 220056 - DNA, 511 bp, Homo Sapiens
ttcactttctagacgattacaaacaactatggccggaacctcctcagctctccctctgcagagttccctaccctaagagaatgttaccacctgaacagtcctcggtgaatctgagaggagaggatggggtaaggcagaagcaccagctgtactactagaagggagcttttggtggtagatcccctggtgtctccaacctgactaggtggacagagctcaaagaggccctcttaccgctagcgaggtgataggacatctggcttgccacaaaggtctgttcgaccagacatatcctagctaagggatgtccaaacatcagaatgtgaggccaaccttctatcagagttaaacttttgacaagggaacaaatctcaaactgatccatcagtcatgtagctagctgtagagcttgcaacttaatagcagcagctgcccaatgccatgtgaagtaacaaactggtttttggtttttttttccccttcagttttaatgttatgtgtagaaattgaa

SEQ ID NO: 220057 - DNA, 363 bp, Homo Sapiens
tagactaactccatccggagtcttaacgcagagatgtgtgaaggctgctcaatgattttgaggtttacagaaaaaatgagatgtgaaaccaggggccctgatgaggctgcccaggtggtaaggaagacagaagagaagccatgggacagctgagcccgggcaccctcaagccttggaggcatgaagtttggtggggatctggcaaagaacacctgggagcagccagcgggcagcagaccccagagtagcagggaagacaagcacttcaaagaggcagcgtcagccaggggcagtggctcagctgtaatcctagcactttgggaggccaaggatggcagatcacctgaggttaggtctacctgg

SEQ ID NO: 220058 - DNA, 1000 bp, Homo Sapiens
attgtaagtctgaagtccaataggggtctcactagcctaaagttaaggtgtcggcaggactgtgttctgttttggagactctaggagaaaatctgtctccttgccttttccagcttcttgatgccattcatagcttctttcatgatctggcatcctatacgttatacttattttctgattatattttgcctaacctctgtgagatattaattatttgagggcagagatttttatttgtttgttcataactatatccaggtgccttaaaatgatgcctgacacaaaataggtactcaatcaacataggttaataaatgaatgagcaaaaagttttattgtgcatattaattgttacctgggggaatatactcagacatcttaagtctcatatgtaaacttggggtattgatatcaacatgccattttgaggattaattgaggttatgtctataaatacctactagcatagtgtctagcacatagtatgaaaacattgtattattattatttattaaaatggcattttgttttctttatagcacctgacactatccaaattgccttttctgtttttttttttttacttatttcttaattgtttcacaaaggcagagtcttgtatgctttgcctctatgtctttagtacctagaatagtgcctgtttaaaagtaggagctgaataaatgtttgctgaattaatattaatcatgtgtaggaaaagaagcttgggaatgttattctaccacccacagctgtgcccactattatgatggttgttttgtgtgttctttctcaaggattcactttcagaactcaaaatggggtgtagggtggtggtggtgccagcagtggggatgggagaagctcgatctctccctacagtagaagtgcttactgctctatgtgttcttcagccctataagaaccaatgaaagccatccacacttccctcgatactggacatccctacatactcacagcagtctgcaaaacctcgtgc

SEQ ID NO: 220059 - DNA, 530 bp, Homo Sapiens; identical to SEQ ID NO: 45447

SEQ ID NO: 220060 - DNA, 530 bp, Homo Sapiens; identical to SEQ ID NO: 44285
  misc_feature (154)..(154): n is a, c, g, or t
  misc_feature (444)..(444): n is a, c, g, or t
  misc_feature (470)..(470): n is a, c, g, or t
  misc_feature (522)..(522): n is a, c, g, or t

SEQ ID NO: 220061 - DNA, 448 bp, Homo Sapiens; identical to SEQ ID NO: 60334
  misc_feature (18)..(18): n is a, c, g, or t
  misc_feature (429)..(429): n is a, c, g, or t

SEQ ID NO: 220062 - DNA, 552 bp, Homo Sapiens
aacattactttcttagattttatttttttcaaaacattatggcttaaggaaaatagtttacttacttggtgacttgcctatgtagtagctattaaaaaaacagggtttttgtgagtttacaccttgtttgtctacttgatgggactgagtagcttccttcaactgagatagaatttgtctaccactgcgctgggaagaggcattcacttcaaatatcttaaatccaagctcctgggcacaagcatacactgcagcagtttttcccactcctgttggccctgttataaggacagtattgcaaagacgactctcttcttcatcatctgaactgcctttaaagtctatgccacccgagaaatcttcatgtttctcatctctttttcccttcagattctgcctttcttccaattcagctcttcttttccagtctttcaaccaactatgtaacttttttatagctaactcatttcctataagttcactggcagtctgaggttgatacttttctgtccaaagcatgtcttcagttccagaatctttggagaatctagc

SEQ ID NO: 220063 - DNA, 500 bp, Homo Sapiens
aaactcgatctctaggaggaaagaaaaaaaaggcctgggtcccagaaaactggttgtagccctagcttcttaatttattggccatgtgactatagactatttgcttactcgctctggtcctcagttttctggtctgcagaatgggtatcttgatgtgtgttgttcttctcctccacgatatgaaaccaaaggcctttatagcttgttttctgaggctccttccaggtgaaaatcctataactcccaataaaacagctggagaggctgtctctactgccttttctgtctacccaggagtttccttggttgatgggaagctgtttaagaactgaaatgagagagaagaggcagacagacccaaccgctacagctcctatcagaaagggcagcgcccgtggaattgtaggtagcctgttactggctcagagaacaagcaggcctacttatgttaaaccaaaaaccagatgaaaaatgaaagcgccctctctgctgcataaaca

SEQ ID NO: 220064 - DNA, 225 bp, Homo Sapiens
gcggccgcctactactactatacggctgcgagaagacgacagaagggctggaagacatggccactaaataccagggcattgtggcaaccataaagaaaaaggaatacaatttcctagaccagcggaaaatggattttgaccaagattacgaagagttttgcaagcagactaatgaccttcatgtaggttgtataataaaattcctgttggcaaaaaaaaaaaaaa

SEQ ID NO: 220065 - DNA, 336 bp, Homo Sapiens; identical to SEQ ID NO: 40774

SEQ ID NO: 220066 - DNA, 412 bp, Homo Sapiens
tccactaaaaaattttaatacagacgtgccggagaatgccattttggtcaatgacgaactacatatatgatggtggtcagagcaacacactacgccatgtggtctaggtgtgtagtaggctatgccatctagatttgcatacattgatgtgtgcctagcaatgaaattgcccaatgatacatttctcagaatgtatcctgacatgactgtattttaaaacagttgaaattttacaattttgaaggtggcatatacaggaatattcgtagcaccatagtttataataacaaaaaattagaaacacataattgctaaattcataaatggaaaacaaaccaatctaaatgctcattatcagagacctgaataaattttggtatagtcaaacgacagaataatcatcagggatcat

SEQ ID NO: 220067 - DNA, 476 bp, Homo Sapiens; identical to SEQ ID NO: 60241

SEQ ID NO: 220068 - DNA, 649 bp, Homo Sapiens
tcttactgttctggtaaaagaaaaaagaaaaaacccacagaatcacagaattcatgttctcacagtagccagaagctaaaataatgtgcttctttattgcacgtcaaaccaagaaaggtataaaagccaatgattctcaatccaaatgtgaaagtcaggttcacctcaactggattcggaatgtgctgatttccattggactcaagttgatctcacttatattctgagtgccgggaggtgaatgcatcaaggatagtgatgaaggtgtgagactttcgacaataaacttgtttaaaagtttctgtaccaatatctttccctgagtagtagaacaaaacagccctgtgcctttgctagagaaccgacaatcaaacccttttctgtggaggatcaaggctgcctcattggagtgcccattgcccacctttgactgtattgttctcaaattaaccagatgaatgtcacaaggcaaagatgactgtaatggagagaatacaccttgcagctcaagggtaggtgagaacttatttgccattggaatgactggatgattcatgagagaagaagttatgtggctaaagagagaaggataactgaccgacttcttttcttcttccgtatgaacagcacttcttttttctagtagtat

SEQ ID NO: 220069 - DNA, 426 bp, Homo Sapiens; identical to SEQ ID NO: 145649

SEQ ID NO: 220070 - DNA, 525 bp, Homo Sapiens
  misc_feature (238)..(238): n is a, c, g, or t
  misc_feature (367)..(367): n is a, c, g, or t
gcggccgcctactactactactaaattcgcggccgcgtcgactttaaaaaccacacaacaaatctattttgctttatgtaaatatgtatgtaggtaaatggggaaaagtctggaagcatgtatactaaacacacagtagcattacctcagtgacgagaaagtagggcagaaggagggtttttgttatacctgttattgcatttttatacattaaaaatagaatcatgggctggggtgnggtggctcatgcctataatatgagcactttaggaggccaagggggaaaggatcactttgagcccaggagctcaagaccagcctaagcagcatagcaagaaacccgtctctacaaaaaatcaaaattagngggattggggggtggcatgcactttgtggtggtgggtcccagctacttgtgagcttgagtgggggaaaggatcaacttgtgcctggggaggttgaaagcttgcagtgaaggatgttgaattaattcccactggcactccaagcccaagggccaaagat

SEQ ID NO: 220071 - DNA, 426 bp, Homo Sapiens; identical to SEQ ID NO: 60216

SEQ ID NO: 220072 - DNA, 462 bp, Homo Sapiens
gtcaacagccgtttttctagttccaagttttaaatacatggaaggaagtccgggagaaccatatgaaggagcaggaggagaggaagaaactttttttccttcttttccaggagtagctggaaattaagatcgggttccttttctgccagcttggaagggcaaccccatgactgattgcgattctgaggatgtctatgcaaagttggattcttgttacagtgtatccaatctgaagtattgcacatctgaactgggactgttaacactgatgccaatacagtgtggggtgccagaaagtgtctgctgatatttgtggaaaaaaaatctattttgtttacctactgtatcaaaggggagtctgggggagaatggtagtattttttttttttatcagctgtgaaaaaaatgttacagatctgcacattttcgtgtgtactatggtgtgtgtgtgtatgtgtgtgg

SEQ ID NO: 220073 - DNA, 484 bp, Homo Sapiens
cacgaatttgtgtgtcatcactgcacaggggtcatgctaacttctctgcatcgttctaattttcagtatacgtgctgctgaagcgagcaccttttagctttgcttctgctcttgactagaatgcatcccctccttgatttcagttaatcctgcaaagtgcttgacttcaaatctcagcttacctgtctaacctttactaaataatataacaacttttggctctaatcttagcccttgtaaaataaggataacaatgcctatgaggttattgtaaccatgagttaaggtttgtgaaaagtacatgaaagtctatacaaaactaattattcctatattagtcttctttaaggcctagctagatagtaggctctttaagaacagtcaccatgtctttgtatattcttagtgcctggagtgaggatgaattcatcatatatatttgttaaataaacacattatgctatttgcttataccttccttcag

SEQ ID NO: 220074 - DNA, 351 bp, Homo Sapiens
tttaacagttacaaaaataaatgtggcctttattaccaattataaaataaacataattaaccccggcataatgaagtgattaaatgaataaaaacgtatgttacattctctagggaaagatcgggtttcaagcattacagtgcctggcatcataagtgttcaaaaacagaaatccaaatacattttaagcagaattaggaattagcagaacaaggaaatcgcccagctaatgtgcgggtcaagagggcctaggagttcactggtcaaatgagggcttctggtgaaagaatagagaagggaaaaggagtaaagacaggagagtggcccctcgagggttttgttttgttgctg

SEQ ID NO: 220075 - DNA, 414 bp, Homo Sapiens
ggataaatggctttttatttcccattttttgtctttacagaggtaagataaatgtttttaatatatggaagtataagcttgtgaatacaccaaagaaattaaccaaagaataggaaagaggaatctggcctattcacgtgatacaatgtacgaaaatgtacaatagtactttaatccataaatcattcaacctgggaagataactcaaaatgtttaacaaccagaacagtaacattaaataatatatagataatacaaataaaaaatttaaattttataagtaaacatgaatattttaaaactgcttaccaagtaatataagttgcatcaaaccactcatcaaatcattcttataatttccaagaaaaaaaactatatacatgaatttttaaaggattaccggttcattgccaa

SEQ ID NO: 220076 - DNA, 477 bp, Homo Sapiens
aactataaacattttaatttcaaaaacaaaggtgtgtgcgatgttgtgtgcacagtaagggttgcggggcttggagaacaagcacgcgtccctgtgaagcccgcagggtgctggcggcccaccaatcgcctggactacagtgaggagcattgtgtgactccgcggtggatttccatgcaccgaatggactcagtttctaaactcacatcctaacgtatcctggcttttcacagaatactggagacatgactgcatgcatgatcacggttcttgttgtgaagctgccaccatgttacgcttaacagctgcataaatattataaagaaatagggttttcttgacacttagatttaaccttaatgcatctgcccagctgatggtatcagacgtgctgctgttcatttctttttcatggtaacagtaatgtataaagtgccgatgatgtaacatgcagttgtcttattttcatcagggcat

SEQ ID NO: 220077 - DNA, 412 bp, Homo Sapiens
acgcgtccgcccacgcgtccgaacggactcatctttgtgccacaacatgtaagcccaataggcaggtgctcacatatttgctgaaggaacagagaaagaactgcggagaaagacaaaagctcctctgaagttttagactatagaagcaaaaattatagtagcaaaagatgaatgagaaattctgttctagtcccagtgaagcaggaaggaaagggttgcaaacttgaggctggtaaggaagaaataattactgtgaatgcatttagccactcccctctactcaaaaatactggtaaactctgatttttatatttgtttagaatttaaattagaattctgtatctttattttttggaattctgttgttttgccttagtttcttaataaaaagttaaacattaaaaaaaaaaaa

SEQ ID NO: 220078 - DNA, 374 bp, Homo Sapiens
atatatgctatatttattttgttgttaaacataccttaagtttactcagaattttcaatttgctatacaattatcaattagcatatgggaatatattactttaagatgacttgttttcttttgaaaatacatatgtgctgagggatatgatttatatccctcagaaattgacattgtaagttcttggataagttcttgcaccacagttgaatgaattttcaatggaaaatgtaatttaaagacttattttttcatctgttactcaggtttagaaatgtatgttttaagatctacttgccagtttctctttttgatccaaacatatgatctgcctcgataaataacaacatctggtaccaaaaaaaaaaaaaaag

SEQ ID NO: 220079 - DNA, 477 bp, Homo Sapiens
tggattgaagaaaacataacgtttaattctcagaaacaaatgcaagcatcggtccaagtcttccttcccaaacctttgtcatttagggattgagaagctgagttgggtgaaaggttgaatagaaaacaaaaaggaaagctagaaacacgctgagctcatggagatgcagcttcttctgtagctcctaaagcccagctgaggtatcatctaatgagaattctctctatgccaggcactgcgctaagcatttcacatcattaagcaatgtgagttttaggcaaccccgaagcaggcagtctgttcatcccaattgcagctgaggaaacagggtgagtgaggccaagcagctggcccaaggtcccctgcctggtaagtggcacagcctgcagccctgccaggtggtcccgctaaccaagccggcgcttttctgtcaccatgccgtatcgcctcctgtactatcaaaatgtactatcaaat

SEQ ID NO: 220080 - DNA, 609 bp, Homo Sapiens
ttttttttttttatagtttgatgtatttatgggcagcaactatataccaaatacaattcctttaatttacaacacaatattcttccattgttcaagctgggttagcacaggcagatcagagatggtttcttgtgtgttttacaaataatctacacaagtccttgagatcatacttacagctttagcaaaaatacccatgatttcaggaaactggtgagtgagaatggctatcattgctgtagaagagcaaaatcctgctgtgaaatggatgaacaaaggaagctccttttttgggtaaacagaaacatgatgaaaggtaggtaatagctctctatcagccgtctctgtgcagctgggataagggtaaaatagatgtcctttctctaacgggtatggaatcattctaaaagtgccttcccatgtacactgtaacagattaagagcaccttctatttgtttccagtgctgaagatgaaagaaagcataggcaattgctacactatcaccccgtttcagaatgtgttctggaggtaaaattaaaactttcatctctaataaatattttggaacatgaggattaaattccacaactctatgaattgcttccag

SEQ ID NO: 220081 - DNA, 508 bp, Homo Sapiens
tagtgtctttaacatagtctcatatttggaaaagcagttttaaaaaaaattgaaaatacaagataaggtaagggttacttatataagttttaaccttatattgcttggccatttttacatataaattattgcttactagcttcgataaatacacagcacagtcatatacatatatattatatatatacacagaggcagaaagcatggaatatgggaaagaaaacactgttaatggcaattctggtaactcaacaaatgtttcatatttaccagttctttaaatggtggaaaactaccaagtgtagtccctgagaagttaggtagacaccctgatggcgggttctctatcttctaattgttaatgcaagctgacaatatcacagcagccctaattaatgatacattaaaaggcaagatttcttgcttcaggtcactgatttcatcccagtatttaataacagtgtgatacgaatacaataaatagactatgcaaataaatattactctg

SEQ ID NO: 220082 - DNA, 499 bp, Homo Sapiens
tcattttataatactttgttttaattattatttagaacataaatcaatgtaaaaatgtgggtatatacatacaaaaatacataaaactaaaaagcaaaaaaatggcatttaacatttagccataataatatataacatactacaggtcacatgtacattttcattcatgataacttagtatgcctaataattatgttaaaacaatattcttaaaatgcttatgtatacaatggaatcttaaaatgtgtgtgattcgaaccatttacactgtcttaagcactcaaaagaaagaaactgtcttctgaatagttcctaaattttggctcaaatcggctgaggtccaattctaacggagaatcattctctaatacttactgtcctatgttacttatgattccaaatgttgtcaacaatactgagtagtaccaaaagggctggatggagggggtgggcagggatacagtggctgcttctgcatttccagaactagcatcccaga

SEQ ID NO: 220083 - DNA, 499 bp, Homo Sapiens
gtgtcacatgtattttatttcattgaatatcatatgaacatcgggaaaaatgtgagacaacaaatcctagattatcaacataggtaacagagaggaggaaggcccaagcaaacataagaaaaaagttctgtactgaaacacagctattccattctactcatttgtaaagttaaagtgtgaatattagaaagtaatacaatattaaggacactaaaagaaagaataccccctagatttgtggtacaagtgtgtggctgtgaaaaacaactttatacatgaagaattcactggagtaaatatcagagtataaacaaaagggtttggaattgagatgatgcatttgatttaatacaaagtggaaaaaatagaagataagagacaagaagattgtaattgtgtttcatgtattctgtgattccaactggatgaataataagcaagaaatgtacagagctgtctaaaaattaaattgcttatgttgggggagtgaaggatatga

SEQ ID NO: 220084 - DNA, 547 bp, Homo Sapiens
tgggtctttggtagttttgcttgaaatatacttgcaatggcattaagtaaaggaaaataaagaacaatatcaaaagcttgtgctgaaagaagaatttcatgaagaaaatgaggagaaccatccattaggccttcagataacttatgaaaacttcttcgctcatttcttgatgttaacttgtggcggacattttttgttacagcttttgtgtatgtcagagagaggaatccatgctgctgatgagtgccatctagaagttttgtagttgtcacagatttttctttgcattgtagaaatactccttcaaaatgtcctgactgccaaccttcccctggcctgcttctatagtgatcaatattgaaactctctattttacatttcactttggtatatacatcctggacatctatggaagcactgagatcttctagttcactgaccatacaaacctctgtgcctttattttcaggatctggagcaaagagctttatagtaattttgggaagcacccactgcatccataaactaacacgtccactggttcctc

SEQ ID NO: 220085 - DNA, 305 bp, Homo Sapiens
tttagaactgagggtataatagggtttacctgtatgaaattcactgtttattaagtcacttttatgtacagaaagacctgccctagttaccatatcacttttagggtttcaaggcttcatctcacattcttcagctgaaaacaggtaaatctggtgaaggtattatctgaactgcccgtcacagagctagagagaagtttttcttttgttttttttttttttgagacagtctctcactctcaccctggctggagtgcattggtgtgatctcaactcactgcaacctccaccttccaggttcaagc

SEQ ID NO: 220086 - DNA, 233 bp, Homo Sapiens
tgtccaaagcggtacccaacacgacagttttttgacctgagtggtatcagaaataggctttactataaccaggtaaatacctgaacaaaggaaccctcatcaggaaggcactgtcactcttggcagcagcaatcccacaggaaaggagttcccctggcagagacagagagacagctactcatctgacaaaactctctcagtctgtcctttgccttgggtactacgctttggca

SEQ ID NO: 220087 - DNA, 158 bp, Homo Sapiens
catgttttaaagcctacataacagatactacttggccctatggttggtcccttgcttagaaatactaattctgagccacataattagctaaccacatgatccagcattatacaacgaaacacttcaaaaaaccaacacaagttgggagcggtggagca

SEQ ID NO: 220088 - DNA, 475 bp, Homo Sapiens
cccctcacgattacctcaagcatttatcctttgtattataaacaatccaattatacccttttagtgattttcatatgtatattaaattattttgactacagccaccctggttatggtagcaaatactcggtcttattcattttttctaactgttttttgtacccatcctgtcattatgtcttatggacaattttctttcgttcccaacaaaacaatgaaactcacaaaactgactgtaataatttgggtaacatgaatttaaagagcaatcaatacttaatgttctcagctctgagtgcacacattgtaagtctgaatgatgccaatgatatggccacttagataagtaaagtttgggagcatctcaaatagtttttttattctctgggtgcaggatgagcttcctagagtcttatgtgatacctatttgacgcttttacaaagaatcaatagtcttcctcccttgaggtaatcc

SEQ ID NO: 220089 - DNA, 461 bp, Homo Sapiens; identical to SEQ ID NO: 49498

SEQ ID NO: 220090 - DNA, 378 bp, Homo Sapiens
  misc_feature (353)..(353): n is a, c, g, or t
gcacattttttgtcttctcttccattcagttatgttgaaagctacgtgttggatctgttttttagttatgacattagatcttcatctgagattatctaaactacgttggttttcttttgattacaatctctttttttttttaatctgctaacacaagctcatgtttatctagaaaatgcgctttctcctcaaagtcatgaatcagcatgaatttcctttgagttagttcaaatcatccagaaattaacaaatttcaaaaaagagaaaatatactaaaatgtaggtcaaagctttataaggaatactttatgtggctatatctcaggctaggtcactgaggtaggctggtcatnaaaccctatggaccataaaccctac

SEQ ID NO: 220091 - DNA, 349 bp, Homo Sapiens
  misc_feature (2)..(2): n is a, c, g, or t
  misc_feature (8)..(9): n is a, c, g, or t
  misc_feature (183)..(183): n is a, c, g, or t
  misc_feature (194)..(194): n is a, c, g, or t
  misc_feature (318)..(318): n is a, c, g, or t
tnaaatanntagcacatttgaaaatttatatggaaatgtaaagcacttaaatagtcaaaacatttgtttaaaagaacaaaactggagggtttacaataccatgtcaagacttaccataaactacagtaattaaaaaagtatggtactgatgcaagaatggataattagtccaagtggaaagancagagtccagnaacagacccaaatatatgaccattcatttattaacaaagtccccacgcaattcaatggggaaaagaaagggtgttgtttttttcaataaatgtgtaggagtaggatgggatgtcccttatacanaataaatcttgatccccccctcacaccatac

SEQ ID NO: 220092 - DNA, 377 bp, Homo Sapiens
  misc_feature (178)..(178): n is a, c, g, or t
  misc_feature (190)..(191): n is a, c, g, or t
  misc_feature (373)..(373): n is a, c, g, or t
tggcttaatagaaaacagctggattctcatatctgctcctgcattcaatcaactccaatattacatatctggaaaattccactgtacactcacaagagaatgagagtgaaaaacggcaagtaacactttagtattattaggaaagtagttttaatctcataggcccccagtggggatncccctgggatcnnctggcccatgctgtgagaactgctagcctaggaatctgctctaaaactgactgaggttcatttcagtgatattagttaatatgtgtactatcattaatacaaatactttaggggtcaagtttttttaggaaaacaggggtcaggaaaacttcccccaatgtaggtaggtcaaaggcattttnggcc

SEQ ID NO: 220093 - DNA, 435 bp, Homo Sapiens
tgagaaggaaaggatttggacgagacaaaatttaatttaaaaactattatgagaagtttaatttcccctcccccaaccaaacacataaatcttttccatgcattttctttgtttcggtttttcctaaaaaatctggagagggaaaggcatcttgaaccatctgaaatgacagagtcagtggagtctttaataataaatatgtgtttattggattcctatgaattaaatgacatattagctatatgggaggatccaaggaaatcgtaagcaaaattgcattctcaccgaatgtgtaatcaaccagggagaaaagacattgatgggaaggataacgagtgatatgaggccttgggcctcttaaggagtagggacaacagaggtgtcagagtccaggcggggatggctcacttcggcaggggtggtcggggcccagca

SEQ ID NO: 220094 - DNA, 426 bp, Homo Sapiens
  misc_feature (199)..(199): n is a, c, g, or t
  misc_feature (289)..(289): n is a, c, g, or t
  misc_feature (327)..(327): n is a, c, g, or t
  misc_feature (344)..(344): n is a, c, g, or t
  misc_feature (359)..(359): n is a, c, g, or t
  misc_feature (366)..(366): n is a, c, g, or t
  misc_feature (405)..(405): n is a, c, g, or t
gtagatggaatagctaacagctatttttagagaatcagcaaaaatccaatctttccaaaaatatctctttcactgctcctaaaattcacatttttagaatctttttgtgtgtgtatgcagtgtttttctagaaagccttttttaaaatttatttatggggccaggcatggtggctcatgcctgttaatcccagcacttngggaggccgaggtgggcagatcgcttgaggcccagagtttgagaccagcctgggcaacatggtgaaaccccatctctactaaaaatacanaaaatgatctgggttatgatgggtgcatgcctataatncccagctacttcagggngggctgagggcaggnagaggantcactttgagccccgggaagttgccggttgcagttgagnccaaatttgcaccactgtact

SEQ ID NO: 220095 - DNA, 383 bp, Homo Sapiens
  misc_feature (309)..(309): n is a, c, g, or t
  misc_feature (354)..(354): n is a, c, g, or t
ggtcgggtgcctgattaaaatgcctactggaaatcagatgtccatgagttcaaggtcatggccttagacttggctgttgtaagggcaaatacaaattagaaataccagacttaaattatgaaacttgaagataaaaaaagacattttactctccttttaaaaaataatttaagaaaacttttatatgtaaatttattttgtgtctctattaaatgtatgtacatcatttaaataggtaaataggactttgtcagcctttttaacttaggaaatgtctttctctagggaccggggaaaccattgcattgnaaatgttaaatgggatttacctttctgtcctacagtagggtaacnttccattaaaatatttatggaggcccagg

SEQ ID NO: 220096 - DNA, 461 bp, Homo Sapiens; identical to SEQ ID NO: 53166
  misc_feature (359)..(359): n is a, c, g, or t
  misc_feature (371)..(371): n is a, c, g, or t
  misc_feature (383)..(383): n is a, c, g, or t
  misc_feature (406)..(406): n is a, c, g, or t
  misc_feature (428)..(428): n is a, c, g, or t
  misc_feature (442)..(442): n is a, c, g, or t
  misc_feature (452)..(452): n is a, c, g, or t
  misc_feature (460)..(460): n is a, c, g, or t

SEQ ID NO: 220097 - DNA, 481 bp, Homo Sapiens; identical to SEQ ID NO: 59162
  misc_feature (1)..(1): n is a, c, g, or t
  misc_feature (3)..(3): n is a, c, g, or t
  misc_feature (426)..(426): n is a, c, g, or t
  misc_feature (465)..(465): n is a, c, g, or t

SEQ ID NO: 220098 - DNA, 365 bp, Homo Sapiens; identical to SEQ ID NO: 49216

SEQ ID NO: 220099 - DNA, 269 bp, Homo Sapiens
gagaagacgacagaagggatttgcaagtgctcacaatttggggacaagtttttataaagatcttttaaagcaaatgcaagaacacttacagataagggctgtaaagattaaagataaagtatatgagcatgtacaggggtgtccaatcttttggcttccctgggccacattggaagaattaagaattatcttgggccacacataaaatacactaacactaacgataactgatgagctaaaaaaaaaaaaaaaaaaaaaagtcgtatcga

SEQ ID NO: 220100 - DNA, 462 bp, Homo Sapiens
tttttaatcaatatcttataataatgtggctaaaagaaacctctttgtagttttgaaattctgctgaaaatctccttagccagatcctcccattcattgggcaccttttctattttcccacattatcaaagacgaaaactttctgccactacataacacaggtcatttcttcagccaccccccatagtattttctttactgtccttcagtctctccagcagtctcctcgatgtccttccaatattcactaacatttttctcgaggcctttctaacttctgtggcaaccaggtacaaagtcattgccatttgttttcagttttcgttatagtgaaagtccactttcagataccaaatttagttccagttatctattgttacttagtaaactactccaaaacttagcacaataagcaatttattgtatctcatcattttggtaatcaataattcaagcatggtt

SEQ ID NO: 220101 - DNA, 606 bp, Homo Sapiens
atagtaatccgacaatcggatgtctttcttttttttgagagggagttcactttctcccccaggctagagtgcagtggcgcaaactcagctcactgcaacctctgccccccgggttcaagcgattctcctgcctcagcctcctaggtagttgggattacaggcacccaccaccatgcctggctaatttttgtatttttcgtagatggggtttcgccatgttggccaggctggtctcaaacacttgacctcaagcaatcggcccgcctcggcctcccaaagtgctgggattacaggcatgagccaccgtgcccagccagagagacaagagtggttacttctaaaatgacaagatgatgtaaccctggctcagggagtagatcaagttctaaatctcaggaataaaaaactgatactcattatccaattcatatagtcttgtattatatacatattaacagtctatgcaatgaaaaataaagaaatttcataaaactatttcaaaactcagaacataaaaatgtaaagaaacaaaacatttaatgtacaatctactccatttggcaatgtgtactgagagataaaaaacctatctacaaacagaatata

SEQ ID NO: 220102 - DNA, 639 bp, Homo Sapiens
gggaaagggattctccaggaaactagtcaagaaaataaccagtgatgtaaaaagtctggttctgtatgatcaagtgagatttctcccaggatgcaaggatggttcaacatatgcaaaccaatacatcacatcagcagaatgaaggacaaaaatcatatgatcatcttaatagacaaagaaaaagcatttgataaaattcaacatcccttcgtggtaaaaactctcaaaaaaccaagtacagaaggaacatacctcaatataataaaggccatatgtgagacccacagctgacatcatacctaatggcgaaaagcttaaagcctttcctctaagaactggaatagacaaggacggccattttcaccactcttattcaacatagtattggaagtcctagcaagagcaattaggcaagataaataagtaaaaagcatgcaaaattggaaaagaggaagtcaaatggtccctcatttgcagatgacatgctttttttttagagtctctgttgcccagactggagtgcagtggcgccatctcagctcactgcagccaccactcctgggttcaagcaaatcttgtgcctcggactcctgtagtgctgggactaaaggcatgtgccatgacacccgggtaattttg

SEQ ID NO: 220103 - DNA, 373 bp, Homo Sapiens
gggagccactttgatttaagtgaaaaaactcaatgcatcctggaggatatcctagaacagaacatggaactcttctgcattccttttaatagttgcatagaattccattgtgtatatcgatcgtgatttcatccaccagattttgttgatgggtatttttttgggttgtttctggtcttttgttctcatgactacatcttaaccagtggttctaagatgtggtacccagaacaacatcattactacctaaaaatctattagaaatgaaaattattgggtggaagcccagatctactgaatcagatactctgaagtgaggcccaggaatctgcaccatacgtcctgtaggtgattctgacgcaagctcgagtct

SEQ ID NO: 220104 - DNA, 353 bp, Homo Sapiens
gctagaggatccctaatatgagtcttagaacagttgtctttgagaaattcttccctctaccatgtattacatctgtgactgggcaaggtacttacctgtccagttaaaactaaggctttaggttaaagaaatcaaaagaaccctagtgcagtgttatggtttgaatcatgtccccctcttcctttaaaaaatatgttaaagatctaatgcccagtaccacagaatgtgaccttatttggaaacagggtcattgtggaaataataagttaacctaataggaggtcatactggagtaggacagacccttaattgaataccactggtgtccttatatgaagagacaaagggaaaca

SEQ ID NO: 220105 - DNA, 660 bp, Homo Sapiens; identical to SEQ ID NO: 46810

SEQ ID NO: 220106 - DNA, 533 bp, Homo Sapiens
  misc_feature (497)..(497): n is a, c, g, or t
gcgacactctgagtagtatatatgcatatgtgatttcttttttccaggaaaggggtccatagataccaaccatttctcagaatggtgggtgatcgttaggactcccatataatcttaaatgttcattttagttcatcccaaacattctaggattagttgttctcaataaacctgacccatactatttaatgctccccagtagacatccatctgtagctgctggagagtgagaaacactttctatttgacactgctggccaccagttcctactcagaagccctgagacaaaaagccttaggaaatgaaagaaagaataaggaggtgtaagcgtttaccttctccaggccatcgatgtcgttgggcagaagcacaaacatgcttaggtcgttgtttttatatggaatccctagaattttggcctgcaagtcctccaggaaagtgaagctaaaggaatggctctgcgtcatcatctgtacagatttacttgtgctctggnaaaaattaacagagcacacaatatctaaggacatgt

SEQ ID NO: 220107 - DNA, 395 bp, Homo Sapiens
aggcagcacggaaaggctgggttgctgtgcagataagctagccctgcttggccttatcatggcaacaggcttcatggacaggcccagcatctcttcagtcccttagggctttttgttttggttagtttttttaacatccgtatataaagcctcctttttctactccgtctgtagattggtgctcggtgtctggtaacagccaccctgagggcagttcctgctggttttatggggcgccaatgaggtctggagccagactggaagtccaggtggcctccacggggaggaatgttataaagcacaatcaggatctttgaggtgtgcctccttacagtatgccttggtggaggaagcctcttacaggggaatgtcctgggattgggctatccagggga

SEQ ID NO: 220108 - DNA, 400 bp, Homo Sapiens; identical to SEQ ID NO: 59300

SEQ ID NO: 220109 - DNA, 560 bp, Homo Sapiens; identical to SEQ ID NO: 60614

SEQ ID NO: 220110 - DNA, 436 bp, Homo Sapiens; identical to SEQ ID NO: 49961

SEQ ID NO: 220111 - DNA, 288 bp, Homo Sapiens
tgccactacttgtgctgggtgctgtttggcatggccagtggcacagtaagagaaggagtaggagtggaggagtgaagaaagaggaggaggagaagagaagaaaaggaggaggaaagagaaaaactagaagagaaaatgagaagaagatagtaagaagagaggaagtggagaaaaaaaggagagggggacagcaggaccaggagaggagaggagaaaagggaagctaggaggaagtagggagaaaaaaaggaggaggagaagaagaaaagaatgaggaaaagagaagag

SEQ ID NO: 220112 - DNA, 467 bp, Homo Sapiens
gctggaaaaagaaacagcaaatgatacaaaggactggacgcaatggcttatgcctgtagtcccagcacttggggaggctgaggcgggaggattgcttgatcccaggagttcaagaccagcccagacaactagtgggaccctatctctactaaaaaaaagttaaaaaataaaccaaagaaagcagaagaaacagtgcaagaagagaaatcactgaggccgagcatgagctactgtgcctggccggctgcattcctttctataggttctaagggagaatccatttccttactcagttgttgacatacttcaattccttgtggttgtaggaatgaagtccatatttacttgtagactataaactgaagatgttcccagcttttagaggctaacagattccttggcttgtgtctcgcttccttcatcttcaaagtcagcaatggcagattaaatccttgtcatgctgcaac

SEQ ID NO: 220113 - DNA, 568 bp, Homo Sapiens; identical to SEQ ID NO: 44664

SEQ ID NO: 220114 - DNA, 1000 bp, Homo Sapiens
aatgatgaacttggcagaaacactacaacattttcatttttaacagcattatcagaaacacactctgaaaacatgcacagaactcaggaccttactgtgaataaagctgaaattgagcaaaggcatttataccctcaggagggatttcttcagcgttttaaattgttttttctttcttcctagtaagtcatgagttcaagatttactacaacaaaactaactcatgcagaactgtacacccctgtcataatttcaaactgcccgtgagataccaggtgtgtctgcggtacatatgagcgtgcttgtatgcacaaccgaattataatttagttcaagaagacatgacttcaatccccagcaaagagttttcagctgctgtaggttgtctgtcttgctctgtttgggtttttaaggttggagcgtctccaggatcattgtttaaataagactgtgctcagactcaactttcagctttttctgtaaagggagtcgagatgaggctgtgggcaccgaatgtcatgaatcaggagacggtcggtgacctcgggccggttctagaagcccaatgccagtgcaaagaggaaagagcaggaaagagatggccttttccatgcagccatttctttctcacttcccaacggttcacatgaacgacgccggaagcccacggagactccactctcccaacagtcgacttctgaatctgatttttaaaatgccaacagcttccactctcccagctgatttaaaaaaaaaaattattataatcaatgtgcttgaatcctgcacacactcctatccagtgagggacgctcaatggtgctgctggggccaatctgagaccacagcaaaacagccattgtcctgagaatgttttatgacgtaacgatatggtgtcttttacatacttttttctgttctggaaataagggaaattgaaattggtttctaattaacttaagttcttcaccaacctcagtatcaaaaaaaaaaaaaaaaa

SEQ ID NO: 220115 - DNA, 1000 bp, Homo Sapiens
taagctctgatttcttcacaggtcaatggagatgatgaccatacctaactcattcaatgcaaaatactcacttcatgacttggtacaaagtaggattcagtaaaccatgtgggtgtcctccttccttttcttacaaagacaagattgtttggctatagatgacttgcagtggttagagtgacagagtgaacttacacagattatggtagctgaacagttaattaaaattgctgccagaaacttcatccacagatgttctcaaccttggctgcatgttggatcatctgcagaccttttaaaaaatcctgatacctgagattctttaatcaacttgggattcagattgacaatagaatttttgaaatcttcctatgtgattctaagatgtgaggaaagaatggctgctttatagcaacaaccatatcctaaaggttgttctgttttagagtttaaaagtgcaagaattatcttggaggaaaagctttcctaagaaagttcttgctcaccaggagtttgcctgctggccaaattcagccaatcacctgtttttctgaataaatgttattggaacatatccatgctcatctgttcatatatggccgttttcatactccagcagcagagccaaagagttgccacagagaacctgtgacccatgaagcctaaaatattactttctggtctttcatagaaaatgtttctgacctgccgggcacgatggctcacacctgtaaactcagcactttgggaggccaaggtgggtggatcacttggggtcaagagttcaagaccagcctggccaacatgatgaaaccccatctctactaaaaatacaaaaattagccaggcgtggtggcacacgcctgtaatcccagctactcgggaggccaaggcaggagaatcacttgcacctgggaggcagaggttgcagtgagcagagatcgtgccactgcactccaccctgggtgacagagtgtctcaaaaaaaaaaaaaaaaaaag

SEQ ID NO: 220116 - DNA, 408 bp, Homo Sapiens
  misc_feature (2)..(2): n is a, c, g, or t
  misc_feature (65)..(65): n is a, c, g, or t
anattcggcacgacggcggaatcctgctgtacaagccacctgtaatgtgggcagtggcaactctngtttcctttccaagtcttctgaggttgtttcctagtaagtgagctggaggctatggggcctggtcctggtggtagctattttgcttttggacataaaatcttggtagcttaatgtatttgttcctagggctgcaatagcaaagtaccacaaaccgggtggtactggtactgtgggttgtcctgcagttctggagactggaagtctgaaatcagatgctggcagggttaatttgtcctgagggctgtgagggagacacagctcctgggtttctcctagctgctggtagttactggcaacctttggcattccttagcttgttggcatcatcactccagtattcat

SEQ ID NO: 220117 - DNA, 493 bp, Homo Sapiens
aaaaacaaagtggggaaaggacaccctaatcaacaaagggtgtgggatattggcaagccacatgtagaagaatgaaactggatcttcatctctcaccttatacaaaaatcaactcaagatggatcaaagacttatatctaagaactgaacccataaaaactctagaagataacattggaaaaactcttctagaaactggcttaggcaaagacttcatgattaagaacccacaagcaaatgcaacaaaaacaaagataaataggtgagacttaattaaactaaaaagcttctgcacagcaaaagaaataatcagcagagtaaacagacaacccacagagggggagaaaatcttcacaatctatacatttgacaaaggactaatatccagaatctacaaggaactcaaacaaatcagcaaaaacaaaaacaaacaatcccatcaaaaagtgggaggacatgaatagacaattttcaaaagaagatatacaaatgg

SEQ ID NO: 220118 - DNA, 687 bp, Homo Sapiens
taccctaggcatcaccagatgctggacgcctcttcccatctgttctgtgtcttaatgtctgtagacctgtaatcagtacattctcaccccaagccatagtctctctcttattgtatcctaaaaatacgtactataaagctttggttcacacacactctgaagaatcctgtaagcccctgaattaagcagaaagtcttcatggcttttctggtcttcggctgctcagggttcatctgaagattcggatgaaaagaaatgcatgtttcctgccgaacccccttgggccgaacccgttcggccaaaggaccgaagagcaagtaacagcttcagaattcatcaggaccaagaaaggataaggatatttggctcacctcgttccacagctccaccttcatcttctcatcaaagcctaccatggatacacagggagcttctttctccttagccagtaatctgcccatgatgatccctgacagcaaaaagtttcttttctgaggctgccatactgccactgtccaggtggagactgagcaaaggaagtcctgggctgtgccagctcccagagcttcggaagaaagagcagcagctctctccctgggaaccatcagagaattctgttgatgtgttctgtgtctgtctgtccctggtcacgagttctaacacttgggcgaaccgggatctctaagc

SEQ ID NO: 220119 - DNA, 418 bp, Homo Sapiens
  misc_feature (64)..(64): n is a, c, g, or t
  misc_feature (77)..(77): n is a, c, g, or t
  misc_feature (128)..(128): n is a, c, g, or t
  misc_feature (196)..(196): n is a, c, g, or t
  misc_feature (282)..(282): n is a, c, g, or t
  misc_feature (303)..(303): n is a, c, g, or t
  misc_feature (315)..(315): n is a, c, g, or t
  misc_feature (386)..(386): n is a, c, g, or t
gtttattttgtgggacattacctcctctggatgttacttcctcagtttacaagtagtgtaaatnctcattgattctnttatgaattgtaatggatttcctcttagcttttgagaatttagaatctganatttgaataaaaagtaaatatattcagtataattctccaaaatgctctagtttcaagatagttaaaanattatgtggaatttacataattaattcaaatatagtttgtatttagttccttatcaaataatgcaaatagttgggagatacctcantttcttttgagtgttaagganggaggcaagganagggagtgaagtttttggcaacacattgtgttctttatttgggtctggcctatgtttttattcacattggnttataaaaacttttaaaattcctgtttgtatt

SEQ ID NO: 220120 - DNA, 401 bp, Homo Sapiens
  misc_feature (194)..(194): n is a, c, g, or t
  misc_feature (319)..(319): n is a, c, g, or t
  misc_feature (362)..(362): n is a, c, g, or t
tctctcagacgaactacagatcatcatttccataactacaccaacttacagcgaacttctttctggtgtttattatctgtattgccattcattgcctcttattgctttgttgttgatgttgttgttgtttttataagcaagccttgaactctaggaagattgtaagcatcttggggttaggggatagatatttnatctcagtctatttgctttaaacaaagtaagttctaacattgcgtattgagtactgtacttgttaacaattctcagcatgtgaaacatatcatttgtgcagcttgggaaaagtaacttatatgantatacagaatgtttgtgatttggtcaggggagtattatttccnctcattaattgccgtgtgcaggaagacttaaagggggga

SEQ ID NO: 220121 - DNA, 445 bp, Homo Sapiens
  misc_feature (89)..(89): n is a, c, g, or t
  misc_feature (109)..(109): n is a, c, g, or t
  misc_feature (376)..(376): n is a, c, g, or t
  misc_feature (406)..(406): n is a, c, g, or t
ttttttttatttacattttccagtttattataaaggatacaactaggatcaaccaaatggaagcgatgcatagggcaaggcatggggcngggcacagcaggaggaggtnggaacagagcttccatgtcctctccaggtgcaccaccctcccagcacatcaatgcgttcatcattccagactttcggaacctcctgttcaagagtgtttgggagcccagtctctagccccactcccctccctgggaggttgggggaaggagctgaaagtttccatctctagtaatgtgggatagtctttctgggtgaactcccattatgtatgttaataaaataaatgattaaattttgtcttctttttgtttgttttaggagacangggtctcgctctgttgcccatggggaggtngcagtgggcatgatgctaggcccacggaagccttcgacc

SEQ ID NO: 220122 - DNA, 421 bp, Homo Sapiens
  misc_feature (224)..(224): n is a, c, g, or t
  misc_feature (265)..(265): n is a, c, g, or t
  misc_feature (285)..(285): n is a, c, g, or t
  misc_feature (388)..(388): n is a, c, g, or t
  misc_feature (418)..(418): n is a, c, g, or t
ttttttttttttttttacagtaaacaaatgaatgcattttacaaaataaaacatttcccttggaaagttgagtgaaaacaaatatgtaaatagcttctgtttttatagttaaagctttttaatctctggtgcataacaattgaaagaatgagaacttagacaaaagtatttggtggatttgagttaatgggccaagcaagctttttttccttggcttctctgtncaaatgagtcatagatcgagtctttgggtaatagttttggnccatgggaagggatttctgnaaatgccaacgtagttttttttgggccatccttggaacttgttgtaatagtatagggcattgcttcgggtaacatttcatagagggacatggcaaaaagtctnttttcatccctcttccggaaaattggggcntta

SEQ ID NO: 220123 - DNA, 497 bp, Homo Sapiens
  misc_feature (433)..(433): n is a, c, g, or t
  misc_feature (444)..(444): n is a, c, g, or t
  misc_feature (460)..(460): n is a, c, g, or t
  misc_feature (480)..(480): n is a, c, g, or t
tctgcctcctggggctgttatgagggctgaagaaggggcaggcacagaggagacacttactatatgatcattgtcctcctagagtatcatcaccatcaggtggacttcagtggccatcccaggcctccacggatcaaccacaagatcttggagaatgtccttaccctccaagcctcagtttacctttagggtgaccaaccatcctggtttgtccaaaactgagggttttcctgggcacagtcccagggcaaactgggatggtgagtcactgatatagtttgactctgtgtccccaccaaatctcaccttgaattttaataatccctaggtgtcaagagcaggaccaagtaggagataatttgaataatgggtgggcagttttcccccatggctgttcttcatggatagtggaagtgagtttcttcacggagancttgattgggnttttattaaggcaggntttccccccttttgttcagntttcaatttttcccttt

SEQ ID NO: 220124 - DNA, 468 bp, Homo Sapiens
  misc_feature (339)..(339): n is a, c, g, or t
  misc_feature (393)..(393): n is a, c, g, or t
  misc_feature (417)..(417): n is a, c, g, or t
  misc_feature (425)..(425): n is a, c, g, or t
  misc_feature (434)..(434): n is a, c, g, or t
  misc_feature (439)..(439): n is a, c, g, or t
  misc_feature (456)..(456): n is a, c, g, or t
ttttttttttcagtttaaaaaagagaatttattgaacatctaacacatacataaaaggcagtaaagacaaatgagaagagggcaggatattgaagtatacagactttaatgctgagttttgtatcttagtaagttactgcaccttacagagactcaatttcccctgatttaggaaggcgatgctaatgggtattgcataggtgtaagtataaaaatgttgtatttaagagaatcccacaagcttggtataaggcagaaaataaatagatgtgacatgaatgagtactttattacatttgtatgctacctgcagactaggagggaaggaaaggaaacgcngccactattactttggattaggcattattattcctaatttgggaatgttaaagnggaaaaggggaaaaataggaaagnctatggcnttaaacacntggcntttaaattggatttttnttgtggggcccc

SEQ ID NO: 220125 - DNA, 497 bp, Homo Sapiens; identical to SEQ ID NO: 60719
  misc_feature (342)..(342): n is a, c, g, or t
  misc_feature (375)..(375): n is a, c, g, or t
  misc_feature (420)..(420): n is a, c, g, or t
  misc_feature (450)..(450): n is a, c, g, or t
  misc_feature (457)..(457): n is a, c, g, or t
  misc_feature (472)..(472): n is a, c, g, or t

SEQ ID NO: 220126 - DNA, 487 bp, Homo Sapiens
  misc_feature (286)..(286): n is a, c, g, or t
  misc_feature (364)..(364): n is a, c, g, or t
  misc_feature (379)..(379): n is a, c, g, or t
  misc_feature (418)..(418): n is a, c, g, or t
  misc_feature (455)..(455): n is a, c, g, or t
  misc_feature (473)..(473): n is a, c, g, or t
  misc_feature (482)..(482): n is a, c, g, or t
tttttttttaaacattacatgtacatttgcatgtactaaaaattgtggcataactatttcctctttccagtccaccaaaggttctggaactagcctagagttcaagggaaagtaaagggcctgataactgattcctacaaaaggtggttctgctacttcaccggatagtaagggaaccaggacattcccctacccagttagtcacctatgaaacaacaacagttactgtatacatgtaattcaaatcccaggaatgatggaggggaagacagaaaaagtgtctgangaagtaatgtcaaaaatttccaatttgtgaaaactataacctacagatcccggaagttggaataaattccacaggganaaaaaccacaaaggnaaaccacacaaaggacacatcatagtcaagtttccggantttcagcaacaaagagggaaaaccgttaaaattcagnggatagggggaaaacctntgttttttncctta

SEQ ID NO: 220127 - DNA, 484 bp, Homo Sapiens
ttggaatggggtcttgctctgtcacccaggctggaacacagtggtgcaatcatggctcactgcagccgtgatggagggtggtgctcaaaccaatgttaatttacaaaggatgggagctcagagtgattctcccaagacaagactgccagagggtggggtcctgctcatctgagagatggtgatctgcactggcagaaagcaaaaggacaagattaagtccattctgaagacacccagcattgtggtgtcttggctgcccaacctccactggtgagacgtaaagttcttatgtatatagaaaagcaataaagctccccctgtgcaaatggaactcctaagccagtggtgatgttgagttagaaagtcacagcctattacagacagaatttacaccaggggcaaggcctgaccatcacaccctcatgagagctaccagtcaccagggcttggatgggagcaacacagcggacatatgatcacctct

SEQ ID NO: 220128 - DNA, 446 bp, Homo Sapiens; identical to SEQ ID NO: 61962
  misc_feature (57)..(57): n is a, c, g, or t
  misc_feature (127)..(127): n is a, c, g, or t
  misc_feature (424)..(424): n is a, c, g, or t

SEQ ID NO: 220129 - DNA, 446 bp, Homo Sapiens
  misc_feature (114)..(114): n is a, c, g, or t
  misc_feature (339)..(339): n is a, c, g, or t
  misc_feature (419)..(419): n is a, c, g, or t
  misc_feature (438)..(438): n is a, c, g, or t
tttttttttttttaggagagagaaatcatttaatgtggtaagccagtaagatttaagagctgtttaacatactattttgttatgttatgagtagcattcagattgcagatcccngcttctgaataagctcaagaactttaacttctatcccctatgggcctatgcccagggggaagatggggacttaaagggtgtttgtagaaatcatgggtagaaaaacttacatacatatgtgtatatatatatagatacaaaaaaaaactatacatatttaaaaatactgcaaggttgtggtttcctgagcaggatgggattggggcagacaaaatcaggcaatgnccctgctccctgaggagagggcctcgccatccctgtttccctaaggtcttgagtctggcactgggttcttctgaggtcanattgggatccccgattcanctgcagcc

SEQ ID NO: 220130 - DNA, 441 bp, Homo Sapiens
ttttttttttcagagaaaggtaaatttcagagcaaaatgatcttgaataaaaagcctcatggtctcatgggaaatgcagaacaaggttgtaggcaataggtatgctgaagtgtggcataaccagttgtctctgccaaaagacatctaaacacttaaacaaaaatctgatctatctgccaccattggaactgacttaaccctttatttcttttttcttcttgttacatgcaaaaacttgggaagtacatttggtcttcatgcttttcctcttgtccttcatgccccttcctcttgtcattccacctacttctctgggctccttcacatctcttgtctttaggggaactgggcattgtttcttaggtataggtatcttgggttatatgggtttgggctctctggtccacacccaaatcttcatgttcggaattgtaatccacg

SEQ ID NO: 220131 - DNA, 404 bp, Homo Sapiens
  misc_feature (16)..(17): n is a, c, g, or t
  misc_feature (212)..(212): n is a, c, g, or t
  misc_feature (335)..(335): n is a, c, g, or t
  misc_feature (361)..(361): n is a, c, g, or t
  misc_feature (374)..(374): n is a, c, g, or t
  misc_feature (382)..(382): n is a, c, g, or t
  misc_feature (395)..(395): n is a, c, g, or t
gcaaatgccttttcanngtttaggattagccccgagaaatccaccaattaagtaaatgtttttcaaattgtaggttgtaaagtcatttaggtaggtcataattcgcatttttgtaacaaaaatatattagagtggagtggagtggcaagggatgggataggataacatagaaaacatcagggtaatttgcaccttaagtgtattttggagantattttatttcaattataataaatatgtatgtgtgttatgtggggtgccataaagtgcatttctcacagtgagttccagccattctttttttttttttttttttttttttttgaggggggagncttgcttcttcacccagctgggggtncaatgggcatgancttgggcncacccgcaacctntgccccccg

SEQ ID NO: 220132 - DNA, 482 bp, Homo Sapiens
ttttttgccagttttattagaaaatgagtttgcagagcccccccatctaccatccagaagtggaactacatatagtcatttaacaatagtttagcattttctgtcatctcattctggagaatcatagatgtggcagaaatacatattcttgaagaaaaaaaaagtctcccttatgggtactgtgatttcaatagggtgtgggataagtacatgacaacatgcatgggatagacactctgttctctacagatccgtgctttggaattacagaacataaaagatataatgatggttattactttttacatgtgacaatctagttgtagcgtttaagattaaatttggttgtgagtaaaatagtaaaactgccccaaattaaagtggataaaatataataaaagttaatttctctgtcatataatatggatgtaagcctgatactgtggccttgctctaaaccaatcatgaattttaccattctg

SEQ ID NO: 220133 - DNA, 607 bp, Homo Sapiens
tttgagataaccggcatatgtgagaatctttattttgacaaataagtgcagtataaaaaacttgacctgaaaattaaaaaaaaaaaaaaaagcaggtaaaaataaatatgtttacaaattattgtagaaacaatacaaaagaggatttgaattctcaatgaggaaaaaccaaaatgcgtccaattgtataaaggctcttcccttgcaagaaacggggataaagctgaagacccagtttggttttgctgctgaaaaatgtacaaaataacttagaaaaaccagtcgaggtcaaacgttgtgagcccactacctgtacctgcctgtttttgatttgaggaaagttgacgaccacagtgcaaggcagagctgatggtaggacagccaggagagcctgtcatcctacattaatcttcaagtaaatgctgaagaaaaacaagcccttagcgaagtctgaactctgcacttggctgaccggatttcctccattctaatgctcaaaatagtttaacttcttggccagcagaacgattgcctggatcagctgccttagcaaatgcctgctgccttccagccttcatgggttgggtctgatgtcaaccagcagtct

SEQ ID NO: 220134 - DNA, 513 bp, Homo Sapiens
gaaaagcaaacattatctttatttaataatctttgatatttaaaatacaactcattgaacatccacactaacaacagaatcctgtgttcaacagtgctttggaagcccggcttttctaacgaccagacaggaaggcctgtgtgtgtaataacagcaaatgaacttaacgagggagcacacacagaagggctgcagggctgggtcctgagcaagcggcactgccacagtgcacttgtatcatggccaaacaacaatgctttttgtttcagatattttctgtacttgaatttcaaatatttatacagaacagtaatttttaaaaagttattcctaatagcccagtgttgtaaaaattagataatcacatttaaaaatgtatgttttcctctttcaaaaaaaaaaaaagcattaaaaaaattcagaaaacattccttgaactatgcaagagacaattgagagcttcctaaatgcatcaggaatatccatttatattttactaatgtttctcattgc

SEQ ID NO: 220135 - DNA, 517 bp, Homo Sapiens
aatacagatgtaaaaaaacaatattcccttaaaaaatcacggtcaaagtggggtacagggattttcaggcatggtcaggagctccaccaatctaaatcaccacagcctgccgttatataatgctgaatactttcacagatttatagtttatatattataaatttgttacacatatagtttatatatatttattcttaaagtacagttttatatatatatacacatacacacacacacacatcacttatagttaataagaatggttatctagtgctgaatacatctgaacataaagggtgagcagtggtgggaaaagactgagaagtcaggagggttggtcagctgcatccactgaagattccatgttgctggtggaagtctccccctcctgccactggtgagaaaaatggctcagactgttgcttcttcactttaaaaagtttggtggagctcttgtttgccaacagtagcctatggtggcacttgtcttaaattgtgtatcatgcttttcctgctc

SEQ ID NO: 220136 - DNA, 511 bp, Homo Sapiens
tttttttccccttggccacggtacattttaggaagggtgaaaataaagtgaaggttgtgaaatcaagcaggcgataacatgttaagggtcaaatgtctcagttcctgaattttgatggtgcaatacaaagcaaaccgcttggtttgaaggcagctttgatcctgttataagatgatcaaaggctcaaaagatttttctggtcaccaccactaagtcaagggcacttctccttgtcactaggaaaggccctaagtatttacaaatttaaaataaaatagtttgtgagcttgaacaacagttaggaagcaaatagcacttcaatggccataataacctggatcctgggtagcctaaacaactcagttctacaacctaaattcacaggcagttcaggtgaacgttgggcaccattttctttccttcttggccactctgggccatcttttcacttctttttttccctcaatatcttctcttttctaaatgctcttattataaatgtgaaatatat

SEQ ID NO: 220137 - DNA, 584 bp, Homo Sapiens; identical to SEQ ID NO: 61483

SEQ ID NO: 220138 - DNA, 540 bp, Homo Sapiens
ttattacacggttttatcatgttgcccagacgggtaatgaactcctgagctcaagcagtctgcccaccttggcctcccagagtgtttgttaggattacaggcctgaactactgcacctggccaggtatgtaatttcttatgtatagattaagacttcttaaaaaaaaatcaatagcttagtttcagttcttggcacaagccattagttttaggtgagaaactacgtaagaatttttagggcttggaagaatttaaactgatactcgaatatagttttttggtttggactactcaatatacctgggccttaatgctgcctagggaatatgtgtgaaatttcatagttccatagatggagaggcagctaggagccttgaccgtgtcctgctgcccactgcaatgtcaggttccataggctgtatggctgtacatacagcacagaggaaactgcaaactggaaaacttctcactactctctaggacctggcctgaattcctagtcacctacccacctggtgggaccatagaatgctggaagac

SEQ ID NO: 220139 - DNA, 425 bp, Homo Sapiens
  misc_feature (414)..(414): n is a, c, g, or t
taagcagcagtgcagtaaacatccttctacctgcttccttgtacacatgtgaatgtttcttcgcatacatatcacgttgtccatgcagaggtattttaaagtgaatcacctgtatgatactataaagttaccaaaaaaatagaattgggctcacaggatatctgcaatttttattttagtggatcttgtcaacagctgtaaaaaatggccataaatatttgcacttctgtcagcatgacatcagtactcatttctctaaacccttgttacatgtattggaaaatctcatcagtcacttgttttttaggggaggggagtgtcttgcacagaaatctataattttaatatattcaaactcttcaatctttttagattctgcttaagaattctatccaaaggtgataaacacgtttntctttacattt

SEQ ID NO: 220140 - DNA, 536 bp, Homo Sapiens; identical to SEQ ID NO: 61280

SEQ ID NO: 220141 - DNA, 399 bp, Homo Sapiens
acctagttgaccagggtcagctaggtagcaataataaagtaaagtaccagaatcaggaagaggaaagacatgaggtcctgaacaggtataatactgtttactggacaggatcactggaagacttcaggtgtattaatgcatactgatactaccaggaacttactagctacacactctagtcattttttttttaattcagtaatcctgaattctcacaactattagctgaaccatctgaaagttcaaacatatcctagagataatactgaagaaatgaacagggccctattttccattttcaatcaattggtatacaagcctttacagacagataaatgcaagtcctttaaacaattcagaacgtcttactagtctgtcgacatatggtgtcagagaacc

SEQ ID NO: 220142 - DNA, 512 bp, Homo Sapiens
aggcaagtttattaaaaaagtaaaggaataaagaatggctactctataagcagaacagctcaactagcatggtttctatcccctaactagactccaacgaatgcaagagggataatagcatctacctcctaatacaacactaatacttattatcattagtatattaggctacagaagccaaaagcagaaattaagaaatgttatggtcagtagaatcaaatatacaaggatattggattaggttattgttgttggtctttcagagcaaagttttaaaatctgatttgagaaaaacctcccagcatgcacacacagccggactctcagaaaatgtttcctttttagtcaattcctacatggatgccatgcaaaaccactccatctatcaagctgtcagaatgaactgctaaattcttaatagtctcattcacacaaaatgtccccacagtccagtgcatctggagggtctggccttgacttgctaaatgcaggcacattcagatagccttcag

SEQ ID NO: 220143 - DNA, 526 bp, Homo Sapiens
tttggcaagcagatatttggttgtcctgttcttagtaatggtgagcttaatcagtagctgcacagggacaacctcttccctctgtctgctgtcaagttccctattaaccttatatctgatggttttatccaataataaattgtttcctgagtcagttatttcattcagaattgcaaagtgatgatttttagtttagttattccttccatgtttaatggaattcttctgtaatgaagaacttctctcaaagctgccaactagggttgccctaaagtataatatatacaagaaaaatagtaatgcttttctttttaattgtcaaatacagtaaggaatttcagtgaggatgtttgtgtgtgttttggagatggggtcttgctttgttgcccaggctggagcgtagtggcacggtcatagctcagtgcagcctcgaattcctggactcaagggatcctcctgcctcggcctcctgagtaactaggactacaggcaggtagctgggactacatacgtgtaccagcacacc

SEQ ID NO: 220144 - DNA, 500 bp, Homo Sapiens
tttgcttccctccagcccccaccgcccccgagaatacctggagaattgggctcaaaagtaaagggtttagaaactgtcttgctgaagtaagcagtcttttataagagcacatctatccccttggaatgttacctaaatatacaggaatctgaatctgtagaaccgataaagtagggggaaaaatctgttttccctggatacatgcatagatgaatggataaatgcatgattcatataatattaggatgctatgacacctggtgctttactctgatcagcctggctgtaatcaacatgggaaatacatggaaatagaagggaagtcatttataatgtctggaacatattgaaaactattcccaagcagagaataatttccaactctaaagaatagaaggggaagtcttgtttaaagagaaatgtctgaatgttcatcgactttttaagtctgcatttcgaatcgaaactacagaactgagcaaagcgttattcaaatactg

SEQ ID NO: 220145 - DNA, 669 bp, Homo Sapiens
aagaagtgaatcaactagttttattttttcaggaagtttaacagcgaagaggaaaagacaaaagggcaaaaatgtaaatggaaagcagaattcatgagatgattcaaaaatgtttgtgagttgagtgggaaaaaatcaagtaaacaggatagactgaagactagtacttggtaaaacaaaaccctgtaagaaatataaaagaccacatcagaaacacaagtagttaattccacttaaacactaccacctctccttcttgaaacgccaatgacaactgagataaatggcataaagccataaatataaaaaagaatatccctggaaactagaaaggacatatgacaagtggtaaatgactgaggaccgaagaaagctgctgtagtaagacaagcccaaaagcaatgcatcagagcaccagaaactggaggaacgttagacaccaggcatcgggggtggggagatgcacatgcgcagtgatgttctatgtatccaggagtgacgttttcagatgaggctaaccaacaggaattgcataccatcactctggctgctctctcctgagattacatttcctgcaaaccacggtccagtgggtacttgaacaatgccatagcaagcttgatgcaccgcgacgctgcatccgtgcccgtcgcaattaaccagcggttc

SEQ ID NO: 220146 - DNA, 605 bp, Homo Sapiens
ttcaggctgaataattatcagaacttaattattaaggaataacagtaacagctcagctaatatgtaacattcactgtgtgccaggcattgctcctctaagtgcttatatttaactacattaactattttgcagcaataaaaaacacatctgtcataatgtgaccaagctgctgttttcagaaaaaaaaaactttcaataaaaagttcatgattttaaaaaattaaggtaatgttctttaaaaatgcttatactttaaaactcaccgttttctgaaggcattctgcccaatgtacaagcagagcaggttgaaggccatgtttttcctgggctcttagagtgtttatttcatgctgaactagaagtctcaattttgctacgtttccaggtctaaaaaatagttcaatttactaaaattgctttctaaatacacagttcagggctacatacatatatgttaatgggtcacatgacaaattaaatcttcacatgaggattaaatccccggtaaaacctacgcactaagtgaaagcatatttttggtttactctaacactgctttagctggaatcagagtacaaaccgcatcccacgcagaatgttgctt

SEQ ID NO: 220147 - DNA, 452 bp, Homo Sapiens
tagacatgtggttcacactaaatgtcttaattttttcaagatactaccatttgttttaattatgtccactgagtagcttctatagaaaatgtgctttgctagggttttggtttgtttgtttgtttgtttttcagataagggtctcactatgttgcccaagatggctgcaaactcctgggctcaaaggatcctcctacctcagtctcccaattagctgggaccacaggcatctgccaccacgtctggctataggagctgtgtttttaatttttgttttaatgagaacatgtttaaggtagtttgctgaccctatcagtttgtctttcgaatgacagcaaagaaattaacttcatatcttgataagtttattataaatggtcgacatctgcttgacacaatttacaaaatggatctttttataacctaagaacagctgataacttaaaagacaa

SEQ ID NO: 220148 - DNA, 444 bp, Homo Sapiens; identical to SEQ ID NO: 60885

SEQ ID NO: 220149 - DNA, 473 bp, Homo Sapiens
atctgaagcccctgattttatttttccagcatcactctaaggaagagtgtggattagtgccattattcagggctggtattaataaaagttagcttttatctgcagggctaggttaaggctggcattcttacttttacattaaaaaaactggctacaggctgcgcagctgaggtacttcagtcatgtgccttctctaaaggattcttagatccttaaaatatatagtatgttttaagtttgtatctaaatagcacttactgtaatgtattatacctaaatgtttattaaaagttagaagaaatgagtaccaacaggaaggaatggaagagaggagaggggctaagacattgctgatctgagggacagacctctatcaaatagaaaagggctgggagaaggggtgattagaagcagagtgagggaactaaatggagccctgactgcaccaaataaagttctcattgtgctgcttg

SEQ ID NO: 220150 - DNA, 599 bp, Homo Sapiens
atatctggcatgtatttccatatagcagcgtacagcacagaaactctcaaataccctttcattcagcaaacacacacactagtgcctgttctgtgccaggcacacaggaggccttgggaagacaaagatgaatgagatacagcctctgttttcgttggtgacacaactgaagtatagctgtcatggaggaggagttacagccaacacagaaaaattatttcattttatgcttctccataagacctcttctaatgtgcttgaatctactgtccaacagagaagaggacctggacacttccctccaccaccaccccccgcccttctcctgaagacctgaaattgaatctcagttctgccacttactggctgtgggatcttgagttcctacttgagttttcagctttctcatctgtaaaatgggaatccaaactgtacttacgtcacaaggctgttgggagaattcaatgacataatgcacgaaaatattttctcaacatatgaagccctgcatctccttagtcattcattacatttgtctgctcacagttctctggcttggcagtgtcatcaagcaaatgagacgtcaagccatcctactg

SEQ ID NO: 220151 - DNA, 564 bp, Homo Sapiens
tttttttagagtcattcacatacttttattaataatgcacagttgggcattttatacaaaattaccaattttgttatcagtcaattttaaagtagggtgcaatatatatacgtatataacatatatgtatatattatatatatattgaaaatgtaaaacatatacttttatatacatatttgtatatataaaaatatatgcatgtataaatacaatggtttccctaaaaaaattatttaaataaagccagaagtaccattatctatcctaaaatttaaaaaaaacaagctgggtgcactggcacatagctgtagtcccagctacttgggaggctgaggcaacaggatcacttgagcccaggggtttgagaccagcctgggcaacatagtaagaacccatctccaatacaaaaacaaaaacaaaaaccctcaacttaaagccaatgaaaataaagtccttcatgtatgcataaactcattttatgcagatatttcccaaaaatggctataatatctcccaccccacaagctcttctccaatgtgaccttgtcactcctttcatca

SEQ ID NO: 220152 - DNA, 576 bp, Homo Sapiens
gacagtctcgctctgttgtccaggctggagtacagtggtgccatctcagctcaccgcaacctccacctcccaggctcaagccatcctcccatgccagcctcccgagtagctgggaccacaggtatgggctaccatgcccagctaatttttgtatttttctgtagagatggggtttcactgtgttgagcaggctggtcttgaacacctgggctcaagtgatctcctcacctcggccttccaaagtgctggaattacaggcgtgagccaccgtgcccagcctgcacccacctttttgaagagacgctgtagggtacatgtaggccacatcatcacgacatggggtgctgtgttcccagggactagccagacacacattccccgcccggtggtggaggtggaacccagggttttgcttctgccatcccctcaagtagccccagccccactgccccgctcaccacggaaggcattatggaagttatcgatgaccacaggcaagtagccagcctccagcagctccagcaccgtgtggctgccaatgtagccagccccacctgttaccagcaccttctctgc

SEQ ID NO: 220153 - DNA, 429 bp, Homo Sapiens
ttttaatgcagcaatcacattttccccattggcactgctgttttcatagttcagtaaagaaacctaccatccaactgtaaaatctgactggttttgggccagttcatttagaagctacaaagaggtagtgcatgcatttcaaattagaagaagttaagcctgttaaaagttttataatcttttatatcaagcttccatctgaatggataaatgcaggaatgtcagaggcatctctgacttcatgaaaggtaagttcataattcaaactatatattattatgcatgaattaatgtgtcatattctgaaatatatgttcagaatcattacacaggactttcagagtagtccaagtagcaagttaaaatcaagtgtttcctggccgggcgcggtggcttatgccagtaatcccagcactttgggaggctgag

SEQ ID NO: 220154 - DNA, 581 bp, Homo Sapiens
  misc_feature (560)..(560): n is a, c, g, or t
gcttgttataaattttattagaatagaaaataatacatacagataaccataggatacacacacaggaattgaaagataaattttatacttttcaatatgaaacaaagtgcatatctcatggagatatattgctagaaacaacatgaaacaatagagcaatcatcttgaaaatgaaaagtataggaacatataggaattactaaataataaaaaggtccaacttcattacatgtagcataaaatacaagtattggagaaagtggaaataacaatggtcatatgaaatctactagtcattcagattgtttcaatatatacagtatatgcggaccttatagagaaagttataaatatttattgtttttgtgtatgatgactttatcttaaatgtaatctctaaatgtaaaatagtgctttatggtgatatcagaatttccctaatttttaatctttcttgttatctgaactgttttctaattctgatattgttggaaatatgaacaagtttctgcaaaatgtgaaattggtaggaaagaggtaaaaaactgattttgcaatgntgaaaactcaatctgctgatt

SEQ ID NO: 220155 - DNA, 449 bp, Homo Sapiens
ttgcaggggaccctagaatagtttttctcctgccatttctatgaatgtgtgaacgtgcaaatatgtcaatgactagggaaaatatagtgacgcactggtcattctacaactttaagtctacacaggttccttcatcaaaacagggcattaaaaacaactaagctatagagccagatcactggaggtactgtagtttataacctgcttataaaccccagttcttaagtccctcaatgcctagcatgctacctaccaatacgcatacaaataaatcagacgatcttgtgccccccagcccaatgtttaccaagacttcaaaatgttctggtgagatcacctccctgctatgtgatgcaaacatcagagtataaatcttttcagaaaactttttaacaactgttggaaattttaaagataaaagcaatacaggtcaagcagacccctgaaga

SEQ ID NO: 220156 - DNA, 520 bp, Homo Sapiens
tttaagcaaaatcatggaggtatttttattaccttgtggggaaggtcattctacgcacgtcgggaaaaccaggaattataaaatcaaagagattaagtttacatcataaaacttaacttttataacaaaaaaactataaataaggttaaaagactaataataacatggtaaaaaatttgcaacacaagacaaagaaataatgtcctcaatatacatagctcttaaacatcaagattcagtataatgcaaaactatacagccattaaaaacaatacaaatctatatctatggtcatgtacaaatgttctcaggattaagtgaaagaagcaagttacaaagcagtacatagagtgtgatctcatctatgcaaaggtgtacatagttgtatataagcatatgtaaatatgcacagagttgtctgaaagtaaatcttaactggtcattttggggtagattattttttatttatttttttaaaaatgtgcatgcactatttgtttttttaagaaagaaatatatt

SEQ ID NO: 220157 - DNA, 460 bp, Homo Sapiens
acagtagagatgggcacgggggagggtcttgcgatgctgcccaagctggtcttgaactgctggccttgagtgatcctcctgccttggcctctcaaagtgctcggattacagtgtaagccacggaacccagccccatcatgcctttaagtgttcaatgcacagaatagatagaggccaatagtccatttcaatcagattttaaaaaaagtaatgcaaaagatgggagaatttattgctgactgttacttattatgcaataatttactttaaaatacttcaaatataaactgtgtaatggatgtgtgctgtgtaatttaacttcaatcttgttctgggggtaagttagtatttgaagcacctcaatcaggtggctaggaagatgctttaaacacttatctaaatatacgccagagtgttcatcagcataagggatattagtaatttttcactgatgaatgca

SEQ ID NO: 220158 - DNA, 497 bp, Homo Sapiens
tctgaaataatattttaataatagtctagtaaaaattatgataacaatctactgaattattttttaaaaaaaacttagaatgtcagaagtctttgtggtctgcagagaaaatgaagactaaatgttatagctttaattataattttaaaaatctaaatgttcactaaatctgaaagattagatatattgggttatgttgcattgctgctcacagtaaaatcttgtaagtcagtataaaatccactagattagaaaaagaaaagtaggctaggaagtttggtttggcttccctatctgtaaaaccacaactgtctatgcttgacacaaactaaggtaaataaataatgtgtcttaggctaattgctaactgtgaataggagataacctggcatagaagagtagaaagagcattccaggcagaaagaatggactcagcagaggtactaactggtgaaacagcatgacatggtcatagtcacaccagacgtgagctcttg

SEQ ID NO: 220159 - DNA, 562 bp, Homo Sapiens; identical to SEQ ID NO: 59688

SEQ ID NO: 220160 - DNA, 488 bp, Homo Sapiens
cagaaagacaacaattttattaggcattcaactagactttgatgcacatcacggctaatctgctaatgaggttacaaagagagaaggaaatccctcttttatacagccaaggagacacaatccattacacattctcaaggaaactggtaacgtgtcctcatgtaagagggcttaacatagtgttctatacattcttttatatttcctctttaattcatctggtaattggggtaaccacctgtgttagctaacggctttcctcctaagtaatgcacagctccataacgaaacaggtgtttacaattaggaataacgcacctaggttaaactcccaaagtgacaaggagactggggccctatcttccttgatgtttacattttaaagaaatggcttccaggtcctcaagaaaagcattcctaggtctttaaaaacatttgcatacatattaaatagaggaagcattcacaaatactaagtttctcaagaa

SEQ ID NO: 220161 - DNA, 420 bp, Homo Sapiens
  misc_feature (320)..(320): n is a, c, g, or t
  misc_feature (331)..(331): n is a, c, g, or t
  misc_feature (359)..(359): n is a, c, g, or t
  misc_feature (383)..(383): n is a, c, g, or t
  misc_feature (397)..(397): n is a, c, g, or t
  misc_feature (402)..(402): n is a, c, g, or t
caatgagcaggggctgggagtagagggtttctggggcctcagggttctgggaaagcaacagctatcagagagagaagggccagaccccatagcctcttagattcctggcagtagaaggagaaggatgggtaaattgacctctgaagtccctgaccattagcatggtctaggatcctttctagaaggaagatctgaggctctggtgctcagggggatggcttgggccttttctctcaaccttggctgagcctaccccttactttgccaaagacttgaggaccctgtatgtcttggagttcagtcccctcctctgtgggggntcaggtgattnaaattttgggatgaaacatttctctaanttcaaagaccaacttttccctgcnaaacaaccacaaanacatnggcatgcatgttacggga

SEQ ID NO: 220162 - DNA, 434 bp, Homo Sapiens
  misc_feature (274)..(274): n is a, c, g, or t
  misc_feature (413)..(413): n is a, c, g, or t
tttttttttttctttgagacggattcacctttgttgccaggctggagtgcagtggtgcgatctcggctcactgcaatctccacctcccgggttcaagcgattcccctgcctcagcctcctgagtagctgggattacaggcgtgcaccaccacacccagctaattttttgtattttagtggagacggggtctcaccatgttggtcaggatggtcttgatctcctggacctcatgatcctcctgctcggcctcccaaaatggtgggattacaggtntgggccaccgcgccaggccgggaaacagcttcttaaggattctacttattttgtttccacgggaaactttcaagagaagaagacaaactatagtcccaatgctgtagttgatttcctgggcataacagattcatcattncctctttagagtcccctcatc

SEQ ID NO: 220163 - DNA, 433 bp, Homo Sapiens
  misc_feature (2)..(2): n is a, c, g, or t
  misc_feature (405)..(405): n is a, c, g, or t
  misc_feature (421)..(421): n is a, c, g, or t
  misc_feature (427)..(427): n is a, c, g, or t
tncggaacgagggacttttttcacttaaaggctaatctgattagctttaaaacatttgttcatcttttaattcagtatttgtatgatgcctatggaagacatatggatttaaatagaacttggctaaccatctgccaataagagaaagtgagatgctaaatcagagaggcaggaaagtctatttcagtaaaagctattttgatctgaaatactgtaggcagtcttacagagtattttaattgggaggatattgatgcatgctagtaaaagaagtgtatttgctgatatggttgaagttatgtaatcattaaatttctatatgaagtttagagatgtggaactatgtgaaattttgatcctgttaattataatttctttttcctaaaaaagccatttgtgggaaanaaattttcctgatatntttttnttagag

SEQ ID NO: 220164 - DNA, 405 bp, Homo Sapiens
  misc_feature (278)..(278): n is a, c, g, or t
  misc_feature (349)..(349): n is a, c, g, or t
  misc_feature (398)..(398): n is a, c, g, or t
gtgaaatctctagagctttccacataaaattatattatctgtaggctagagtaattttacctctacatttccaatttggatagtttgtttctttttaattcttaatttgactagaacttccaacactatgtggaatagaaatagcaaaagcagacacctttgccttgttcctgagcttagagcagaagctttttgtctttcaccctggagtacattgtttgatgtggttttttaatgtgtgggatttcacaatgggtagtattttagttttaaaattnctacttttttgagtgttttcaccctggaaaaggattttgaatttcataaaatacttttctctggcatcccngagggtgatccatggtttcctttgattttggttaagtgtaccacatggntccattt

SEQ ID NO: 220165 - DNA, 475 bp, Homo Sapiens
  misc_feature (396)..(396): n is a, c, g, or t
ttttttttgcaaatcataaggaagtttttattgggtcctgtacagaagagaaatgctccgttgtcaaaaaactacaaagggatccctggctctgggtgtgctatgaagacaactccctccccagtgagcccagggaacaggctggatgctggacaaagtttgggagggagctccaggcccagggtcctccacttggggtctccccctttatgtttgtaaaaaccgcaggattggagtatttagaggactctgtccccctgcaagtattgccgttggatatgaaacacacagagcaaaaccccaaggtgacaaatgagtgaaaacctaaggtgacaagtggacagacgccccccagatgggaggagacactgggctagctgggcgaccttttgcccntacgtaacttgttcagttccttgaagggcacagcagcttttggccagagttggccctttccccgcgggccagggtttgg

SEQ ID NO: 220166 - DNA, 512 bp, Homo Sapiens
  misc_feature (2)..(2): n is a, c, g, or t
  misc_feature (8)..(8): n is a, c, g, or t
  misc_feature (10)..(10): n is a, c, g, or t
  misc_feature (210)..(210): n is a, c, g, or t
  misc_feature (299)..(299): n is a, c, g, or t
  misc_feature (360)..(360): n is a, c, g, or t
  misc_feature (378)..(378): n is a, c, g, or t
  misc_feature (406)..(406): n is a, c, g, or t
  misc_feature (427)..(427): n is a, c, g, or t
  misc_feature (436)..(436): n is a, c, g, or t
  misc_feature (467)..(467): n is a, c, g, or t
  misc_feature (482)..(482): n is a, c, g, or t
  misc_feature (495)..(495): n is a, c, g, or t
tnaataantnactaaaacaaatctgtataataaaaaagataaaaataatatcgcagtcttgacagaaataactacatcattattaaaaaatgcacaaaactcgacatcactaggattccagtcttccatatctggattattctgtcaccattattttctgtaggattgtttcttaccagctttttatgtctttggttgtttttaggattnttttatatattatacttaatttatacttattatccagtacttaatacttattaagtattattatacttactatccaggctcacccgggnttccggggcttcctgacacttttctgatgggggattctggtctctctctttgatatttgtnctggggtattgggcctcnccctggcattctttttaaaggggctttnatggggccccggccccacggngggcttcanggcccgtaaatcccaggcacctgggggaggnccaggtggggcgggntccacttaagggncaggggggttcaagggc

SEQ ID NO: 220167 - DNA, 448 bp, Homo Sapiens; identical to SEQ ID NO: 52643
  misc_feature (83)..(83): n is a, c, g, or t

SEQ ID NO: 220168 - DNA, 482 bp, Homo Sapiens
  misc_feature (409)..(409): n is a, c, g, or t
  misc_feature (458)..(458): n is a, c, g, or t
gggagattttactttttctgcttctctgttacctgtttctgtttcctcttctaatccttcctgtcatgtgtgtattttttaaggatttgtcacgtgctgtctcatttcctcagtaaatttatctactacatattgtatagtgaaaaaaataaaacctttaccattattatgtaagtggctataaacactatattaatttggagtcagtcatagtgggttccaattcctcaactcctacttgtgtgatcttggtcaaatctgagctgtttcttcatctgtaaaaataaaaataacaatacagattaagttgggtattatttgcaaatcatttatcacagaaactggcccacatgaataactcgataaatgcctggtatacaaaaggcctcagctgccccatgtcttgttntgttttttctttgaggtggagttttgctcttgtcgcccaggctggagcngcattgcgcgatctcaactcactg

SEQ ID NO: 220169 - DNA, 425 bp, Homo Sapiens
  misc_feature (94)..(94): n is a, c, g, or t
  misc_feature (367)..(367): n is a, c, g, or t
atattgatttttttttttaactacaagaactttttgatattatttttctacccaaaccccctaatttgagaattgcctatttattttttgacantcaattcatttggatcatcactttaccttggctctcagtgattaccaataaatattaaatgagtattacccataataaagtattttggattaagaaaataattgtacatttccagccttcactaagtttacattctagataattaacttttaaaaattaaaacttggtcactgctcatgcctgtagtcccataattttggaagcctaggcaggcagatcatttgaggcaggggttccagaccagcctgggcaacaaagtgacacacgtctccncaaaaaataaaaaaaaattagttaggtgtggtgacatgtccctcgggctgcagtgtag

SEQ ID NO: 220170 - DNA, 437 bp, Homo Sapiens; identical to SEQ ID NO: 50833

SEQ ID NO: 220171 - DNA, 542 bp, Homo Sapiens
  misc_feature (418)..(418): n is a, c, g, or t
  misc_feature (426)..(426): n is a, c, g, or t
  misc_feature (523)..(523): n is a, c, g, or t
actgtgtaaccctctagaaaagaacttggcattatttattcaagtttatgatacatattacactcccaggtatatgttatactgaaactgacgtagatgtgatggaatacatatatgaagaatgttcacattagcatttataacaatcctaaactggaaacaacccagatgtccatcagcaatagaatggctaaacatattgtcacatattgttataatgggacactgtaatatgcagcaatgaaaatgcacaaattacagctataggaacaacctgaacaacatatgaattaaaaacaatgttgagcaaaagcagcaagaacaacagattacatattatattgttccagttacataaagttcaaaagaaagagtgagactaaacaatatattgtttagggatgcatgcttgcgacanagcgacanagaaaagcagggaaatgattatcacaaatgttagaataatgactacacttaggagggagggaaagagttgtgttcgggaaggtcatgggcaggaggngacttctgagttgctggaa

SEQ ID NO: 220172 - DNA, 805 bp, Homo Sapiens
  misc_feature (637)..(637): n is a, c, g, or t
tttgctctattaactcagaaggctcactacagaaatatgtaatcagtgctgtgcatctgtctgcagctaatgtacctcctggacaccaggaggggaaaaagcactttttcaattgtgctgagttagacatctgtgagttagactatggtgtcagtgatttttgcagaacacgtgcacaaccctgaggtatgtttaatctaggcaggtacgtttaaggatattttgatctatttataatgaattcacaatttatgcctataaatttcagatgatttaaaattttaaacctgttacattgaaaaacattgaagttcgtcttgaagaaagcattaaggtatgcatggaggtgatttatttttaaacataacacctaacctaacatgggtaagagagtatggaactagatatgagctgtataagaagcataattgtgaacaagtagattgattgccttcatatacaagtatgttttagtattccttatttccttattatcagatgtattttttcttttaagtttcaatgttgttataattctcaaccagaaatttaatactttctaaaatattttttaaatttagcttgtgcttttgaattacaggagaagggaatcataatttaataaaacgcttactangaaagaccattacagatcccaaacacttggggtttggtgaccctgtctttcttatatgaccctacaataaaacatttgaaggcagcataggatggccgacagtaggaaccttgtttcacttggcggcatgtttttgaacctgccttatagtactgcgtgattgccatg

SEQ ID NO: 220173 - DNA, 570 bp, Homo Sapiens
tcctcctgatgcttttgcagaccgcggtcctgcagggtgcgcttgctgcagtcccacaccgtgcaggtcatcctgggctgtgaaatgcaagaagacaacagtaccgagggctactggaagtacgggtatgatgggcaggaccaccttgaattctgccctgacacactggattggagagcagcagaacccagtggcctggcccaccaagctggagtgggaaaggcacaagattcgggccaggcagaacagggcctacctggagagggactgccctgcacagctgcagcagttgctggagctggggagaggtgttttggaccaacaagtgcctcctttggtgaaggtgacacatcatgtgacctcttcagtgaccactctacggtgtcgggccttgaactactacccccagaacatcaccatgaagtggctgaaggataagcagccaatggatgccaaggagttcgaacctaaagacgtattgcccaatggggatgggacctaccagggctggataaccttggctgtaccccctggggaagagcagagatatacgtgccaggtggagcacca

SEQ ID NO: 220174 - DNA, 460 bp, Homo Sapiens
cctggcagaggaggagcaaacagccatgttgtaaatggcctctgaggaggactggcctctaggagttgaggacctcaagcctacatctgcaaggaattgaacgatgccaagaacccgaacaaactctgaagatgagaatgcggccctgtgccaagactggctgccttcccctgtttctgtaccacactggttcctgaagctatttgagtttgagactgctggggtaacctgacccacttcaaggatctgaaagtattttacagttggttgaatccatggatgtggaacccatggatgtgaaggactgactgtactttgcactagtggttctcaaagtgtgggccctggaccagtggcagcagcatcacctgggaacttgtgagaaatgcacttttcagctcctgtttcagatggacctatcagaatctctgcaggaacattttgaagtcccctcatatta

SEQ ID NO: 220175 - DNA, 1000 bp, Homo Sapiens
aaaccgaatggttataactacagtagggctttgcacaagtggaatctctaaacagttggtttgtatacatgtcaaaataagttagaatggaatttgtccaggagtttccaagtcacccgagaggctgtgcacctcttttgagaaggttagggaggggtacagacaggagccttgccaagaccaccccccagctcaaactgtgagttgtgctgtttcctcctcctagctttgcccaggtccaaggcacagggcagggggcgttcaagtatcgaacctcacagagggccagtgctgacggcggggctgggggagggaaaggagagccccaccctgggggccagaccttctcccttcagtttccaagaccaaggccactgcactggcaggagggaggaggaggaggagaggtacagggttctttttggtaccagggagaaagacgtgggaagaggtagttgcaggggatgatgccttctgctcagcaggagaaaatgtcttatacagtgacggggtcactgccacctgagggtcatcatggcgggcacctgggagggtcgtggggcttcggggtctggaagccatacttgggccaccttgtccacccctcagtcctgatcacagtcaccctgaggcctggcttggtccttcacttaaggatccagcctcgggggtggctgcgcctgcagaattgggttcccttcccagcgcaggcggttccccttctccgggtttctaggctgaagcaaagtggctccatctgtgcctttctggggaagaacccaggattgacccctccccaatgaaggcgtcggaagcaagtagggtaggggggccgagaagcccaaaagatcgaggtgcatcacagaccgggctgtcaaacaggttcaggacacgactactttgaaaaggtgtgagcgcactcaagacgaaagacgcgtagacatccaccgcacaagaataactcgagtaggaagagagagaaagaggaagacagacacaa

SEQ ID NO: 220176 - DNA, 615 bp, Homo Sapiens
gcatgttataaaaacaccttctgaaaggtaaaaggaaaaagtagagcatctgggcatcatgggatccaaggaaaaacactgtggtgagtttctctgtttttatttttgcctcacgtagcccagaaacaccttgctaaataaaatggacaccatgtaagaaatccagtaagaagctctctgaaatatctttgtagtcaaagtggaaaagagatgacagtgaagctcaagttaataaactggtaaaccgggttgcagaatgatgtccgcaacagcttcatgccagcaatgatcatcagaaaaatgtcccagtgggtaccaagtctccggtgattgcttattaaaaatgcatcaatagtgagggcattcaaaattagcgctgggtacaagatgtatttttcaaaacactgaagccaaacatagagtctttcgaaccacattaaatgggcaacatctctcacttcccgttgatgatactctttgttatttcgagaactggggtgtgaaatccacatccagggatgatgcttgcggagctgagggagcacgtaatgtgttacaaaccccacggctcctgccaaagcaaacagcacgatgctgagaaatggtcgcatgaca

SEQ ID NO: 220177 - DNA, 580 bp, Homo Sapiens
cacaaactctccaatttgttgcccatcacgcgcagcaatgtggagtggcctcttcactcacttaacagaatcttggaataattttaagggtctagatccaaattatacaacatggatggatgtcatggagaggcatggctaccgaacacagaaatttgggaaactggactatacttcaggacatcactccattagtaatcgtgtggaagcgtggacaagagatgttgctttcttactcagacaagaaggcaggcccatggttaatcttatccgtaacaggactaaagtcagagtgatggaaagggattggcagaatacagacaaagcagtaaactggttaagaaaggaagcaattaattacactgaaccatttgttatttacttgggattaaatttaccacacccttacccttcaccatcttctggagaaaattttggatcttcaacatttcacacatctctttattggcttgaaaaagtgtctcatgatgccatcaaaatcccaaagtggtcacctttgtcagaaatgcaccctgtagattattactcttcttatacaaaaaactgcactggaagattt

SEQ ID NO: 220178 - DNA, 587 bp, Homo Sapiens; identical to SEQ ID NO: 50864
  misc_feature (546)..(546): n is a, c, g, or t

SEQ ID NO: 220179 - DNA, 600 bp, Homo Sapiens
atagtgctttgtttatttagagtgcccttacttagtggcctctttaattctccacggtgctatgagaacaccataggaagtagggttgaaatagggccagggcgcaccacgggtggtggtgaggtcactgtccaggtctgggactcagccattgtgggagggggacatgaacagacactctaccacatcagggaatttgaatactgtctttggatatgttgatgaagagactgtcagccagggcatttcggcttcctatgtgggttctggaaagcttgttggaaacagactcgtgagacacactcaaaccagtttgttttcttcagcaaacacctggtagagattggaattgaacagtgagtgaagaatgacctcacgctgcccagaattctgattccatgtgtaatgcgaattctgagaggcctctgtttctcagcttttgggtggtattcagagaggtctagtaacacttggtgtcacctggctggtgagggcaggctccggtgaccgcaaagctaagtgctctgtagggcacctccctctctttcaggggctgcctgggcctctggtgcacatgatccatggagtcagagtcagagc

SEQ ID NO: 220180 - DNA, 741 bp, Homo Sapiens
ggtcgaggccatctcctgggccgcctggcggccatcgtggctaaacaggtactgctgggccggaaggtggtggtcgtacgctgtgaaggcatcaacatttctggcaatttctacagaaacaagttgaagtacctggctttcctccgcaagcggatgaacaccaacccttcccgaggcccctaccacttcctgggcccccagaccgcatcttctggcggaccgtgcgaggtatgctgccccacaaaaccaagcgaggccaggccgctctggaccgtctcaaggtgtttgacggcatcccaccgccctacgacaatgaaaaagcggatggtggttcctgctgccctcaatggtcgtgcgtctgaagcctacaagaaagtttgcctatctggggcgcctggctcacgaggttggctggaagtaccaggcagtgacatgccaccctggaggagaagaggaaagagaaagccaagatccactaccggaagaagaaacaagctcatgaggctacggaaacaggccgagaagaacgtggagaagaaaattgacaaatacaacagagtgtcctcaaagacccacggactcctggtctgagcccaataaagactgttaattcctcatgcgtaggctgcctttctccatgttgccctggaaagtacgggaccagggcgcgcaccgcccggtgccatgcgcctggacatagaagcggaccagaagggctagcactgccccgattgtcacccg

SEQ ID NO: 220181 - DNA, 763 bp, Homo Sapiens
ctcaactgccccgctcgtaggtctgctaggcgctttccgtagactgtctccacgccctccccactcccagccagtccagatcctctccggagggactgcagcaaggatcgttaagtctgtccaccgggatgggggaagaccaggccggagcagattggccatccttcagaagatcgacttccgctattggggagagtctgaggagtccgttctcccacggggcctcgtcactctttgcgaagggcgcctggcaggtcaaatgacctccatttccacctcgccttccaccttcttcttttgcttctccatcactgcctccagctctgacactttctctttgtcctccaggacctccagtacgtcccgctgcttgaccgacagctcactgctgttgcgggcctggaagtcataattacacaggacccattttcctgctgtctctgactccagctgaggctcagattctggctccaagtctcggtgaccattgacagcgacctggggggcgctttgctgtaggaagtaagacagtcgggtcaggcggggccaggcggaccggcgcgcccccggacttcccagcctcggccctgctgtgtcgcttgggtcacctgccggcgcctccgcgtcgtgctgtagctgtttctcaactgggtcctcccaggcgcggctctgcgggtcaagtgaccggcggctcccagccgctggaggaactcgggtcttgtatgggggtcctcctccgggggacagctccagcccggggcgg

SEQ ID NO: 220182 - DNA, 453 bp, Homo Sapiens
ttgagatggggtcttgctctgttgcccaggcttgagtgcagtggcacgaccacagctcactgcagcaaccatggctcattgcaaccttgacctcccaggctcaagcgatcttcccacctcagcctcccaagtcagtgggactctagggcatccaccaccatgcctggctaattttaaatgtttttatagaggctggacatggtggcgtgtgcctgtaatcccagctacttggaaggctgaggcacgagaatcgcttgaacccaggaggtggaggttgcagtgagccgagatggcgccactgcactccagcctgagtgacagtgatactctgtctcaaaaaaaaaaaaaaaaagtttttgcagagagagaggtcttgctatgttgcccaggctggcctcaaactcagaggctcaaaggatcctcccgcctcagcctcccgaagtgctgggattt

SEQ ID NO: 220183 - DNA, 475 bp, Homo Sapiens
ttttcaagtaagcttacatagacttgatttctaattctggaggtcgactaaggaatctgtaattccctactttcccagtgtgtctcaactctgggctctcgactatccagtttcttcttcctggaatgtcctcccacattctcactctgcccttacaagtcttgctttccactatgagttccctgttgctgacctccttccctcctccaatcctactactcagggtcagttgctctttccacagtgctctcacagtagagcaagttccatggcttaagaactgagtcaaccaattcgtgcagcagtcttgagaggtaggtggaatatttctactttgaatatcaggaaactaaacttagtatgtcgtgatacaagtactcaccacagttgatttgtcactatccaccttacctagatttgtttaagaattaaatgacctagtgaatgggaaaactctgggaaacagatgagaagc

SEQ ID NO: 220184 - DNA, 560 bp, Homo Sapiens
tttgagtacagaggactttattgatggtacacgacaagatagagctctttgtggggtctgcatggaaactgtgaagaggggagattcccagtgtggtgggggactgagcatggcagggactgcccagaagctgaaggtctctttcttcctcttgtgctctcactggggctggttgtcgagcagtcttactccttggaggccatatgggccaccaccctgttgctgtagccaaattcactgttgtacgaggaaatgagcttgacaaagtggtcactgagggcaatggcagccccagcatcgaaagtggaagagtgagtgtcactgttaaagtcagaggaaacaacctggtgttcagtgtagcccaagatgcccttgaggggccctctgacgcctgcttcaccacctttttgatgtcatcatatttggcaggtttctccagatggcaggtcaggtccacaaccaacacgtttgcagaaggacacggaaggccatgctagtgagcttcctgttcagctcggggatggccttgcccacagccttggcaacaccagtagatgcag

SEQ ID NO: 220185 - DNA, 450 bp, Homo Sapiens
ttttcagccaatcaagataatgatgatgatcaaggtgccccaccactgcataggaaaagtctttggcagcaacatggttaagcttaactatttgaacaagtttcacagaaaatgaacattgttcaggggttttcttggctcaaactctggtttaacttaataattcttctactttgcagtgattaatggtcccctagtgcaggggcaggactgggcaatccaggtgcaactgtaattgttacactgaacagaaacatttcctttagacaaacgttcccagaggggttataaatgaaatggacattaccatgaaaagtaagcctccaagtgtctacatctagtgcaacccacttggacattagactatgaagacttagactcccccccactttcctgttacaaactgacaaaataagtacatcaatgctctcagtcattacttttcttcgg

SEQ ID NO: 220186 - DNA, 415 bp, Homo Sapiens
  misc_feature (380)..(380): n is a, c, g, or t
  misc_feature (383)..(385): n is a, c, g, or t
caataaattgctacaaataaggttctaaaatcaatacataaggcaaaattggcttttaaacattccttacactgcccacacacttgaatacacctacacaacacagtgaaggggcactggggagaaggactggctgagggcccagcaatcacttcccgtctcaggctgggtccaggtcagcacccagggaatgggaggggtctggattgtctgtgcctttaaaaacttttttttttgttttgtttttaatcctcagttgaatttgttcgctttatgcatccctgatctcacatcaccatatacccaaacactgatacaattaatagatggtggtaatttttattcccttctctgcaatttcagcatattctttttctttnggnnncttttttttttttttttttttttttttttg

SEQ ID NO: 220187 - DNA, 568 bp, Homo Sapiens; identical to SEQ ID NO: 60023

SEQ ID NO: 220188 - DNA, 540 bp, Homo Sapiens
aaataagaaatagggtttattgagaaagttcggcaagcagagaaacagaacagacacacaaccccctgctgttcacagctcaggcctaagatggttgtgttctgtggccaggccccctaaggctctgtgctttcataggaactggagagcaattgtcaacaagggaaactgaaagcatggccttcagaactctggctgacggcagcctgttcttttgttaagctaatttagacctttgttcagctaccaggagagaaaattaggtgtaggagccctggtcccaagctctggtcttaaaacaccatcatcctgctttacctctacaaccatcccacggccctattatatggatgaggttaaagaaacacgtccaaggcgggtcatccccctccagtgcttatcacctagttgagggatccaaacaaggacaacctgacaaaacctaaggaccaggaccaggcccagccaaggtgaaggggcccgcctcacggtcagactcacaggtccgtctcctctgctcaattgcccagtctttgccta

SEQ ID NO: 220189 - DNA, 525 bp, Homo Sapiens
  misc_feature (473)..(473): n is a, c, g, or t
aaatatatacgccacacttgataaacttactctttacatattttcattaaatccctaagtcagctaggttccttttaagggacctactattgcccactcaccagacacaatagaaatcattgtatctctgggatttcctcacccgtcaagaagagtctattgagttttacttcctgtgagttgtattataaaatcactttctttcattttatacaacagagctgcacttacaattttttgaaggtgcttttttcaaaccatacccatgtgagatagctttgagggactgtgatacacccttcccatgagaggcacgtttcctaattgagaattaccgactggatccagtaattatgttgactgactctttgtgccttttgattttacaagtctctactttagcaagaactgagcctaatgacctacggacactcttgcatctaaccattttaactgttcactctcctatttgnactctttctattctctttattaaggttggggggttttacaaacctagtattt

SEQ ID NO: 220190 - DNA, 569 bp, Homo Sapiens
aaaaatcttgcaattttatttgcatataaaggccgctagatatagaatatcacaataaatttaaagaaacaactgctttcctaaatttcattaacaaagtaacataaaatagaataaagctcaacagcatttacaatgggaaaacagaaatgactattagcgacaatattttgtgctagcgaagattgcatcgacacacagtgcaaaatgggagaggggagaggaagtaagaagacaacttggggtatttaaatagaaaggacaactaagccttattttagttagcttccattgcatccatttaagtctatacatgcctgtaactgtacctagatttaactcaagctctttaagaccttgagctctgagagaatgtgtcagttccttccgacttctgatgtgctgctatacagcatccctttgcagttgtactgtccttgacaatattaaactcctaacgtagtcataatacacaaaaaatacttatatatataaacccatattgaaaaggagtctgcatgttcatttttttaaccgtatgaaatacctgctcttgacagattccattt

SEQ ID NO: 220191 - DNA, 466 bp, Homo Sapiens
gtagaatatgtttcgacagcaacaaaagattcttcaacaatctagaattgttcagagccagagattgaaaacaattaaacagttatatgagcagttcataaaggtttgttgtatgtggtaacacaatacatcgttataaaacataatatatttatggaagtagaagataattctttctaagtttatgggaaaaaacattttagactttaactacttttccattttgaattcattgtttctgatttaagtgataaatatatttttacttgaggattcaaatggttttgttgggattattcaagacaggaaatggtaaattgggaattttacttagaaatatacttatcatgcataaaatccatactttaataacacttcagtcatagttctctgtttaagtgaaaatagactctataataatcatttttaggttgtattttacttgtttttttatccccagtgtttg

SEQ ID NO: 220192 - DNA, 295 bp, Homo Sapiens
gcggccgcctgcccaacccctcaaacaccaccaaacaccaggcactgggcatgtcagggtcagcaggccctggagccgcttctcccgcctctgccctctgtctagacagcacccgagggcgagggcacgcggagccccgcgcctggcagcccccccaccgcctggcccgcctcttactcactccaacttgggaacattccccttgcatgagctcactgtctccccagggacgtggccttcggggagggggctctgctctccctttggcgcagggctggggtgggggtggggctgc

SEQ ID NO: 220193 - DNA, 405 bp, Homo Sapiens
  misc_feature (1)..(1): n is a, c, g, or t
  misc_feature (357)..(357): n is a, c, g, or t
  misc_feature (372)..(372): n is a, c, g, or t
  misc_feature (387)..(387): n is a, c, g, or t
  misc_feature (392)..(392): n is a, c, g, or t
natttatccatggccacattgagctccaccctctcctcgtccgaatcattgatacacctcaatttcaacgtcttcgatacatcaaacagctgggaggtggttactatgtttttccaggagcttcacacaatcgatttgagcatagtctagggtaagaagggaatggggtggggaacttgcagtttttaagtattttctctgtctcatgaaatagttatcttaggccagggcatgggtggctcacacctataatcccagcactttggggagggcagaggtgggtggatcacatgagggtcaggagttcaagaccagcctgggcccaacattgtgaaacccccatctttactacaaatncaaaatttggccagncatgatttttgccgngcctntaatccctagcta

SEQ ID NO: 220194 - DNA, 518 bp, Homo Sapiens; identical to SEQ ID NO: 61424

SEQ ID NO: 220195 - DNA, 547 bp, Homo Sapiens
agggtgggccctaatccattataactatgtctttataaagaagagaagagacacagagacacacagggagaatgccatgtgacaacctatgcagagactggagtgacaggccaggccagtggggagaacatgaggacaatggaacctggactgccaagctccagcccccaaatccctcccttctggttccggaggccccagggttactctcccgcacactaactgctttgaaaacctcattcctcaaatctactccatcatgggtggcctgaagaagcctggacaggaggtcctgggtgacctgtgagggcatacaccacagagctgggtgcaaacctgcagagccaaaacctggggctcctggcttcaaatccacctctcaccagtatttgagttctctttccagcggaaagtctgcccggcctcagagttgcagccaggagagtggctcagaatccagcatgaaaacatttggaagacatcaaggtccatttaaccagcacaagagccccagccttctttgctgtgtcaatgtgggcttctccaa

SEQ ID NO: 220196 - DNA, 473 bp, Homo Sapiens
tgaaaatgtcccccatttttacatgttagcaaccatgttttttttttttaatgttttaaatacagtatcaaacaggacagaactctgaggtatactgagctcagagaccaccagttttcaacctctgctctggtgcactgatggtgatgtgggaatttacagcctgagttaaagttcagatgtgtaaccttagacatttatatcacctctctatgcctcagtttctccttctataaaatgggcattagagcaggtacttcatggagtgtgagtgagcattaaatgagataatgaaaggggccagaccaaggcctgctttcatgccttaacttccagcctgtcattcaaagtaagccataatgtgcctctaaatctccctttctaagcttgctcctatggtgctcatcttgatgtgctctacagagtcaagtcacatcacaaagcacttttaactgtgaatgtgctgttccttt

SEQ ID NO: 220197 - DNA, 553 bp, Homo Sapiens; identical to SEQ ID NO: 61923

SEQ ID NO: 220198 - DNA, 400 bp, Homo Sapiens
ttttataggttttacatttattatgctcattggcaaacaaaaccagaaacaacatatattatctatagtaaaattcgtgcatatcataaggcctattaatttgtacttcaactatatggctcaaagtgacatcaggtgtgttggggacagcaagaagggtggggctattcatcacagtagggacagaaaagtccacatggtgccacccataggttctttcaacatgaagctttccaggaagcagcttaggttaggtagacctcaacctaatatttaagactatcatctaaggcattattaatacttgtgactattttctagagcatcacatattatgtaattaacaagcaggaattcagtactgacatttgcattttagcttaatagttacatttattac

SEQ ID NO: 220199 - DNA, 319 bp, Homo Sapiens
cggcctcagtctgttctcagaacatactccatcacctggttcccagaactcagattgcgcagtggtctcgtcatcatcggccaggactcacagtgcccgcggcagaggcctccctagacctccctcccgtccagcctcacccgctgcctactctcctcacgcccccgctccaggtcccctggccccatttcgctcgccacgttttcataatcctctcaggctccgggcaagcggcgccgcccgcaatgggacctgatcatataaggaaaatactgcgggctcatccgggggctgcaatggggacccgaaagcgccctag

SEQ ID NO: 220200 - DNA, 508 bp, Homo Sapiens; identical to SEQ ID NO: 61583

SEQ ID NO: 220201 - DNA, 450 bp, Homo Sapiens; identical to SEQ ID NO: 60298

SEQ ID NO: 220202 - DNA, 427 bp, Homo Sapiens
cgaataatgtcccttagcttcatacagtaactaatatatgttggcaggcaaaaaatgtttactgaataaaataatctaacaggcatgatgccgcttaaatttttttaacattaaacttctatggaatgcttttacgaatcttttaaaagtaatcatttaaaaatattacaacagacatacctgttagccatccttttcacagatgaaaactggtgacacatatttaatgcagttatataacttatattgggaatacttaaataaaactggagtgcctcacttttattactattcaccactgttggaacatgaataccaacattctttctttgttccactaaagacagttcctttagcaaatctgcggtttcttcttggcaggaactgaaaagaattcggattccagcgccaattaaggtagtcagca

SEQ ID NO: 220203 - DNA, 503 bp, Homo Sapiens
tttttaatatggtacagctgcaaacgcctcatatctactaacattttgcagcctccaacaacaataaataagtgcttttattttctctgtttcataggtcaggaaactgaggcaccaagagggaaagtgctcgtgagatccaggcagggaattgaatcccagctgcctggctgtagagtctaggcgccctcagtggagccagtggacccaagatctgacatcagaggctgaaatccgagctgtgtggcatccctgtggtcactcgtcccaactgggtgttgatccaggacctgcaggctcacgagctctggaccctctgcagctgatgttttcttcttacaacaacggacatagaaaataataataacaaaaatagcagcagcagcaacagcagaaacatggaatgtctgccaatgactctgaagcaccagcactttcccagagggcacagggtgagtgctgtgattccccctgtgttccatggtgcaagtggaactctgctc

SEQ ID NO: 220204 - DNA, 493 bp, Homo Sapiens
ttttttcttgctctggaaaataaagtgtaggacaatttcttgaaagtttgggagaactaatctatgaagtcatcaccatttggtgtcttcactaaagaagcttgattgcatattcaatttcaaattttttactatttaagtcaatattagttattcatattttcctaaaatattgtccattccaatcacacagtgacccttgaaaaatgtaagtttgaactgtgcaggttcgttaatacacagattttcttctgcctctgtcactcctcagatagcaaaacccctcctgcccctcctcctcctcagtctattcaatgtgtagacaacaaggatgtaaacctttatgaaaaccacctccacttaatgaacagtaaatatgttttctcttccttatgacttttcaaataacattttcttttgtctagcttactttgttgtacagaatacacgtaacataaaaaatatgtattaactgtttatgttatcagtaagg

SEQ ID NO: 220205 - DNA, 459 bp, Homo Sapiens; identical to SEQ ID NO: 60495
  misc_feature (313)..(316): n is a, c, g, or t

SEQ ID NO: 220206 - DNA, 339 bp, Homo Sapiens
  misc_feature (37)..(38): n is a, c, g, or t
  misc_feature (43)..(45): n is a, c, g, or t
  misc_feature (55)..(57): n is a, c, g, or t
  misc_feature (64)..(64): n is a, c, g, or t
  misc_feature (80)..(80): n is a, c, g, or t
  misc_feature (108)..(108): n is a, c, g, or t
  misc_feature (119)..(119): n is a, c, g, or t
  misc_feature (333)..(333): n is a, c, g, or t
tggagtttcgctcttgtagcccaggctggagtgcaanngccgnnnctcagctcannncaacctncgcctcccgggttcangcaattctccaatgtcaaggaaatcttngaaagtttcanggtaaatttggtctttcacaagcttgatgaacaaagagaagcaaccctcgagtaacacttgcgctatacttgaggaaatggcactcagttcttcaataaaacaactcatcattccgttgtaaataaccattaaaaagagaaatattgaattctatgcaaaaaaggattagaaggaaaaatatcttcaaagtgttccataagtatgttctgcatngactga

SEQ ID NO: 220207 - DNA, 854 bp, Homo Sapiens
ataaccctctgctgcagaataccctgatgcgacagaagtctctctagagtttggaaacctttaccaacaaagaaaaattctgatgtattctctttcagttgaacgtcctcagatgactttcggcaggctccagggaatctccccgaagatcatgcccaagaagccagcagaggaaggaaatgattcggaggaagtgccagaagcatctggcccacaaaatgatgggaaagagctgtgccccccgggaaaaccaactacctctgagaagattcacgagagatctggacccaaaaggggggaacatgcctggacccacagactgcgtgagagaaaacagctggtgatttatgaagagatcagcgaccctgaggaagatgacgagtaactcccctcagggatacgacacatgcccatgatgagaagcagaacgtggtgacctttcacgaacatgggcatggctgcggacccctcgtcatcaggtgcatagcaagtgaaagcaagtgttcacaacagtgaaaagttgagcgtcatttttcttagtgtgccaagagttcgatgttagcgtttacgttgtattttcttacactgtgtcattctgttagatactaacattttcattgatgagcaagacatacttaaatgcatattttggtttgtgtatccatgcacctaccttaggaaaaacaaagtattgtcggttacctctgcatggaacagcattaccctcctctctccccagatgtgactactgagggcagttctgagtgttaattcccaatttttcctctgcttaaacacacagcaaaaacaaacaaacaacaaaaaaaaaaaacacaacaacaatcaaaaactcc

SEQ ID NO: 220208 - DNA, 966 bp, Homo Sapiens
catccaatacagcgatcggttaaatggggaaaacgacaaaaccaaaactggaactaattaacaccttgaaaatagaaatacattcctgtgggaggagaattctatgcctttgtcactagattagaactggggcaaagaatctgaacaacttgtgtaaggcctaaggtgtcttgtgagatccaaatccttattaaaatataggcagcattctagctgcctatttaggtaacaaagaaaatcaggttaaaagtagcagagaacattattccatttttttttctccgtaacctagagcaggggttagaaaactttttctgtaaagggccacacaggacatattttaggctttgcagaccagccagtctctgttgcaactattcacctctgtcatcctaatgcaaaagcagccacacacaatatacaaacatatggccacagctgtgttccaatgaaaccttatttacagatacaggtggtgggcaaatttggcccacaggcagtagtttgctgacccctgacctagggtaaagttcaaccaaaatctgttaagcacgagatatacaattctgccattgttaagctctgtgtttaaacagtcctctcaattgctccagggttggtttctgcctttgaaaaattgagtaggatgagatgactatcaccagcatctcttcttaaatgtcagctttgatgattgccaagaaaaaaagcattgctggcctcatttgatcaggttactcccttcttgaatgagatgacagttcttggtggtcaagtctggttgatcacgtagcttgccagattgatcaagaatttctactaggcaagtaggcctgtttgttcggcagacacatcattggtttcaggacatatgaagcgcgaaaatttggggtgaagtagcagctgaaccagtccggggtttaaggaggcgacttgaaccggttttttcactgcgggatcctctga

SEQ ID NO: 220209 - DNA, 693 bp, Homo Sapiens; identical to SEQ ID NO: 50439

SEQ ID NO: 220210 - DNA, 530 bp, Homo Sapiens; identical to SEQ ID NO: 40847

SEQ ID NO: 220211 - DNA, 589 bp, Homo Sapiens
ggagctgcggcgccaagccaaggaggccacagaccacgccacggcactgcgctcccagctggacctcaaggacaaccggatgaaggagctggaggccgagctggccatggccaaacagtccttagctacgctgaccaaggacgtccccaagcggcattccctcgccatgccgggcgagacggtgctcaatggcaaccaggagtgggtggtgcaggcggacctcccgctgaccgcagccatccggcagagtcaacagactctctaccactcacacccccctcaccctgcggaccggcaagcggtcagggtgagcccctgccactcccggcagccctctgtcatctccgacgcatctgccgccgaaggcgaccggtcgtccacaccgagcgacatcaactcccctcgacaccggacacactccctctgcaacggcgacagtcccggcccagttcagaagaacctgcacaaccctattgtacagtcactagaggatcttgaagaccaaaaacggaaaaagaagaaagagaagatgggattcggctccatctcccgcgtcttcgccagagggaagcagcggaagtccctcgac

SEQ ID NO: 220212 - DNA, 634 bp, Homo Sapiens
ggaagtcctccttttaatgtccccattcacctgcctcgcatgtgtgtcatggatcttcctagatctacttctacgcacgtgagtgcgtgtgtgtgtgtgtgtgtgagtgtgtctgtgtgagtgtgtgtgtatgtgtgtgtaatatgggtttgtgggttaaattctttacacaaatcccatcagaatatgtatgtagataatttctagaaatttcttttttcatctaatagattgtgaggaggatcactctgtgacataggcaatattaatttcatttactcttcacaatgaccctatgaggtaggggctagtgttatcgtccattatacagatggagaaactgtgacacagaaaggctaagtgagttgcacaagatcacacagcaagtaagtggcaaagctgggattgaaacctaggctatctggctttggagcacgaatgcttaatcactcttctgcaatacttggctttaaccactgcatcacagtctagcctagagatggcccatagtatatttataaccactgcccttttgatccatatgcaggctgtgtccagggtccactagtataacacggtgccggaagagctttgtgcagcaccagaggggtccttgccgggactggcccgctgt

SEQ ID NO: 220213 - DNA, 613 bp, Homo Sapiens
gccatggtaaatacatggcttgctgcctgttgtaccgtggtgacgtggttcccaaagatgtcaatgctgccattgccaccatcaaaaccaagcgcacgcatccagtttgtggattggtgccccactggcttcaaggttggcatcaactaccagcctcccactgtggtgcctggtggagacctggccaaggtacagagagctgtgtgcatgctgagcaacaccacagccattgctgaggcctgggctcgcctggaccacaagtttgacctgatgtatgccaagcgtgcctttgttcactggtacgtgggtgaggggatggaggaaggcgagttttcagaggcccgtgaagatatggctgcccttgagaaggattatgaggaggttggtgtggattctgttgaaggagagggtgaggaagaaggagaggaatactaattatccattccttttggccctgcagcatgtcatgctcccagaatttcagcttcagcttaactgacagatgttaaagctttctggttagattgttttcacttggtgatcatgtcttttccatgtgtacctgtaatatttttccatcatatctcaaagtaagtcattaacattcaaaaaa

SEQ ID NO: 220214 - DNA, 524 bp, Homo Sapiens
ttgaagccaggccgggaaacaaagtgaaaccttgttctctaaaagaaatgcgaaagttagtgccaggcgtggtggtgcgcacctgtggtcccaactactcgggaggctaagcaggcggatcatttgggcttggtaggtcaaggctgcagtgagttgtgattgtgccactgtactccagcctgggtgacagagcgagaccttgtctctaaaaataaaaaaattatacccatctagtacatttttggataaagggtccttggctaggtattactgtctagtctaagcaagtatgagtgaaacataaaaaagcacagccagccgggcgtggtggctcgcacctgtgatcccaacactttgggaggccgaggaggatggatcatttgaggtcaggaattcaaaccagcctggccaacatggtgaaactctgtctctactagaaatacaaaaattggctgggcctggtggtgggcgcctgtagtcccagctactcgggaggctgaggcaggagagttgcttgagcccgg

SEQ ID NO: 220215 - DNA, 665 bp, Homo Sapiens; identical to SEQ ID NO: 47926

SEQ ID NO: 220216 - DNA, 721 bp, Homo Sapiens
  misc_feature (721)..(721): n is a, c, g, or t
atacaggcacatacatgaaatagtgatacttcattctcagtaatattttcatccttctcactggaaagatctttgatgatttttaatcaacataggagtttcaatgatatctagaagtttaaaagggctcgttcaaacaaattatgaccacacacactgaagagtatgtttgtctcttgtggtgtaaatttttttttattacaccaaattatgttcacacaaaacctttgtaatcagggggaattaaagagccttcctggaaaatggaggttgcaatcagccgagatggtgccatcgcactctagcctggggaatagagtgagatcctgcctcaaaaaaaacaaaaaaattctttattttctccataaactacagtttatataagcaaaagtttcagtactaagcaattttagtctctgcagtctcttgtcttgaattaatacaacttttgttaattactcttatgaagttaatcttcctgcttgtatgtgaattaaatatatgtcaaactttttttgtacaacagattcatacctctttcctgtttgaaattattttactgtgtttcatcaatctaatgtttatttttattacaccagtaatttcctcattgtgttgaatcttacagtggcttataaatctacatgtacctagaaatgttagccagtccatgtttttttgatgtggcccatttttctttgatcactatctagaaaattan

SEQ ID NO: 220217 - DNA, 824 bp, Homo Sapiens
aactgacgtactagtacgagccgggtgttaatcggccgagggaaagaccaaaagtatacagaaaccaaaaccagaatgccatgtggtggaggcaaagggcagaatttctgacccctttggctcagctgcccttccccacaaataaaaaccaacaaagaggacaaatcaggacaataaagaagattcatgctaagctgtggcagaggggggaaggtatgatcgggtgggggtgggacaaggaacggccatggaagatcactgggtcaggttggaccctgggctgggagcgggagggcaaggcccctcaccacaacttaacccaaacctaagctgcccccaggtgccataggtccctgtcccagcagggaggctgatgggcctgggcccatgcccctccccacctttgggggtcagaaagtggccacccaggcctgctgggatggggcctgacacaggctctgcatgcccattcagggtgcctgtggagaaagaatggagtcactgtttaaccatggtacctgcctcagccccagcagaccacaggaggttggccccagactcactgagtgcctgcagcagccgtacagacacagcatccttggccactcatgcccatcccggccatctagggtcagcacaacccagatgaggccgctgaagggcaccggatgccaggaatcacacctggtaccagaagcggtgcagcagcaggtctatggccaacacttggtgacgaaccaggctgccagttcatcgtggacagcactgaggtagccgagccttggactatgtctgccagcatgtgccggtgtgaacgaaaggcc

SEQ ID NO: 220218 - DNA, 725 bp, Homo Sapiens
aaatatgcatagtacgaggcctgggtgttatctctaccagggtgtagagccaggtgtggtggctcacacctggtaattccaacaactccagaggccaaggcgagaggatcatttgaacccaggaattggagtgcagtggtgtgatctccgctcacggcaacctccatctcccaggttcaagtgagttcccattcctcagccccagagctgggaccacaggcgcgcgaatttttgtatttttagcagagacggggtttcactatgttggccaggctagtctcgaactcaagttggcctcaagtgatctgcccaccctggcgtcccagtgttgggatttcaggcatgagccactgtgcctggccatgtaatagagacttttaatataggagggtgtaccagaagcaccagtttcctgtggcaaacagaattattcctgctgtatttgtaatctggtgccacgaggtagcccagatcccttcagctctgatggaagagcattgcttcagccgtaaatggacacctgcagaaaccttgcaccgatggatagtctccctcagctccgtgccatcgctgcagaggctgttatggacatcactgcagcccagtggctctctctcctggtctccaccatatgagttggcttctgtttctctcctgttttactttgcctttagctgtggtctttcaaaaacacaatccctccttatcttcctctgctggtcctc

SEQ ID NO: 220219 - DNA, 682 bp, Homo Sapiens
cggcgcgggtgctcggtgcggcgctggtatccagaggacgcggtcaccgcctctggcatttgtcgttctgcgcttctccgcaaggaccctctgttaggcaggcgcccaccgtaagcctcccgggccttgtgaacctgcaaacccaagtctgagagacgatccgccttcagcgctttccagcttggcagagaggctttcccggcggggatctttggttggcgctggcgatgcgcggggaagaaaggcgaggagcggcgtccaggctgggtgatgtcccagcacgagtaggcgggatgcgctcgcttggtcctccgggcgcccggtccctgcccgcgtcgcgcgcccacccctggggacgagaaggcggccgcctgaggacccccgcccgcgacctccgcgagtctggagcgcagaggacagggtctggctgctctttggccttggatggacaagtggggaattgggtggggggctgcggaccccttaacgtggattacttggtgtgtatcagctgggctcagaagacccacgacctcttctccatccgtggattgatttgttctgcttaacagctgggtcgccaagctggaggtatttttccctctccaccctggtcttctcctgtaacgtgtggccgccttttccagcacggctcctgcttcctggtgcacttttggagacg

SEQ ID NO: 220220 - DNA, 1000 bp, Homo Sapiens
ctaaaccattcatgaaggatccatccccctgatccaatcacctcccaccagcccccacctccaacactggggattacaatttgacatgagatttgggcggggacacaaccaaactatcagaccgttataaaaataggttaataaattatgacacagtgtagtaagtactgggacagtggtagaaccaggcactgtggaaacttacaatgaagtttcaactttaccagggagagctggagaaactcttatagaagaaggatcttttaagcaggattttgaaggatgaatagaagctctccaggtggtgaaaggcattacctgaagagaagacagcatgtgcaaaggtatgggggtcacaaaagggtcagggtacttgagaaatggtgaggagtttgaggtggctaaaatcctgagtaggtggaacaaaatggtggtgggagatgaggctggaaaggagaagagcttgaagttcctgtctgatcatcagatcctgtaagtctttgaccttgaagatggtatggatgagagtcgtatttatttgttgtggtaaaatacacaaacacaaagtttaccgtcttacccatttttaattgtgcagcttagtggtattaaatgcattcacattaaatgccacccatcttcataacttttttcatcttgtgaaatgcaactctgtacccattaaacaatagctccttggccgggcgcggtggctcgtgcttgtaatcccagcactttgggaggctgaggcgggcagatcacggggtcaggagatcgagaccatcctggctaacacggtgaaacactgtctctactgaaaatacaaaaaaattagccagctgcagtggcgggcgcctgtagtcccagctaatcgggaggctgaggcaggagaatggcgtgaatccggcaggtggagcttgcagtgagccgagatcatgccactgcactccagcctgggtgacagagcgagactccatctcaaaaaaaaaaaaaaaaaaaa

SEQ ID NO: 220221 - DNA, 1000 bp, Homo Sapiens
cggtggggggcaggggagacagagtaaaaatcgcagaggacatggggcagaaagatggaaggaacctgggccctcgatggctctgagtgagtcagtcctgcagtgccccgtccccatttttctgtggcctgggaaagtcaaatttcctcatcctttgtagttggccattgtgttatttggagatggaagagcattctgaaacaagccactataatgaaaatccaggtcgtagcaacttgccgtgcacggctttggcttggcatggacttacagtgacatctttgagatgcacttgtccggggtgcaggtatatttgagagtgtgaggaggacatatgtcctctaagctctgttttctaaaggcagcagaattccatttgccaagccagatgtccctcaatacgttagatcccaccaataaaacattaagcaattacaatggttaatattcactaaagtataattagaagctggcgtaaattgtgaatgaaattggcgggttccatacgttacagtgaaataccaaatctttttttagttgtgtatgtgtatctcagtgagtctgtcaactcagatgagtgaatcttacctcctctgtggatagaaacgagctcaatttcaactcagttcactataattttaaatgtttaagaacatcttgccagttgttctatcatgttaaagttactgaaatctggctgggtggagtggctcatgcctgtaatcccaggactttgggaggctgaggcgggtggattgcttgagcccaggagttcaagaccagcctgggcaacatggtgagaccctctctacaaaaaaaatccaaaagtagctgggcatcatggtgacgcacacctgtgttcccagctactcaggaggctgaggtgggaggatcacttgaagccgggaggtcgaaggtgcagggagccatgatcgtgacactgcattccagcctgggtgacagaacgagaccctgtcaaaaagaaaaaaaaaaaaaaaaa

SEQ ID NO: 220222 - DNA, 1000 bp, Homo Sapiens
gagccaagattatgccactgcaccccagcctgggtgatagagccagactttgtctcaaaaataaataagtaaataaataattttaatttgttttctttttaaattgattactctttgggtgatttagttcattactgtatttacttaggaagtgcttgaaattaggatccaaagtttgttttggttttgctttttttaacctttcccaggggtaattatctctagtagctgagaaagtaaaaagttaacaagaaagttaatgcaaacaagaccagaactctgtcaccatgctgtaagaaactcaagctatgtgtagcagctacgtggaggagtcctggccaacaggctcagctgggctcccagggataattagtgtccactatcagcccagttgggttttctgaagccccagtcaacacctgactgtatgagagatcccaagggagaattaagcctttccccaaattcctgacaccccaaatcatgagcaaaataaaaatttattatattaagccagtgagtttgggagtgcaacaatagataagcagaacaaaatttggtacctggaagtgggatcctggcttaacaaaacctacaatacaggcattggttttgagaccaggtggtgttcagaaaccccgtgagttttgaggaggctgtcggtgagtttgaaagaaaatgagaaagatgtgattggaagcaggggggcagggcacctcgctatgtagtggtgaaaagtctggcgtcactgttgctgtggtaatgagggatgcaggaaatgtacctaatgaattcaatgatctagctaaaaaaaattgtcctcaggaaagtagctaaccctgctgagccttgtccacacttggacctgacttaggtgatgagatctagaccttaagccagagcctgatgaggtaattggatgaagcttctggggatcttgagagaagataagtgtatttacatttggagggaatattaaaaagaaaaaaaaaaaaaaaaa

SEQ ID NO: 220223 - DNA, 1000 bp, Homo Sapiens
tcattgttgggttggtatttgtctccataacctgtttcagcctcaaggtcatttacctttgatcagtgcttcaagcttagcggtttgtttatatacatgttcatgtataaattatattactcagtctgatcataatatatgcccagtgcaaatcatttcattaaagcctcagggatacacggtgccaccgtttcctcattcagggacacggggatagtggtagtgtgtcttcagcacgacatggggaaattcaaaggcagccatccgtggaagagccaacggcagcccgtgcaggcgtcagcgcctggggaatagtagcagtctacatctttagctgtcagggtatctcgttgtagcctcatcctgccctctttaggggtccttggatgagttatcagttgtagtattgacattttctgtaaatagtgtcactcaagcgagtgacagtgggaagcagacaccagcccttagggagcagcccaggatgcttttttcctccaaatgcctctcacctattcccagatactcgctggagttggagcacacatgtctgcagatgtaaaacgacctgctcccccaggtgaatggattctcgccagggccaatacttatccgcaggggtgtgtgccaggcagcccaggtcagcctccctccaccgggccacccgcaccaggttgcctcccatcgtttgcaggagcggaagacccgatggagcaggtttcacagtgccctcgctgctgcctcccgtttcatctgcacgtctctttcaatgcgggcgtgcgaacttccaggtagagccgagttcaagaaaatgaagtactgcatgcgacgagcaagtttattgaagagggtgtgaggtcgcggcgcctgaccctcattatgtcagttactactaaatgaaattagaacttcactgccctttttctttttcccatcgaggtgcaggaggaattgatcttagggtagtattttggatttagaaaaaaaaaaaaaaaaaaag

SEQ ID NO: 220224 - DNA, 346 bp, Homo Sapiens; identical to SEQ ID NO: 58323
  misc_feature (333)..(333): n is a, c, g, or t
  misc_feature (340)..(340): n is a, c, g, or t

SEQ ID NO: 220225 - DNA, 480 bp, Homo Sapiens; identical to SEQ ID NO: 60467
  misc_feature (1)..(1): n is a, c, g, or t
  misc_feature (473)..(473): n is a, c, g, or t

SEQ ID NO: 220226 - DNA, 429 bp, Homo Sapiens
  misc_feature (282)..(282): n is a, c, g, or t
  misc_feature (368)..(368): n is a, c, g, or t
  misc_feature (397)..(397): n is a, c, g, or t
  misc_feature (406)..(406): n is a, c, g, or t
  misc_feature (414)..(414): n is a, c, g, or t
  misc_feature (421)..(421): n is a, c, g, or t
aacagccctttctgctgagtatttgttacttaacaatcttcatgtcttctgcatgtttcacttactcaaacatttactgggggctttggagagccagagatgctggggaagatacaagatgccgaaagggaaagacacagtcccatgtcaaaggcactcccactccaacttgggaaagacacacacatacaccagtgggatttatgatcatgtggtaagcactagatgatggaatgcacagagcacatttaaactgggccacgtgggctgagcaagagtttntcagatgggaagggacagggcccagctactagaggaagaccaccttataggccatccaagggaacggggatcatgtgacgtggctnctgcataggggagggagggcagggcaggncagacagtnggtagggnttagggnagggaggc

SEQ ID NO: 220227 - DNA, 593 bp, Homo Sapiens
  misc_feature (509)..(509): n is a, c, g, or t
  misc_feature (528)..(528): n is a, c, g, or t
aatcctttctccaaaaattagcttattatttgaatctgtcactgctgaaatgctcagcagcatctgaaacagatgggagtgtatttgcctttttgaaaaccagtttctattggtcttagttttttcattttatttcccaaacacaatgcagaaaatcagaatgagttaaaaaagaaataaaggaaacttaaagagagttgtgcaaaagggtcttgttcccctcccacccaccctattcagggaaggccattccccatcccacctccctgctccccaccccccaaccccaatctatcctttcaccttcaccagggcttcacccatcaccctgtaccctctccaggctttatcagcccagaacctaaagaagagagtaggagtactcagcccaggctttggggaaattgggcccctgaaggagacagactgtgaaaccgctgcccttaacggggtcagaagaaagctggggaaaggagacaaatggtgggctgggctgcgctctcctattntattaccagatgggggaanggttacaatcctgtggctcacaagggaatatagtactgagctacaactctgggcattcagtgtgc

SEQ ID NO: 220228 - DNA, 650 bp, Homo Sapiens
tttttttttgggcctattggattttggaggcaacacattcctcgtttgagtgtgttactccagcacatttattgagtgacctgaaaggctgccagttttgagtggggtccaaaacaggagaaagctctatgacaggtccaggctgttgtgcaagttgctctgccacttgggccatatgacccagcagatccaatgttgcttgaggtgtcagtggcagataaggatgctggctgcagcctttggcaggcccccataggtgaatcacagtggcggtctctaggctttcggagcaaggccctgccatcttctgcagataactactcttcttttgagagacagctcttggcctgttactgggctttggtggaaactgaatgtttgactctgggtcatcaagtcaccatatgacctgaactgcctatcatgaactgggtgctttctgacccatctagccataaagttggtcatgaacagcagcattccatcatcaaatggaagtggtatatacgtgatcgggcttgagcaggtcctgaaggcacaagttaagttacatgatgaagtggctcaaatgcctgtggctccactcctgccaacttgccttctcttctccagcctgcacggatggcctcatgcagaagtccctccgtcat

SEQ ID NO: 220229 - DNA, 631 bp, Homo Sapiens
  misc_feature (595)..(595): n is a, c, g, or t
aggaaatggcttaatttttatttgaggtggaaacctttggcttcaagcctgccattcaacactgatgacatctcagtcgtgagccgcacagtgggctgagtcctggtcactgcacatctgcagccagctgtgcaatcaagtctttggcatcttgcatggtggagggtatctctgagccattcttagtcaggtaggttccaaacaagaacatcttcctgtcatttcccacttcagataatgccaaagcttcatggatatctgtaatgtgataggctgcttcaagatcctgtttgtttgcaaacacaaccagaggaagtactgggtttgctgcaattagctgatgaaggtatttcttggcttcaggtaatcggctgtgatctgctgaatccaccacaaagatcagcagcaatcccttggataggtacatttcccagtaggaccgaaaaggtttactgccaccaatctccaggaactccatctggctgtcttcagtgttgatgcaaactgcatggaaaccttgggtgggtgccacactgtgctggactctgtttgaagctagagagtgcaggacactggtttttcctgctccatccangcccagcactaagatttgcttgttttctcctcgggc

SEQ ID NO: 220230 - DNA, 479 bp, Homo Sapiens
  misc_feature (463)..(463): n is a, c, g, or t
tttttaatatttttaaatcactgtatcttcagcactcagaccaccaccaggcccacagtaggagttcaattgatatttgtggaatgaatgttgaccaactaaagctgaagattagtaaaatttgagagatatctctgaaggcaagttttccctgaatttcatcagagaacagctgaatcaaactcagaagaagccagcaatgtttcagagaaacaactctgtctggacgcaggccttgtttatcctttgaattccagggactgttctctggccactaagacaggagaagaaggttgactctggcagaatctgcaggcgtttggcatgcgtgcgtcttttaggtcaccagaaataacttggaaatgcatgagcgtgtgtgttaagacggaaggacgagaaaaattagttttatttatgaggctactgagcagttagttattttttaggggtggggaccacttangcagagagaactccaa

SEQ ID NO: 220231 - DNA, 527 bp, Homo Sapiens
acaaatatttgaatttttatttaatttacagcaaagaaccaggtgcaatcaacactttcatataggacaaacataaagtatttcttgagctaacagttagccttcacttttaaaagtaaaaccagaacttttattcatctttctttctgcttcagaaattaacagctgctcattaaatattcattgatgcttgttgtaattgtactgtatttcactaaataaatgtttataacacatttaaccacaaaatagatatcacctctaagtttaacttatattcatactaaaatgtagtattaatttttcaaagatttttatgatgggcctagagaggaaggtaaattatgtagatggcatatcttcccataaacttagtgcatacctagaatactcttgaagtattctctactgttttctattcccaacttcagccagcaaagtaatttccacatcataaatgatctcagggaaaagatgagaaaagccgaacgtgccaacagtaaaacgtggtcccagagtgataataa

SEQ ID NO: 220232 - DNA, 516 bp, Homo Sapiens
caaactgaattaaggcatttattaaaaacctgcagctaacatcatacttgatcaggagactaaatgctttctccatcagattagataaaaatattgtcatatcacagggctatccttaagtcaaaatgaaccatccaaataatactcagaaataacgacaaagagtaaagagcaaaaaatgggaatgattcacatgagacaatactctatggtaaactttacatactgataaattgataccaagtccttattagcaaagaaaatggagtcaacattgtatcatgccaaaaagagtagttttccccataataaaggaaagtggaatacatatgatgggtgaggaatatgcagaatctgccacataacaccagtaagaaatctctattaataaagactcatgggccggtcgcagtggctcactcctgtaatctcagcaccctgggaggccaaggtggggtggatcacaaggtcaggaaatcaagaccatcctggccagtacaatgaaaccccgtctcc

SEQ ID NO: 220233 - DNA, 551 bp, Homo Sapiens
tttcatgttaaaaccattggaggaaaatatattgtaaagtatacaatagaaaaaaaatcaagcacaatacaacaaatacaacaaaaaattatcaaaattttcagaggaacagaacaaaatctagttttacaatcttcagaattcaatcccattataataaacatataaagaaacatattcaaagaaaaaggcaatcaatagagactgacctcgagatgacccagatgttggaattagtgtggatttttaaagtagttattgtaattcttactaaaatcaaaaccccaaaaacccttaaaataaatggataggaaatcacagcagagaagaagaaactacaataataacaaaggcttaagtggaaattctagaagtgagaacgttttcaaaattaaaaaataataatcagttgcgttcaggagcagcttggaggtggtaaagagtcaatgaaccttaaaatacaattgaaatgattcaatctgaaaaatgtgagcagtcataggttgaggtgagggagcttttcctttggttagtgcttttaggtaatcttg

SEQ ID NO: 220234 - DNA, 586 bp, Homo Sapiens
attttaacatttctttgtttgtatatccagttgttcttaaaatatcttccagaaacatttcttttacttcaaatggtcttccctgtatatatatcactggacaacttccaaaatatcttataaagagatttacatccaaggcagcactagaaagaattagtttcaaagttgggtgcttttgcaacaaatctcttaactttgtaagtaaaaaatcactaaatcgatccctttcatgcacttcatccacgataacatgtgtcacagtcgacaacgtactatctcctgccatcaatgtacgaagcaataccccattagtacaaaatgtcagaagtgtctttggagaaaccctgctttctaatcggatctgataaccaattgtttgaccaatcctttcccttctctctgcggcaactctttcagccacagcgatagctgccaatcgtcttggttgagtacaaaatatacggcaggggataccatttttaaagcaatcatctaaaaggaactgaggaatctgtgtggtctttccagacccagtttctcctacaatcaaaactactttattttccttaattattttaacaat

SEQ ID NO: 220235 - DNA, 455 bp, Homo Sapiens
aaatagaagcaattatttcttaagaacttctgatctactaccccaatgtaaaacctaagagttaacagctattcaatctgcacattaatacaatgtagttcttaagagttagatgacattatactgtttcttaatgcaaaaagccccagaataaggagatatctctgaataaaagtctgaatacattttatagaacagacctgaagaaaaatgacaatgtaaaggacccatgcagaaaatgagaaattaaagcatatccaagtataaaattttgtaggtatgggagatgaatgtcacttgctgccttaagtatattcagaggaagagaaaggttcaatacatgattaatatatgagaagcttgtgcaagcatatgataatcagaaacaatcccaacatataaaggggcaaaagtcatccacaggcccattacaaatagaaaatgttatttgttaa

SEQ ID NO: 220236 - DNA, 447 bp, Homo Sapiens
tagtggaagagtaaattaattttattgactgatgaaaaactaaagtgataagaagtatggatagtagacaaccactgaattctgctggaattctctatttcttctttttcactttaagccaaaagaaataaaattatagaccattagggagctagttgcttttagttccttcaagaaaaactgcatagtttagcagttgcacagcattaaatatatacaactttgcaaaatcctggaagttttaaactttgtgttgacttcaaaggctaatgtaatcacctacactggtcggattcagagtttcttttcccttttctgccaccctggtatttggctaactctgcttgtaatactttcactttagatctttcttgttctaatgcagcatgaagtgaagtcacctgaatagtgagctcattcttgatactttgtgattcatcaacttgc

SEQ ID NO: 220237 - DNA, 525 bp, Homo Sapiens
  misc_feature (475)..(475): n is a, c, g, or t
agttttccaattttatgtttaaagtctccacataaaaggcatatcctccttctctgctcctgaaatgatttttggtatacaaatacatattcatggtttgaaactgagaaattacaaactggtatgttactactttttgtctaccagtgaattttatcttatttttcttttttgacaaaattctggatgagtagtttagcgtctgatattctatttttctgacaaacttttcagggtaacttttctttttgtctctgtttgctctctgcacgctaaggacattctaatatgttagcttttttgaacattatataatagtcacagggtaattaatcactatactggcttttgctagacaatgatttctgggttcaatactcatgtagtctacccaatcataaagtctatagaatgatagtacaagttgagtcttcctaattcaaaaatctgaaatacctcaaaatctgcaactttntgagcactgacatgatgctcaaaggaaacgattattggagcattctgaat

SEQ ID NO: 220238 - DNA, 488 bp, Homo Sapiens
  misc_feature (442)..(442): n is a, c, g, or t
gcggccgccaccccaattctcgatggtgcgagtggcgcggtccagggagctgcttacgcccgccgtggtcaccatgtcgcgggctgcctgcagcatcttgagcacgctggcctgggccgagctggccgtgaggtccgggctggcctgccgcggtgggctggcgaggctctgcaccccgctgaagcagctgtagatgccctgggcagtagggagacgacaggccgtaagcagcgccctccgctgagggacccgccacgattgtccctgcctggtcccaaggcatcatcagtcttctataagtctcaggaagtagctaactgtgaagcatctcccatgcgccaggcactgtgctttgcagatgaatgagtggtctgagcgcccaggttgactcattctcctaatcactctagctagcacctggcacatgaaggttccaacctgngcacacctgtgggggggactctgaccctcttcaaccctgccaccct

SEQ ID NO: 220239 - DNA, 438 bp, Homo Sapiens
actttgtgtcattcagtttagagcaatttaatctttttttctccaaatccatttttgaagctgagtttaacttttgcaacccatggcaaatcttaaatgccctcatttaccaatctttaccaaactcctatttaagcctctaaaagtcaatactggccatcagacccaaatttcagaagacaatagtgaaaaattacttacgtttaatctccagtcgtgtcccttggccgaaggtgatccacagtgttaacttaattactttcccctaaacaaaaatctcttttcgctgttaatatcactaacctgaccgatgcagagaaaatcttgcaattgagatgcctcacttaactggctagcgcttggctgttccttaagatgaactacttttctatcccttactcatctgactttttgaaagaatctggtactctttggaat

SEQ ID NO: 220240 - DNA, 562 bp, Homo Sapiens
gacacagggtctaactgtcatcactctgagtacagtggcacgatctcagcttgggtgaaagagtgaatctccatctaaaaaaacaaaaaaacaaaacaaaaaaaaaacaacccatagatgacaaatgcagatagactaatacaataaactcccatgtacctaacagcacagcttcaacaaccatcagtattttgttctactttcttcacctatcctcctctgcagcatctgacactgtaacatcccatctttgtggataattttccctcacagtctgtgacattacttttctcgttcttctccccttctgactactcctcctgtggttcatcatcttcttcctactcactgcttatgcaatttgagaaaaacaaagaatcaaatggaattttataatcactgcactctgtggttaagacatgccactcactactttaaaagcagaatcatctcctttcctaattttatctgctgttaccgatttccaggataaccaataagcagtctaagttaattcacatagtccaaggctttcaacaccttttagatgaagggggcctgc

SEQ ID NO: 220241 - DNA, 442 bp, Homo Sapiens
gaattctaaacatcataaatgtgaggatttaaataaaacttttttgcatcgtaactttttggatgtacagctctgagttgtaacatttgtaaagattaatgtatctaccaccacaatcaggacacagggcagttctatcacctaaaaatcccctcatgcttcccctttgttaccccacccctcctcttccaaacactcatctgttctctgtccctgctgccctttccagaatgtcacatagataggatcatacatgatataacctggaggctgccttcctttacttggcataatgtctttgagattcatctatgccgttgcttttaacagcgagtagtatttcatcgtattgatgtaccaatttgatttacatcattcaatgaaggatacttggtttgtttacagtttttggcgattaggaataaagctgctataagcacgt

SEQ ID NO: 220242 - DNA, 515 bp, Homo Sapiens; identical to SEQ ID NO: 60209

SEQ ID NO: 220243 - DNA, 470 bp, Homo Sapiens
taaatgatgaaaataaggtacaaaatacctcgcttcttggactgattttaaaacacttggttatacctgatggagaatctatggattgcaaaggttgtggctgatacagcagtaacccctcccttcccctgagatcagtatttcggtgaaaaaggtagggaagttgccttgagtacaaaaaaagagaagagggctaaccaatagcagcggtgtggcagacagcacagtctgaatttttaccaaatgcgagataaatagcagaaattgtgcataagaaagaatggattctcttccttatgctgagaacaggcctctctcccaacaatgaggagctcttcccctgaggaggagaaaggatcttgtttagggctttgacctccattgaaggacagtgttcagattgtcatcaacaagcagagagaacaaagaggtaccagagcagggagcaaggctctactaacccagtgaga

SEQ ID NO: 220244 - DNA, 487 bp, Homo Sapiens
ttaaaaatatagatatatttatttgtcattagcaaaaggaagttaaatactgatagaagatgcaaatttgtcctttcatgcatttgtggagcaaagtactaacttgttcactgtcatttcccctcacaaggagttgagcccctagatgactcaggctaaccctaagaacctacctagccttcttagatattcccatcaaagaacaggtggagtgtactaagtatttctgaaaattctaaaccaaatcagcaaaaatggcctgactgtgggaagactgttcgttcaaactgccttattcccatcatcttgatttgacagcttcataataaccttcctggatatattccctgtggcacgcaagcaaacccggctttacgtttttaatagaggaatttattgttttaaatgcggactgtagaataggtgtagaagttgtttttcttttccaaaatgtatcaggctctaaaacgtctgaatatgtaattca

SEQ ID NO: 220245 - DNA, 542 bp, Homo Sapiens
acatgcctgatgttgcttgccgatgatttcaacgcctggctttgagattccgtgagtagtcttgaataatttaaaattcgaaaatcaaattctacttattttctcttaatgctattgtatttcctaattctcagctttaacatgtaagaaagtactttcgctaggggtcttaattgaatggtggggtcgagatgactgcgtcagaattaaatctctggaagacctctgagctccttttaaaatcatcaacaagcgaaaatccttatcaatagcgatgtgggaatgcattaggtacagtattttaaacatacaaaacctaggcatattaaaaagcactcctctggtaatttaataaggaataatgatgtccttaagtttattttaatcagcaagtatgactcaatttgaaaatatgagaacaaatagatttaaataggaacacccagtaaactatggtatgcaaataaactcagaggtaaacttgtgaatacataaatctaaataagtcagttaccatcaaaatattacgtgatcctatattt

SEQ ID NO: 220246 - DNA, 472 bp, Homo Sapiens
tatcatttatactgtattctcacgttacattatttcatttgatcctcacaacagccctgtgaggtaggtagggttatgtattactgttatgcctatttcacagatgaagaaatggaggtggctcagtgaggtgagtgacttgcataaagtcacacagcatgttagtggcttcactgcttctgcaacttctctaaagtcaagctgcttggattagggagcaccgaaaagatggacagttttatggaaaaggagaaagggcagtggtgatttgtaagatttcttcctcaaattgttttgttatgaccacagcttctgctacttggtctaaactaggttctccatgaggggctctcccaagtacccttggcctgggacagctgtctttttttgggatggagtctctctgcaatggcacactctcagctcactgcaacctctgctatctgggttcaagcgattctactgcctcagc

SEQ ID NO: 220247 - DNA, 484 bp, Homo Sapiens
tttacatttaaatccttaatccatatataatttatctttgcatatgatatgaggctagagaatctaatcttgtttgaaatagctggttctgacattatttatgaataattcatccattttaccagattatacaagtagtcttatccatgggggatacattccaagaccccccagaggatgcctgaaacatttgatagaacagaaccctatacacactgttttcaatctgagaatccagatggctgctaagtgactaaacggtgggtaacatatacagcgtgcataagcaggacaaaaggacaattcacatcccaggcgagacgaagtgggacagcctaagatttcatcacattattcagcaacttaaaacttatgtattatttctggaatgttccatttaatatttttatattgtgattgactatgggtagctgaaaccatggaaagcaaaactgacaataacaactgtacttgaaattacatc

SEQ ID NO: 220248 - DNA, 505 bp, Homo Sapiens; identical to SEQ ID NO: 59626

SEQ ID NO: 220249 - DNA, 499 bp, Homo Sapiens
aaagaggtctgacatgatcagaactatactttaaaacagtctctttgagtctatggacaaaatcatactgaaatactgtatgagtatgcaggaacacctataatattttaaggagggtatttttttttttaaagagagcactcacattcccagtctctatgaaagccacccgtctccagcttcctttgcaatggttctcagtgcagattccttatttattaactcttaagagagaaactagtcatactatgtgagttctttaaacacctaatattaacagtttagataggagattttaactctttccatagaagtatttctggcatcttaagtatacagaatataatttaacctattttgataactaaaaatccttatgaatatccgtactatgcttcacatacagatgtgagctgcacagtcaaccttatctgaactgaaaacatttcccatttttacctttattatgaaatttagaagctgcactacacaggtatct

SEQ ID NO: 220250 - DNA, 567 bp, Homo Sapiens
  misc_feature (501)..(501): n is a, c, g, or t
tttatatgttcatctctgggagacagtgaatagtggtgaattctctactactcaataacttgaaaaattactgcattcagccacatgcatttaaatcacgcataaacaagccaaattactcagaatcaatacagtggcaacacaatctagggaatattgttggcagattagagagagataatgttgcttcatctcattaggctttcaaattttgctttcacctctaatgatatgttcatctagatttctacatatcgttcaaatgatctgaagccacatgtcacataaatttcagacttgattctttttttccattcagaattgactgcaaaaccatatattgtatctacattcaaggagaggttgattttagctaacaataatgcaaaatattttcaaatgtgaatgtctgcctttccaatatacacactgtcaccttcttgccagaatgattaaccattttagctgcagttgtaaggacactgagtgttttgagaattntaaagggaaaaatctggaacccaaataatatacatagcagcattacatttggacaactacatttca

SEQ ID NO: 220251 - DNA, 478 bp, Homo Sapiens
tttttacaactggaagcacagtaggtttatttacagcagcgtcaccacaaacacctgagtgatatgttgcatgacaacgtccacaagtgataggaatttttcagctccattgtaatcttatgggaccaccattgtatatgtgtccatcattgagtaaaatgttattacatgacacatgactgtgttcatcaggaatatgtatgctagtatgaacctataatgagagtgttaaattttatgaagcaaaaactaacagaacaaaagaaatagatccacaagcataattggaaatccacaattatatctcagtaattgatagcacttgtaggcaagaaatttagtagtatatgtaatcagctcttcatatatgcagattcaaccaatagcaatgcacaaatattcagaaaaaacacaatgacagtaaaaaaatacaaattttaaaatacagtataaaattatttacatagcatttacattg

SEQ ID NO: 220252 - DNA, 449 bp, Homo Sapiens
tgatggcaccatcactttctaacaccattatatattttattttctgcatcctctaatagaatgtaagctccatgagggcaaagctttttattttgttcacttaagtaaaataggcgtctagaacagtacctggcacacaataggagccaaaaaaaaatctgttcagtaaacgaaggcaaatatcagtaagtataatatgcgtgtgggaggggagagggggttaaaaagggcaagaagtcccaataggtagataaaaactccacagagtaggaatacagaatcgtgcatcgtgtcccatttgacaaatttttgagtttatctagaaaatagccctgcgttaaacgtttgttaaaagtgctgatttcaatggtcttacatgctttaaaaattccttgttaagtgttctaatcttttagatgtggtatcagccacagaaatttattgttccc

SEQ ID NO: 220253 - DNA, 504 bp, Homo Sapiens; identical to SEQ ID NO: 59587

SEQ ID NO: 220254 - DNA, 482 bp, Homo Sapiens
  misc_feature (467)..(467): n is a, c, g, or t
taacaatttttaaatatattgcattttattacgtaacagtaaaattagtaaaataattgatatactttaatttataatttctttctctcagtataatgtagaaaagtattactctgaacacctaccttaaacattacttaatataggttaattacaatgagcctctccacttatatttttgtcatgcatcttacattttaatgtccttactgttttatagaaaaggtcataaagaatgcccaactaataaagaatctctaatatctctgatgcagcaacaattgatcacatactttcacgtgaatataataaagtaacagcataatttgaaagctgtattacatcattattcacttttcaaaaaaattgttttcaaggaaacaaatatactttcaatgtaattacaaagcttcaaaaaatctccttttaaggttatatactaatttacacaaacttatatacaaatntaacaactttagttg

SEQ ID NO: 220255 - DNA, 450 bp, Homo Sapiens
ttttttaccatgaacaaaatatatttgggcttctatcatttagactcaaaaatagtatttttattgctggttatgctttcttaaaaataaaaaatattcttgatcgatgtgactttccagaatgtttgaaacaccagtgaccaaggatcactatatatgtccccaaacaattccaccatgcttacttacacagcactcagcaaaccagaagagaggctgggatattctaaggccaatgcactgagcatcaatattaaagaaccatgaatgatgcgacaattgaattgattttctacctcctctgcccacccttacttcacacaccaaaatgctttcagtgtcttttcaaggtacaaccctccttctggccacaggttggctgggtcacctcaagggatgttccttcattctgcagtgatttcttgcctcttctcaatttaagaaagttca

SEQ ID NO: 220256 - DNA, 477 bp, Homo Sapiens; identical to SEQ ID NO: 60760
  misc_feature (390)..(390): n is a, c, g, or t
  misc_feature (398)..(398): n is a, c, g, or t
  misc_feature (407)..(407): n is a, c, g, or t
  misc_feature (425)..(425): n is a, c, g, or t
  misc_feature (437)..(437): n is a, c, g, or t
  misc_feature (443)..(443): n is a, c, g, or t
  misc_feature (451)..(451): n is a, c, g, or t
  misc_feature (469)..(469): n is a, c, g, or t

SEQ ID NO: 220257 - DNA, 425 bp, Homo Sapiens
  misc_feature (371)..(371): n is a, c, g, or t
  misc_feature (382)..(382): n is a, c, g, or t
  misc_feature (419)..(419): n is a, c, g, or t
attcggcacaggtggggaggtgctgcacacttttaaacaatcaaatcttgtgagaactcacaatcttgatgacagctagagatggtgaagccactcatgagaaaccactcccgtgatccaatcacctcccaccaggccccaactctaacaccggagattaattacatttcaacatgagatttgcataggaacaaacagtcaaactatatccggtatatacttaagagtagaattactgggtgataattctgttttacgttttgaggaattgccaaactatcttcctcagcagttaaaccatttacattcccaccagcagtatactaggtttccaatttctccacatgttgcaacaacactagttgattttntcttctaattnataggccattttagttagggtacaagtgggtattctncattgt

SEQ ID NO: 220258 - DNA, 468 bp, Homo Sapiens; identical to SEQ ID NO: 60735
  misc_feature (43)..(43): n is a, c, g, or t
  misc_feature (383)..(383): n is a, c, g, or t
  misc_feature (404)..(404): n is a, c, g, or t
  misc_feature (429)..(429): n is a, c, g, or t
  misc_feature (465)..(465): n is a, c, g, or t

SEQ ID NO: 220259 - DNA, 481 bp, Homo Sapiens
  misc_feature (14)..(14): n is a, c, g, or t
  misc_feature (18)..(18): n is a, c, g, or t
  misc_feature (380)..(380): n is a, c, g, or t
  misc_feature (393)..(393): n is a, c, g, or t
  misc_feature (435)..(435): n is a, c, g, or t
  misc_feature (445)..(445): n is a, c, g, or t
  misc_feature (451)..(451): n is a, c, g, or t
  misc_feature (477)..(477): n is a, c, g, or t
caccaagtattatntaantggtatatgatatgatacttgtataatatgtcaataatgtaaaaggtatttaaatagtgtatgtacttaggtaatatgattcttattttatgtttaattttgaaatgttcattgaggtcaaaaggttttaaaatttgctttaatttaaaaaattatagcatcatccagctattctgactgcattatcaacacttctttctgtggtaaaggtactgtttaagagtaattcatggcagtgtgataatgccagccaattcacagaagagagaaattgtaattagtaataagaatgtggggccagggcacagtgggctcacacctgttaatcccaggcactttggggaggccaagggtggggaggntcacttgagtccngggagttcaaggaccaaccttgggcaatataggggagttccnacccaaaaantacatnattaggcccgttgttggggttgcgcnccat

SEQ ID NO: 220260 - DNA, 274 bp, Homo Sapiens
ttatgtgaggaatagctttattccaaggtctttgatgctcatgtaataagtacaattttaacaactaattctattacaaaagactgcagaaagctctgtacagctggatccctatacgttcttaagaatcaagcaaacagcctgtgcaacaaagtgagaccccatctctacaaaataattaaaaaattagccaggcatggtgattttatctgtctatagaaatggggtcttgctttgttgaccaggctggtcttgaactcctaggcttaagcaa

SEQ ID NO: 220261 - DNA, 455 bp, Homo Sapiens
cttaacaagttccctaggtaattctttattcaaaacttttttgatgttgtttatattttgaaatctgtcacacatacagaagagtttataaaccatatatacatagtttctaacataaaaattaaacaaacacctgtgtacccactacccaggttaacatattgaagattgggagctctggtgtgcccagttgtttggtacaccttctcccccatcacagggaactactatcctaactttcgtggctttcatttccttagtcaacctgttaggaatcgactccatgtaacacacgaaaagcagcttgcagaaacactggattcacacatggaggagaaatgccaactcacaggcaagcacagtgatgacaaaaaaaaaaaaaaacactgcagagattgagggatccttagaggatgtcggtgtatgaaaaagtatttaaacatccccagttttgt

SEQ ID NO: 220262 - DNA, 567 bp, Homo Sapiens
tttttaatcataggtagtacatttattttttggtagacaggcatccaaataaaaataagacatatctaaaagtataaatgcttaccatattacacactaaattggaaggcaagttgattcagtatgtcataaatcacatcttttaactgtaacagcataaaataaataatagatttttgatattatatgccaaacaataattaacatttaaatgtcaatatgcacctaaaaataaggacttgacacacagaaaaggagtgtatattacatttaaatttgtaagtggttacttgctacccatagtgcctcaagaatcagataaaaaagaccgagttacttaaacaatatgtatgttcttaagagtgactgataggaaatcaaagcacgttcattgttttctcccatacatccgacaggctttaaaagaggccaaataccaaaaaactaaagagacattatacatcacccatttgtgatattctggtcttataaatatatcatttcaaccagaagagcctcatttgaaatgcaacactacccacgtatttgatatacaccactctgtca

SEQ ID NO: 220263 - DNA, 554 bp, Homo Sapiens
agtaccaaatatgattttatttgccactgttgttattttttcctcattttttcagaataaagaaggaaactactttaagtgatcattaatcttctttctacacacaagtctagaaagcaacaaaaagtggggccctgagtaacaaaaagaagttataattgattttaagtacagtaagttaagcaaaatttcaggcattcgaccactctctctcatttttcagtatccttaaaaaaattagttcgggaagtcccgtgtttaaatttaagaagaccaggggctgttataactgatggaggataagtcatttagcctttcccagcctcagtttccccttctgtaatagaaagatattagacagttcataggaatggaaaacttattttcttattcaagggagaggagaaaataaatgtctgttgaacagaagaatatgaacatttatttattttcgtgtgtgtgtgtgtgtgtatctgtgcatatatgcaacaagaaagcatatttaaggtgagagtaagaattagctagggaaagacattaaataaagtgcatct

SEQ ID NO: 220264 - DNA, 556 bp, Homo Sapiens
cttcctctggtttcctttcattgtcctttacttctctattgcctgtgaatccatggtttgaatgattaaagtttttgatatttccccaagtgcagggttccaagcatgacttggaatactattaacactgtggtccatgtgaatgacactgcttggacttgtgcaatgcacaacctgtagagcaatatgggccaggcatgcctagtgaaatcgaaaagtaaaatgtctatcaatatggtagtggttacacaaattatagaagatccatacagctttttttttttaaaaagagaatagcactttatatactgatacagaaagattgccaagatattgttaaataaaaaaaaatagaaagcaatgggtattgcgtgctaccatttttgtaaaagaggagaaattaaatatatgtacactaaacatacaatatctgcttgtatgtagatgaaatattactcaaagtagacacattaagtacagacacattaagtactcccttctgtggaacgggaattcggtattaggagatgagatgggagacaaatttattttttat

SEQ ID NO: 220265 - DNA, 552 bp, Homo Sapiens
gctcctcccgtaccaactgccgctgctctcgtttcctcttaattaatgatactctgtctttgatagctttagccatggtcttgtgatcaccttcacagacatacccagactctaccatttcttgtgcaacatcttctgggacatctctctctaaatcaaaagaaaactcaatagcttcattatctttgtattttccctttaatttcttaatatcttcaatacgtagccataattttatggctattttttctccatcatcttcttctgctaattctacccgtactcctgtttcctcttggaagaaggcatggttcaaaaggtctttgatggaatatctttcatctttgttttgtcgtatgcatccttcaataatttccttcacttcaggaattgctactttgtcaaaactggctggcttcaccccctcatttatacaatccttttgagggcagcagcagcaatgagaatttatgatgacaaatactgagcaaaaatctttctttttaatatccatcagaaaaggcaaaacagatttcttattggaggaaaatg

SEQ ID NO: 220266 - DNA, 404 bp, Homo Sapiens
tacatgatcaaaacaggaagattattttattttgttttttgcattatgtgcaagtgtagacatgcagaggattgttttagaatccatatgtaaagtgtccaaaaggaaaagcttaattcagggagacaaaatagaaaggtctagcaaaatctatgagtgaagtgtgaaggggccaaatcagatcagttgtaataggagtggaaagaaaaagcctaggatgtttcaacagagggcactgggccaaagctttggtgttacctggaatagggtttctttcttctcatttgttgataatgataagcttttgcccatatttctgtggaattatttaccattttggtactgatttgtagaagtctgtttagacacataagtgcttttagataaaatacttacattcaaag

SEQ ID NO: 220267 - DNA, 566 bp, Homo Sapiens
aataacacacagtcaaggggcaagtctcccactctttactaattcaactatatgcttaatcaactaatagttgaagcacattgattccaaaactcccaccaatcagcctagcttccagtgtcatcctattttctctatactcctgagtcttcaccgtctccattctgttcatttatagaatcacattatccaaggctaatgagtcctcattgagcttagcacatcctgattcatttctaaactcaccagaatcattgcttgtgagactgtttccagaaacaaatggcttgcgcactgcagatggcacaccacagacagtcccatgtgccacccactaaagctaaaaagtcacctggtaatggagttcaggccgtttcctctaatgacagaagtctatgattttttaaaataactggttaattcaaggcaagagtttgttcttttcccgacacaaaaagaaattaagagttattatatgagagccttaaacttaggcacttaaacctcaaatcccatcatttgttgtattggtgctaagaactaaaactcatcttcaaacgtcatct

SEQ ID NO: 220268 - DNA, 540 bp, Homo Sapiens
gaagtgaaacaaatcatacagaattttaatactataaaaacattagcactgtaaaaacagcaacatattatacagcctcaaaacagttttaaactgaagtctagtatgttcagaaacgcagggtgctgacccaccatccaactgaagctgagctcaggaatgcctaagacaactcataaaaatacacagcatcaagatcagtctttgtacattatttcaatgaaaaacacatagctgtgtacaaatatacagatctcaaactgtaacactgaaacacaaaatgcaacaaagtggctttataagttttcttcactgagacagaccttctggtgacttctggtgaatctagacatttatgattattaatacataataagcaagagaaatacagattttccaacctcatgatcagtaaattcctttgaaaaatgaatgaaggtatcagagtcatcaaaaggggaaacagttggtaagtttgatggccctgcctacactgtataatgtaagacacacaataagagctataagaaactatagtta

SEQ ID NO: 220269 - DNA, 559 bp, Homo Sapiens
gtggtggggatgttgaattcatagtgataaaattctgctgaaaatattgaatggaggggtctgatggaggatttaatctccagcagcacccatgtaaagttcaggacactcataaaagcataaaaacatttttggagtttaaaagagacacactcgtaaaataaaggacatgggtcaatatctcatgaatcaccggcacttgttaagactgggggttaaatgttctctgtgtagagcatttggtaactatctgttcatactctaccaggcagcatgtgctagtgaaaggggctcgggactcagtactggagatggggccacagttgcctactgccactaaatgactgagtgctcccagccaagtcacctgttcctttaaacctcagttttctcacctgcaaaacaagggatctgagccacatgatgtatccatccacctacatttcatttctttattgagcacctaccagttcccaggatgtaacggtaagctcactgacacatggcctcagccttcctaaacagtctagtacatagggtaggtaggggtggaggccag

SEQ ID NO: 220270 - DNA, 478 bp, Homo Sapiens
ctgaacacaacctttatttgatcattttagtatatatttttttgcccattcgtatatttatttcaccaggtcagaatacttacaatgcatcaagcttcatgtgaattaccaggaattcacaaatgtataaaatatcaaggaacttagcatctaatgagggagacacatgtaaataaataaagtttaacttacgtgatacataaagttaagtgatcaatagtaattttgtcaagttactgttgtttctcaggtattactggttttatacagaaagcattgtatacagaaaatatataagcatggcacaatagaccgtccagtgtccttgtcccgtctcagaggactccgaatatcccctatatcacaatacaaataacatagccgaggggtcgaaaagacaaaacaattccatgggatgaattaaagcaggcaactgatagggttgagagcatattcgagcctctgcgtgtcctcacat

SEQ ID NO: 220271 - DNA, 580 bp, Homo Sapiens
tttttttcagttactccttttttaataaatttgaattcattcatcaacaagtttcatattgtatctatcactcaattttgctgttttttcatgtcaaataataccaaaaaattacatcaatgtgcttaagcaaaactgggtttaaatttatctttacaataaaatgaaatcaacatgagaattgattatgacagcaatcgcctattcctactagaataatcctgtacttaccttaaacacactcactgacttgtgaagtagaaacatgagacaaacgtgacaaaacatgttcatggggttggtcctagggagaggcatacgggagccactctctggaaggtcattgtttacccaggtgttgggaatttagtatttcaggaaaacatggcgcctttcaatgcagtagaagaggtaatcaatccaaggcacactagctagtgtcctggaaaaatttaattcacctgggcagctctttgccccaagattcgatgttactctaatggctcacactgacagccagagtcaattccaagagtaacaaaatgtttcaccaattgttcagttttgcttacataaaatg

SEQ ID NO: 220272 - DNA, 433 bp, Homo Sapiens; identical to SEQ ID NO: 53728

SEQ ID NO: 220273 - DNA, 486 bp, Homo Sapiens
  misc_feature (369)..(369): n is a, c, g, or t
aagtttctacagataggttaattggaaatataatttgcaccccatttaaaagggcccaattcaatggtcctttagcatatttaacagagctgcacacccctcactacaatcaatgttagaccattttcatcaccctagaagaaagcaggtccctgtaacagtcactctctattttcccccaaaagtccctgtccctggcaaccaccgacctatttcctgactctggatttgcctaccttgggcatttcatgtaagcagatcatacaatatgtgagcagatcatacatgagcagaccacacaatacatgatccttcctgtccggctcctctcacttagccctgtgttttcaaggtccttctatgctgtangaaacacccctgcatccttccatgcatgggtccatacttcatttctttctattgctgaataatattccattgtagggatacttaatctgtatttctctattcaccagttgggtcaac

SEQ ID NO: 220274 - DNA, 513 bp, Homo Sapiens
  misc_feature (467)..(467): n is a, c, g, or t
  misc_feature (495)..(495): n is a, c, g, or t
caacaagcagtgtttctatggaaggatttagaataaaaatatgatgttaacgataactgatagttacaaaaaactctaagaggatgtctgttctacactctaagtaaataactgaggaaggagaaaagagaattttgcgacttagattttggattttaattttgcaggatgagctgtcaggagtcttaaaatgcggccccacaaggagtatacaggtccctattatgttctcaaaaaccaaaatgtaaaatggctgcttaagtaactgacaatgcaaaacagtttcaaaatagaaaacattctatttttcaatatggatgattttcataacttaaaaaagtttacataagacatatcttgaaatacacatatttttacccttaaaacatttatctaaaggtaaactggaccaagagaagttgcctttttttcacagtaatttactgggtactggtgtccacatcaancttttgctttattctgaagttatttttnccatcacagatcggcact

SEQ ID NO: 220275 - DNA, 505 bp, Homo Sapiens
tcactgagaaaaatcattttattagactaaatgtttccactgcatttcagtgtgattagaaatgcccctccctcaaaagacaagccaaccacatttccatgctttgttagttatcggattaatagtgaagtaatgccatccgtgcactggatccgcccattccttagcatgttttaagaatgatctggttggaccctaccattgaaatatgattttgtgcttctttaacatgtctcatagcaggtgtatctaaaatcagacttggtctacctttcatctgtttatggtcctgggtatattttaccgagctaatattttcttgattcttcttcactctttccatttcaggagttacacttaaagtggtagctcttcccagctgacctctgtaataaacctatcatttcagagaacaaaaaatagaatactatgaatcaattcaactaagagacttatttatttatttaagacagggtcttgctctgtcacccaggctgaagtgcag

SEQ ID NO: 220276 - DNA, 462 bp, Homo Sapiens
atagagacaaaggtcttgctattttggccagactggtctcaaactcctgagctgaaacgatccccccgccttggcttctccaagtgctgggattacaggcacaagctgccaggtctgaccacctttttttattgttgttgctattttaaataacgctattgacaactgacattgtttaagacagattcctcatggtaaaactgctgagaagaacatgaatatgaacaatattaagagaatccccaggtattaattttcaatggtactaataacttatcccaatggtaaaaaatgcagccggggagccaggtgtccagggaatctgaggctgtgccagtgagctgggcactgtgcctggcgctgaggacagagctgtgacttgaaccagccagggccctttcccctacccttggaaggaagatggtgatcagacagcaacaccccacaagtggggtaacaaac

SEQ ID NO: 220277 - DNA, 527 bp, Homo Sapiens
tgtgtttcttcaattctttattttatgtcaacaatttctcagctagtctacagaaaaaacagttcattcaaaatacatcttatcattcccttttcactgtttgatattctgccccttcattctcttatgttccactttctgtaatggagctcattaccgaggtggtaggggactagtttcaaaggcaacacgagtcacagaaatatcaagccagtggtttccttcaggacattcatatacttctcgtgttagaaagaaaatctttccttgggtgcagtgatatcactcctgagaaaccaattactttccaaatatctgcaatactatttttgacagaactatttcacatagaaaaacatagtatatctatatgatacataattttaccttattatctacagttcctatagcataaacagaaaaactgatttaaaatactttttgtctagtagttaataattggataatttgatgagtcatttttatacattggtcatccacagcttggaatttttatttttgtgcag

SEQ ID NO: 220278 - DNA, 482 bp, Homo Sapiens
  misc_feature (450)..(450): n is a, c, g, or t
tttcatttttaaatatttattttctagccattctcttgaacaagaagtattcacttacccttggacttttggaaatgtggactttctttcattttcattaagaaatcttttaaatccacctccatattatcatcaactgtcactagttccaatgcagctagaaattcatccttttttaaattactattcaaactagacagagtattccacaggtcagaaacactcatcgtctcctttctgagatcgtcgagggtttcaatagcatcaggcaatactaatttttcagagaagcattccgtgttgctcatcatagtatcaatgaattctttaaaattcactttttttgtttcaccagcttcagtcagttctgtgatcttcttaaattctggcttagaaaggtaaataccaaaattttgaagacaagtatttagatcctcataatccacattnttatctttaattttatcaatggctttaatgac

SEQ ID NO: 220279 - DNA, 569 bp, Homo Sapiens
tctgaatgagtgaaggaaaatgtgtgttgagaacaaagtgccagagacctaagtccattccttaaacctgcagggttggggcctggagagacagaggctgccactgattctctgaattccagcttcccttgtcagtcacgcagctgaaagcaggaagaagctttctcttctgcacttggaacaacaaggtgaagatgacagagagtcccacatctaccatggaaaaggcaatggtccctaaatcatgccaagttttctaatgacatgtgttttcccgcaacatgtaactatatgtcctcccttcaagcaccagttatcacagtacaaacacagcaacagcataaaggaatgactactgagcctgaagctctgatggatgctctgagttgagactttgttttatacttaggtacctgtgagtcattgcagagttttgcctgactccaccatgacccaatttgatcaaggtctatatgctatgagacctctctagttcctcatcagaaattataatgaataccatgtccagctcctgaggtgcctgatggcaacgagcggcagctcctctt

SEQ ID NO: 220280 - DNA, 490 bp, Homo Sapiens
ttttatcttaagagtctttatttaacacatatagtacacattttcagtcatttcatcatcatccaagtacattaagatacatacccatgtatattacaaggcttattgttcactcatcatcttccctttctactttaccttctcatttcttgaagtctctattctcattaatttgttatttagttacagtcctcttttcagtttcttcagatggggatatgcagatgatagattcttggaatcctttctgcatccctttcactctggcaggtgaatgatgcttggctggaaagagacttcttggttactttccttttctcttaacaggtatagatatgattccactgtctgataccagtccaattcttttcccattgcaaataacttctttctgtctggaatcttatatatttttctctttaacctttgagattcaggaattctgtcagagtatgtttaggtgtatgccttttctcatcaatcctgccta

SEQ ID NO: 220281 - DNA, 465 bp, Homo Sapiens
ttttttttgaagttttgcacattggcaccagacatgatttaattggaaattcttattatttattctattttcaaaacataagtgcttttttaaaaaaagtctaacatgtctttttagtaccacacacttaaaatgaacaaaaaacaagtcgagttttcttaaaagttgctttaaaagttaaataccactgtatggggaccataatgacacaatttcgtaaactcagagaaatgcagcccttcgagtaagttcaggcaaatgagtgtgggaaggagtggatcttttgcctgtggcactacagatatactccctgagattggggtacacttacaaccagtgaaaagacaaatagtttcagaacaggttgtaaactttctttaaaagtgaccagaaaataatgtagtcagaaagctacttactgtgtgtttccatttgctctgagagaagtgctgaaaaggtttgctg

SEQ ID NO: 220282 - DNA, 473 bp, Homo Sapiens
  misc_feature (428)..(428): n is a, c, g, or t
tcttttaagaacaaagtttatttttctaattataaaaattatcattgtacattgtcaacaatttggaaaataaagaaaatttacattatttttctctcaactatttatttttaaaaatttcaaagcaacagaatacagataggcaggccaattcacccacttacaaacgctgagccaacaaatttactcagagcttcttggcaaagtgaaaagtgaaaaacaggcagttatataattcacattgcctataaagagaaaacacatcagttactcaagggtagccaaatatttcatgacttgtggctcagagagaaaattctcttgtgttcatatgaggaacacagagtgatatcacacacaacaacctgtcaactatgccttctagaattcctcagtataagggaaagggtacatagtatgaagcctgnggggttaaaagcatggattcgaatcctagctttatcacttattaa

SEQ ID NO: 220283 - DNA, 521 bp, Homo Sapiens
tggactctgtgtgctgccttaggggttaggaatgtggtgctcttgttgggggaagtgagctccaagagtagctttttttcatctcttagtgatcttctgtttatcggttgaatgccacagattcccttttaaacttattttgctgcatcatgtgcagcagctgcagggccttggacatcatcataggactgcccatctgtgacaattactaggaagttcttgttggggctctcccttatagggccaaacacatttctaacagtgaaggaaatggcatcaccagtagctgttccaccactcatatagcggatgtttctgatgacagctaggacattctctttggtgctatagtcagtgaaactgaactccgtgcgctgatcataagtaaactgtacagcagctatcttggcaccaatgtccgagatttcaaaagtcttggctatgttggaaacaaattcaagcatgaggcggtaattgctatctacaacactggttgagccatcaattattaaggcaatgtt

SEQ ID NO: 220284 - DNA, 548 bp, Homo Sapiens; identical to SEQ ID NO: 61224

SEQ ID NO: 220285 - DNA, 538 bp, Homo Sapiens
cggccgccgccatgatgaggaggtcggcgcggctgtgctgcgggcaggcagcggagagggctcgcggcgagggctccagcttaccccgccgccgcgtcgcgtgcacggagcgcttcagaggtttggagggggccggaacctcaaaagcaactggatgagcacaacgcggacgccccggagaagcggcgcaagcgggcccaaaatggttgctgatcagacgagtggcatctctcgcccccctaccgcgggaattgggacctccagactgtgcctgggggatcggcaagtggttcccctctggttttttcggcgctgccttcccggtggtatcctcactctctctctttgaaatgacctctgctttcctatctctaactcttcccagatatttgaaagcaagtttttgtacaaagcaacatatgaatgtattcagccattcgatcgttcggcgaacatttctaggggtctcgtgctgtgccagatattgttctgagtgcgctgaagatgcacctgttagcaagacaaaaaacctcgtgcc

SEQ ID NO: 220286 - DNA, 528 bp, Homo Sapiens
aattatcaagtcattatattatgtccatcagtcaaaattgaaaaaaaacacaaaggatttttaatacacttcatgttttcatctgtggatgttaattacagaatagctgacagcagaagagtattttaggttagaatctttctctgagtctcactgggctcccgggtgattatttgcagcccttctgtcccttcttccaggccttccctttatcccaccccaccccatctcacctctgcgccctcttaattgttcacggagagaaagcaagaacaccaaccaactgatgacgttctttctgtacttagtgttacttgccagtgagtagtcatttttgtgagctgggagacattctcccaggaggctcggcctctgaactagttcttcctgggcctctgaaaaaaccctccttgctgagtgccttctctgaccccatattaggccctgagaaaaggaaccattctaatgttgtagggctcaaatcaattgttccagatcccaaggcttgtaaacaattgaggctgaaac

SEQ ID NO: 220287 - DNA, 558 bp, Homo Sapiens
gggtggtaggagtgatatatttctctactcaattgatattacttctagaataaggaatcaaacaaaaaattacaaaacactacatgcatttacaaattctcatgtacaatttctacaaacttgcttaaaatgcagagtataaaacccaaatttctcagcttatgctaacacatttaattttttattgaaaagttacatcttaatatcttaattacaacatgatagataatttatattcattgtagaagttagaaaatttggataagcaaaaagaaaacaatcacctgtaaaactacactcagaaataaccatttaacaatttggcacatatccttccagacataatatatttttgggtttttttaccaaaatggaatcatgtttttaaatttattttttctcacttacatataccaagacatcctttcatgtctttatattattctatcatcattttcatggctgagaaggcagtaccccactgtagggatggaccctaacaatcactgtgaaacatttaggttgtttacaattttaccatataatgatcaatagtac

SEQ ID NO: 220288 - DNA, 529 bp, Homo Sapiens
ccatttagcaacgatttttatttaaaaagataccttcccctgcctcactccctatcctaaaataaattatagatggattaaaaatttttaatgtttaaaaaaatgctagattatatttagtaccttgagattagaaggtccaacataaggaaaaagactgataaatttgactatacaaatttaaaatttttgtgtggcaaaatataatacaaacaagattgaaaaattatgaactcgaaaaattgtttacaaaacatatgacaggaattaaaatgactacaacataaagagctttttcaaatcaaagacaaataggccaagtactgagaaaaagacaactcacaaagacagaattaacaactggccaatcaacaagcaaaataatcagagagacacagacaaaacattgaaacatccttcttcacataccagattaatcaagattaacaatacaacagcactcagtggcgctgaggctttctgctggtaagagtgtaaatttttgtataagtttttgcataaaactctt

SEQ ID NO: 220289 - DNA, 525 bp, Homo Sapiens
aacagaagagactgcttactgtttattaagtacacattaaaacctaagtggtcatttaaataaaaataacaacgtattattaattttattacatatatgaacataaaatgtatgaaaacaactgcataaaattgggactggcaaaaaggtatataattgtacagttcttacgcatgaagtagtatattacatctcttgaaaataactgtgtcacagcttgccaggagtaaagaataaaataaaaaagaaagaaagaaactgtggtaagtcaagatgtacctctgctacccctgacacagcaagaccaacccttcctcctccaatacatttatgatgatccccttttacttaacgagttgtaaaaccctaaagtaatccctcaaataacaaaacaaagagttataattaatacattaacagagggccaggcgtggtggctcacacctgtaatcccagcactttgggaggcccaggtgggcagattgcttgagaccaggagtttaagagcagcctgggcaacagagt

SEQ ID NO: 220290 - DNA, 472 bp, Homo Sapiens
ttaatataaacatatcagaaaagtcagcaagcgtaatcccaaggaaggatttctgacaaagagcctttagataaaaacatatttatcaaaaaacaaatttttcagtcaagggcctttagacactgtatcattttctttccttataacagatattcagactacttcttggaagggccccaaatgccttgcctaagaacaatggacaaaagtcgcagtctcctaattccattagtcagaaaacattgtggtttcagaagtttttgcttatagggcattttgtagcggtatcctggacaggggttgacatggaaacctgtgtttctccaatagggtttccatggcaattctatagattttctcatttgttaatagcaatagccttggtcttgataactaatataatagacctgagattaaaaaggtgaatcactctacttggatggggttcccttgtcagggtcagaataatata

SEQ ID NO: 220291 - DNA, 550 bp, Homo Sapiens
  misc_feature (542)..(542): n is a, c, g, or t
tacaataggcttattgtacctttgccaagtagttatgtggaaaccatttatttatttattggatctagtttataaccaaacatacagttctttcctaggtataattctaaagtctgcctcatttccttcttttttctcctccccaacacacatatgcttctctgactgtaaagatgaccactttaaggtcatttgaaatcatagacttgaaagagaaaacaacttccctgatgagttctttgcttcagggctgggttccttgttttttatgaacacagtaggatttaatttctgagcagctttttcaacctaatcagaaaaacctgagcttttctgtcactgtataattccaccattactagactttttgtttacaagtggtttccaacaaggaatgactttgtttccatagaacacttgtcagtgtctggagacattttgaattataatgattaggtggtgatgctactggtatgtgtggtatagcctaaagatactattaatatcctacaatgcaaagaataacctcccacagaatgcangaatatca

SEQ ID NO: 220292 - DNA, 678 bp, Homo Sapiens
  misc_feature (9)..(9): n is a, c, g, or t
  misc_feature (666)..(666): n is a, c, g, or t
ggcagatgntagccttaaatattcagctctcattgaaccctaattaaacaccccaatttccagggaaacattttcattttccctttatttttaaaatattctatttattatttctgatataccaattactggtacaatgtttccatgaaaaactatatatgttccaactgtacccattaaaaggcatttgtattggaagaataaatgttatagtaccaataccattgatctcttaagcaacattattttatatatatatatatattcagtttaaaaatgtggaaaaactccctattttttacgacacatcatgtttttcacggcctgttacaatggctaagattccataatcttaaaaatgttaaatatggcaattgtagcattatatactttttatacttactgtctggtattcttgaggaagagtctgctctgcacccaggttacatacttgcctagctcttttcataagttccttgcatttctgcaataatctctgtctattttcatccaattcaatgaaatgttgctctgtaagacggagttgtgaagatgcggccatataatctgattctaatttgttcttctcagagatcactgtagtattttggagaattaaatctactttttgatatgcaaagaagtacaaatctttattaggtttgntaattcggtaac

SEQ ID NO: 220293 - DNA, 539 bp, Homo Sapiens; identical to SEQ ID NO: 59778

SEQ ID NO: 220294 - DNA, 568 bp, Homo Sapiens
tttgtagcaaagaaaaagaacttttatttcttcagtagtttctaatgcagacaaatgtgacaaggcagggagctgagctgaccccaagccgaagggtcccgactcctctcgggagcctggaggagtcccggtagcgaatagatcagatgcctcatcctcgttcaccccaaaaggctgagaccctggtgtgtcctcctcgaggaccctccctgtttctgggtgctagaggccgttgctgtttctgtgacagagggatggctttgggagctccacagtacctgaccgaggtttgttgaggaacttcggggcacgacgcaatagccgctgggcctccttgaaggtttcgttcaactctttcttccactgcacaaactctggatcactctcacattgcaagacaaattgtttccctccttttattctgaacaaaatgcattttttgtctttaatttgagtttcttccacagagagaatctgttccattgtcagtaaattttgccgggactctccctctcctctccattcaagtctatttggaaagaggtaaaaatagcgacgctgccactga

SEQ ID NO: 220295 - DNA, 529 bp, Homo Sapiens
gagacgagtctcgctctgtcgccaggctggagtgcaattgtgcaatctcggctcactgcaacctccactccagcctggtgaaagagcaaggttccgtccaaaataataataataataaaataaaatattctaaaagtatgacgtcaagatggccttaaaaaaaaaagctttatggaaaactgtgacaggccatatacaaatgtgaggtattcatcacccaaagatgccatttgctgagcaactactaagcgctaggcacgtgctggatgctttgcctaaatcagtatgtcaccaccacaagaggccttccctgactaccctgttaaagtaaatccactcctctccccactcgctagttattctctcacgttccctgttttttccttcttactactccttgtaatttatgatgtttttgtgtgctttttcaatcctcttccaccagacagactattagcttgccatgaacaggagtcatgtgggtgagctgatggcagtctatccatactaagcacagtggcttgtatcc

SEQ ID NO: 220296 - DNA, 529 bp, Homo Sapiens
aatttgtctaagtttttattttaacaagacatataaacagtactttcataccattctttaactggaagtgaagtaattaaaaatcatgtgggtgaaaaaacatggaccctgggttgaaaaataacccccaacacaactcactgctttaacaccctaaagggtagcagaaaggctactgattttacctatcaaagaaaattggaaagataaggctaaatcttgagactattaataaataaaatcttaatgcatacttcataaaacttccaattactggcagcctattttcccacctttggcctgggaaatatttccagaggaattcttcagccaagaatccatccttgagccccttacacaggtgaaaggcatgcattcatgtttggcaggatattataaataatatagttgccttgttaaaaaataaataaggaaatactgattaaaatgtcaattcagcaaagcaagtctgccttctgtatcttggaataatttaaggctcaaatcttctgaatgcctttctggactg

SEQ ID NO: 220297 - DNA, 587 bp, Homo Sapiens; identical to SEQ ID NO: 49162

SEQ ID NO: 220298 - DNA, 748 bp, Homo Sapiens
ttattaataaaagtgactgttgactgagttgtagacataatatgtttgaggtacctggcctagtaagcaccatacaagtgctattatttctaaatgattttatcaagataaaagacaccagccgggcatagtggctgccgcctgtaatccctttgggaggtcgaggcaggaggatctcttgagatcgtaggttggagaccgacctgggcaacatggcgagtccccatctatgcaaaaaatttaaaaattagctgggcatggtggtgcacacgtgtagtcctagctcctcaggaggccaaggcaggacaatcccttgagtccgggaggtcaaggctgcagtgtgctgtgatcgcgccactgcactccagcctgggcgacacaaggagaccctggatctaaaagtaaaaatgaaaaaaaaaaagaaatgaagcagcagggcgtgatgactcacctttaatcccaaagctttgggagggaagatgggaggactgcttgagctcaggagttccagaccagcctggtaacgtggtgagaccctatctctattaaaaagatgtcaagatgggtgggcgcggaggctcacgcctgtaatccccagcacttgtgggaggcccagggcagccagatcatgacggtcaggaggtcggcgatcatcccgggtaacactggtgaaaaccccactcttactaaagggtgtacacaacaaatcgggcggcggtggtggggggacagtgtgggcccgctaccc

SEQ ID NO: 220299 - DNA, 844 bp, Homo Sapiens
aattatctgcagaacaaattgtaaacccaaggaatagctggtaaatcaaaattataaagtgagttagagttccttggagttggttgtatgacggaatatgacttggacaatctttaccagaagccatccgtaagcccctcagtcacactttccatgtagctgaccagtgactacaggatgtggctgacagtgctcactgaaaggagagttggtgcgggactggtggttctgagcacatagacgcctattagtccttctggtcagtgaacgaaaattctagacctacagttactggctacttgcatttgtcagtttagagaaaaggtaaaatgaggcattttcaattgtagaatagactaacatttaccacagaagtgcttcagcattctaaatggattagatcactcattaagctatttttatatgccaatttactaatgccttacatcaatccactaataggttgttgggcccgcagtagagtccctatgcagtcccaattctgttttctgtaaccatgtgactggtgatgcagagtgataaccatgtctgctatcttgtactagactcttcatgctgatcggatctgcattgaaataaacatgttggaagaacaatggctcgattatgatgactgtacacacatatttaagagcaataggtccgggtgtctggaaaacttattgtaacgttatatgggatggactgatttatgttgtcatatatctgctcgtttgaatatgtgggtaacacctgggcccgattttttccaggtataccttcttacctttcgtgccttcaactggtttgcacacacacaaacacacaaacaaaacacaccata

SEQ ID NO: 220300 - DNA, 812 bp, Homo Sapiens
aacccagtccattaaaagaaaatactctaaaatcttgccaaatacatgtaaatggaagtcacagtgatcatccagaaattaactgccacaaagttgtaagggatattctattagagcagtcactacagagccacaagaaactcaaactaactaaaatgagggcaaaaaagaagaaaaagaaaaaaaagaaattgaaagatgttttgaatgaaaacttacagagaaagcgtgaaggtcttcattctcttgcattcaagtcttacaaacctgagatccagaataagttattgatcatcaaaaaaaaagcaaaacacaagaagcacaaatctggaaaaaaatccgtctctaaaaaagcaatcacaaagaagaggaaaactgtcataaagtcacctactgtaccagagtttcagcttatttgcactaatcttgatgaactcagggaattaatcacaaaaatcgagaatgaactcaaagatctggaaaacagtagaaaaaaatcgggaaaatggtatcatcggaggcagctgtaaaagaattacatagttacattggatcacgtcttttaaatgaatggctgccatgggaaccaaagttaatgaaggctttccaaagaaacaggagcgctgaagaaagactatgatgatttcagaagacaactgatcatgatcctttcatcagagaactatggacactgatgaggtggagagggatctgggaagatctctagggggaccaccgagcttttggatcacagaacctggtgtctgggcaagatcttgtccatgaatcaagtgcggcaaaattccagggga

SEQ ID NO: 220301 - DNA, 841 bp, Homo Sapiens; identical to SEQ ID NO: 40813

SEQ ID NO: 220302 - DNA, 883 bp, Homo Sapiens
tcacttcccagacctcccaagctcaaatgatcctccctcctcagcctcccgagcagctgggaccacaggcgcatgccaccatacccagatgattttttaattttttgtagagacaggcccagactggtcttgaactcctgggctctagcagtcctcccacctcggtctcccagaatgttggaattacaggcaggagccaccgcgtcccacttgttttccattttctgtcattttaggggctaggggctaggggctagaggaagcagaggtgaacgtcatcatgcatctttttctaactgtcttcttgctcacccctttcagaaaagcattgagctggccgggcgtagtaggtcacgcctgtgatcccagcacttgggaggctgaggtgggtggatcacctgaggttgggagttcaaggaccagcctggccaaaatggagaaaccccatctctactaaaaaaatacaagattagccaggtgtgttagcaggtgcctgtgatcccagctgctcgggagactgaggcaggagaatcacctgaaccctggaggcggagcttggagtgagccgagattgtgccattgtactccagcctgggcaacaagagcgagactccatctcagacaaaaggacagagatcaagagaggcatgagctcttaggaacgtgacgtgcatcccccagctaacacttctgttaccacttcagcatcaccttcctcccactccaccagtccttactccagacaggctgcagctggtgacagaaagaccggcagccgctaagaacggtgaggccccgggccagatggggcacccgcgggctgccacccgggcaaacacctaaatagggccccgggcctggaaaaacccactgcgcgcaggcc

SEQ ID NO: 220303 - DNA, 887 bp, Homo Sapiens; identical to SEQ ID NO: 55869

SEQ ID NO: 220304 - DNA, 672 bp, Homo Sapiens; identical to SEQ ID NO: 46691

SEQ ID NO: 220305 - DNA, 650 bp, Homo Sapiens; identical to SEQ ID NO: 51973

SEQ ID NO: 220306 - DNA, 735 bp, Homo Sapiens; identical to SEQ ID NO: 50131
  misc_feature (559)..(559): n is a, c, g, or t

SEQ ID NO: 220307 - DNA, 880 bp, Homo Sapiens
actccaagccccacccaaggagcaaccccaacttggacccctgactacccgctcaggcttttctgcccagcaggtggctacccaggctactgctaagactcgtacttcccagtttggtgtgggcagctttcagactccatcctccttcagctccatgtccctccctggtgccccaactgcatcgcctggtgctgctgcctaccctagtctcaccaatcgtggatctaactttgctcctgagactggacagactgcaggacaattccagacacggacagcagagggtgtgggtgtctggccacagtggcagggccagcagcctcatcatcgttcaagttctagtgagcaacatgttcaacaaccgccagcacagcaacctggccagcctgaggtcttccaggagatgctgtccatgctgggagatcagagcaacagctacaacaatgaagaattccctgatctaactatgtttccccccttttcagaatagaactatgggggtgaggataaggggtgggggagaaaaaatcactgtaggtttaaaaagcaaatctttctgtaaacagaataaaagttcctctcccttcccttccctcagccctgacatgtacccgctttcccttctggctgttcccctgatctgttgctctctaaggtaacatttatagaagaaatggatgaatctcaagggtttaggactgtctgaaaattgaggctggtgaagttaaacaccttccttatgtctctgacctgaaatgtatagggtgaatgggcgagatcaagagggggttaaagaactgaatccatggtggctgggagaaggtgtgatgggaaaaattggaaaggggaaaggaatgtccatttgggccacaaatgtgga

SEQ ID NO: 220308 - DNA, 536 bp, Homo Sapiens
gtatgctaaaatcctagtcactggtgaactttttggaccaagaacctagctaactgtttcatactggattttatttccatttcatgaaacgtttacctcactttttaactcagaggtattttttattttccttcacatgttttctgttactgcctaagtctttttgctggcaaggacaaatcaaagcctgaccttacttagctatcttggttagaattcaaggccaattccttttcaataattccatcctcaacatctctcctgttttcatactttcacctaaactcagtacttattaccttacatgggacagtgtatattaaaggtcctagtaaaatacctggaatataatagtgattcaatccaattaacaaactgatatatgttcaataaactagtcaaattttcaaaatcaacttttttcaaggacaaagaatttggaaatgttatatatctaaggaatttatgaggctatatctaataaattcttcaccagatactcaattcttctacatgctggactttctaaatatctt

SEQ ID NO: 220309 - DNA, 449 bp, Homo Sapiens
ttttcaaggaattttctattttaataaaagctgaatatagacctacataaaattttaaagccctgagacagtcaatgacaaatgaagttttagtagctaagaaaatacagcatcgttccacattatgtgtctctttaacgcctacgcctacctttcgttcatttagtgagctgaagaaaaaaatgttcaaacccttatatgcatttccttaagttcctagaataccggaatactgacacatatgattgcactatttcctatccgtcgaagatgattctgaatttcactaaaaaccgcaaaggaaaccaatagtcacaaaataattctgataaccccaccaaagaggaaataaagagaggaagttactctaaaagtctgatagggcaaaagtgactgcagcagaagggcctcaaggttcagtccatgaggaccttgattaaccttcatct

SEQ ID NO: 220310 - DNA, 510 bp, Homo Sapiens
tggaaagaagcgggtcttgcaaagtagctttgttacttgtaacagacgtatacatagaacctttgtacaacctagagtgactttttccaaagactgttacctatttcaaggtagaatcgttggaacttactgaacaacagtggaaaagacaactacacagcctcattgaggggagatgggtactgtatacttactggtaactggacacgggtaaaaggacaaggtctgtcatctctttagggacctgttttatatgccccaaccctgtccccatcttattgtttttttttgaatgtacttaaaaaaggaacaacaaaaaactagggttgtagaattataaaactgcttcaaccttagaaccttaagtaggaggccctcaaatggacttacgttagtccttagggagtcaatgtgtgtgttgctgcttatttaaatacagttcagttggagccccgagagtgccaatgttttccccacacctcttggatgccttcctcttcccaaatccca

SEQ ID NO: 220311 - DNA, 562 bp, Homo Sapiens; identical to SEQ ID NO: 51993

SEQ ID NO: 220312 - DNA, 518 bp, Homo Sapiens
ttttttttttttttttaagaaatgagaattatttaattttttaacagttaaaaaacttagtgaacaggaaaaaaaaagaaaatccatgttataatattctttccccctctatctagatttgcatgaggtatcatcggttgtcaagataatgccaaaatgaggactttttcaaaagacttccataactgtcaggcaagaaaaattctgagtgtgggaggaacggagggctaaaaatgaaatctgatgtctttccctggaaggtttggattaaagtctcacttctctatctcagagccccaaaataattgtgttttgcccaaagtaaagccgagctcggagtctcaattttcagagaagttggcacctatttgtaggagaaattgggtcgacccaaaacaaaaatcagtcctattttacttggagcagccctccttttgctcatggataaaattaaaatttacatgaccttggaacttagtcgcttcttttatattgtaacaaggtatcttgaaaacaat

SEQ ID NO: 220313 - DNA, 541 bp, Homo Sapiens
tttccaaaataagacatttattaaagcagaaaaaccaggcttctcctgccttttatccttgaaccgagccagggctttgaggggctggttgcccgcagcgtcgactccccaggtgctggtaaacccgggagccagcgtttaccgagggtcagggttgtcggggcgccagcctttgtgtgcacccgggaggctgctgttaagggagaccgtcttccgggccacttcgctgtctacaaggcgtgtgctttcacccacggggctcagcgatggctgcgtttgtttacagtctctggcaaagctgtttgccacccagacggagaagaagttgtgcctgttcttgtcccagctgtttctgagtctaaaggtttctggagtggactttctgggtttcgggtccagtccacacgggaaatggaaatctggccagctgagagagggctccgtgtggccgcctttcaacagtaaacagtgactcaccgctccgtccccaccctccctgctctccgcgaatggaagatgcctttccccgctatttattttt

SEQ ID NO: 220314 - DNA, 555 bp, Homo Sapiens
taataagtattattttatgtatattttaccacagtcgaaaattcccaaattatccaaacacaatcagtaattaaatgcctaccatatgtatggcattgggccaaaagataaacgtgtgtttacagtacccacatggctttgttctccatttcccacagatgtaggcaaatgtgtaattaactaacatcatgcctcctatagggccacatgtcacttccaatatcaggaaaatgacctgttctgaagtgctcatccattttccaggcccaaccagaccccaaaatacatcgtttatgcagaggacttggaacacattcaaaacagtacatactttattttcaagcatacaagaaacactaaactcttccagtgccagtacactctccatgaattcttcatatagaattgggtatattggaagcaagttgtttctggtgaaatttctgatgatcaggaatcaagactcagtagccctaaaggaagagagttttgtatccaatatcctcaaaaccaagacatagtatattttactttcaaagtaaactataaacattt

SEQ ID NO: 220315 - DNA, 418 bp, Homo Sapiens
gcggccgccaccagccggaatagcaaccggcggagcccgtgcgcaccgcagcgcagcgcagcggccggggggtgcgggcgccctcgccgcccggctacctaccgccgcctgggcgccgccgctgcctcccttccccgcttctaccctccagcagacgcccgccggagcgacccctcccagggtgaccgggggaaggtgttccacgtggccatagcgtttgcgtcacaatgacctggcggacaggtgggagccacagcgtacaccccaggattccctctgtgctgtgcgtagtgcctactgcttgcttccaggttaaatttctgtagctttagaggacaggagacttcatgacttcactgccaagaaaagttacagaggcctgctgtacctggaaatcaagtttgagcttcgagaataa

SEQ ID NO: 220316 - DNA, 554 bp, Homo Sapiens
cagaaaacatttgagatgctcatttgatataaacatctaattccaagagagaccagtgctcaaatatagttttttcagctaccatttgatacggccataaatttggatggtccatgttacaatccttccacaattctccacttaaagacatcatttttctatgtttttaatgactattgccatctaacaattctacaattcgcctctttgcctgtaaaaaggccaactctacgtccacctgtgtctcatattgctatcttttatttatctctgcttaagattgcaaaagtttttgattttattattcacctgaacaatgtattgcaattccaatacacccccatctcttgctgttatctacagcttgtgacaaaatgaacaccttgtagaaatatcctactggttgggtttcccaagtctatgacactatgagagaagcattgctgatggattgacgaggagaccaccagatcattaaaggattagatactctgaaggcaggaaactagaaaatcccattgatgaaagggatatttaatctagcgtaaaatgtt

SEQ ID NO: 220317 - DNA, 530 bp, Homo Sapiens; identical to SEQ ID NO: 59775

SEQ ID NO: 220318 - DNA, 477 bp, Homo Sapiens
tttaaatttcaaaagaggccacattcctatgacacttggccaagaaatgtaggaaattaaaaagtccttattaaaatgtctcctgccagatggaaaggagacttgattcaattaggccttttgcatctttggaagtggggaggggatgaaataaagacacctttccgtcctgtgcaataactactttgtccttttgttgtcaatattcttgtattgggattagtctctctgtggggcaaaacaacctctgaaactggccttacattttgttaaaattatcctcaggttggcacaaaagagcattatctccaaggccagtaaggtagtaactcctggaagcaataggcggaaagcagaggtttctctccttcatgccaaggtcatggtcactccaaaggtgagggatgaaacagtaaatatataatacagaaatatccctattctctttaaatgaggaaaacaaagaaaagtaagtat

SEQ ID NO: 220319 - DNA, 565 bp, Homo Sapiens
tggccgatggtctatttagaaggaggtcagcagatagaaatagacagaaaaaactattttaaaaattcctggatgaagtagatagcaacagcattctgcttcctggcctgtgggagtgagtatgtcacataaacctgaactgtcaaatatgtactatcccctctcaatttgtaggtaaggggatggcttcattaaccgagtaaggacatcagtgccctgccgctatttttgatagatagatggggagggcgaaggtattgcttctcttttctgaggaaggaagagaggcacagaacaaataggacaatgctagaatccgtcttacccaatgcatgaagagaatgaggccagacccaaagcaaggcagtgacacacagggcttagagcaggagaagaaatggagaaacaaaaagtagaaaggagaaaaaagggaaaaagaaccttcatgatcttgcttgagctcctagatccaaccatacctgcaactatccccacagatccatttcctctattagctgtgaaagttgaaattggtctctgagctttgtcactaaagctggcctat

SEQ ID NO: 220320 - DNA, 520 bp, Homo Sapiens
acaatggatattctgtaaaatatcctgtccaaaacaagactattgccagtaatgtatacaaattgtctttttgtgtacttccagcataggtttggatatatgaacatttttcttttattgttttatcttcacagaaaataaaaggtgttaatttgctttttaaaacaaatttaattatcacattttaaattactttgtggactgtgttttcaaaactttgcaaattcatctgttacacagaaaattttgacttaaaacatctgctgaattccaaatttctgtaatagctactgtatctgtgataaactttcctatatctttccttgccatttctatggattttataatgaaagaaaaaggcactggagactgaaggcagaaatggttgtgacagtgctgtttggctttttcattcttcaaatgccaagtcatccactttgttttcctgtttaggctttgcacaaatacaattgctttcaggaatcctaaagcagcattttattgagtttgaattattaaa

SEQ ID NO: 220321 - DNA, 549 bp, Homo Sapiens
taaatatcataaaacatctttttaatgtgaacactacttcatacaatgaaaaactatttacaatgtattgtttccagattggctgcttttacatcatctctacccatgtgctgactcggcatgtatcttcagccagggagcttcagtccaattgcacattctcctcgatggctctccaaggaccccggggattcagggaacccgtccacttacattctctttagtaattatggctcagcaagcatgccaccaaaatcatctagaacccagagactctggcaaccccatataagtaaaaatgtgtagatcaggtttttttctccaataaataataatttgacaatccaatccatttccatcttaagaaattgttttcacttaggaaaatgtttctcagtggagctagagtgaataatctttcttcatactggaactgagttagaatgtctttgtatacaaatatagcatattttggccagcaatataattgcctgttaaagagtttatttgccttcacacgcaggattgctacatacattcacagtttta

SEQ ID NO: 220322 - DNA, 555 bp, Homo Sapiens
tttttacctccaattgatacagccatttctatagtacagagattcaccaaattttcttctttttgaagagcttcatcctaaaaaatactctgcattttcatgatcttttcaatagtttcaagcttacattttttttttaattcactgctcccagtttaaattaaactttaaggattatttttatattccaaaaagtaaagaacacaagtcacaaaatgtagaacatttagtacttttaggttactggggaaactttgtgcactggaaggaaaactaaacgtgggtatatgtttatgaatgcaccgggaagttgaactaatttgtgagaaccaataccatgtttgtaaagcaaaaaacagagacattggttagtaaagcaataaacttggatactgagaactgcttttgtttcaacaggtgaaataaagtcaagcaaatgcttcaaattttgttgtgagaatacctatgacctgatcacattaaattctcaaatgtaaaataattgcagaaattcactcttctttctaataagaagaatcagattttagtttgctt

SEQ ID NO: 220323 - DNA, 553 bp, Homo Sapiens; identical to SEQ ID NO: 61443
  misc_feature (529)..(529): n is a, c, g, or t

SEQ ID NO: 220324 - DNA, 524 bp, Homo Sapiens
atgtttaattgtttattagtgtgtaccagttgtacaagaaaattgattttgggtggtatatgggtttcagtcattctgaagtacaatcatctctgtatcttcctttaaaattgccaaaattgtgcttttactccagctgaaccctggggttttgggtaaagtcattcactgtgattataccatcagggccaattacttcctgttccatgtagtttagcatcctgctgacatgtgatgcagagatctccccatccactttggcaatatacgtgtagagaaactggaaggtgctgaacgggatccggggcgacccaccattatggtcacatgataagacctcacacactatcttgagagttttggtaatagtaactcccagagcgctgcaagcaagggctaaaaacttcagccactcgatctcctccgtgaagcgacccacattcatcacactattaaacagatctgttgggagattcaccactttccacatctgggccagctcctctgcacggatgatcagtctg

SEQ ID NO: 220325 - DNA, 517 bp, Homo Sapiens
cttttttctatgtattttttaatgttacaatagttattgccatgagtattaagggaaaagtgtttttatacatttactgatggaaataaaaactgttccggccacttttggaaacaatctgtcaatatttatttaaaaatttaaatatacatactcctcaatgcagcaatcctactccagggaatctattccgcagacgtaaaaccatcatggtgacaaacatatacacaggaatgtttattgtaataataaaaaggaaataagagctatgatagacttagagaaattctcatcctacattgttaaatgagaaatgtgagatgcagagaacgtacatgatcccatttatttaaagcaaactgcccaccaaaatatcttctcattaacgttagactgtatatgtttactgataaatttgagagacctttaaaaatttgtaaggtgctcatgatacacattatattagaaaaagcaagtgcagtataatatgtagaataaaaccccatatgtaataact

SEQ ID NO: 220326 - DNA, 484 bp, Homo Sapiens
aaaagccggcagaaatttttatttaaagaagtaacattggttattgattggacatatatcattatggtttagggtatgagatacagtgtccaatgtggtattatcagtttaatatacatctacttgtggcaattgtgaacagtttcaagagatgaatacatatttcaaaggaggagaatggtgtaactgcactttcatttcaatgtctgagtttgataaccaaaaggacttgcatttttagataaaaattttctatttcccaaatctcaagacctagatacaaaatgtagagctgcagatttagggcccgaatggctggagtagcagcaggtgttacctgcacatttgtgaacattttaccaagagaaaaaaggggaaagtgaagattctcatgtctgaatgtgtactcaatgaaaacgttactctgattaggtttgtgggccccatggtctctgaatcagtttaaggtctgaagatacaagag

SEQ ID NO: 220327 - DNA, 540 bp, Homo Sapiens
  misc_feature (469)..(469): n is a, c, g, or t
tatttcaagcatgtactttatacaaaataaccagttcatatggaaataaatctacagacctccaaggatcaaaaagctttttaaaaagttcttttaaaaaattatccaacacacaatattgaactaactattgaggtaagtgtcgctctcagtgaaacagggaatcagcagaccacgacaaaatatacacaatataaaaataaatagcattcccctttccagtactggccagaaggttcacatggtttctgcttttgcagcaggagcagaggctccagacactgtgtgccaaggctgctggggactgaccggggccccaggagctacgcacaaggcaggagagtgaggtacctgagccctggctagggaagggaaaggaagggaagggaagggaagggaaggggctgcatggtttcctgaacgggggtcagcatttcaataacttatgcaatatccataccccctgctnccaccccacccacccctgtcaacaacacaagcaaggacaatcaactgctcgtcagccgttctgacgttaga

SEQ ID NO: 220328 - DNA, 347 bp, Homo Sapiens; identical to SEQ ID NO: 54697

SEQ ID NO: 220329 - DNA, 556 bp, Homo Sapiens
tgctctttaagtaaaaaataaggttaaatctttgagaagtccttcttaagcaacaaaacctcagagacacaaaggaaattattaatagatgtaaccacttaaaaataaaaaatgaaacttctctatcataaaaacatgccataaacaaagctaaaagatgatgagctataatggagagaaaatatttgcaaaatataacaaaaatctcatacactaactatataagcaattctaaagaaaaaggtagccaaatagagactagcattaagctgctctaggaatttcacattatattaccatatcttgacgtatgagttttagacgtgtcatgtggcccctcggcctccagtagatatgcccaggcttctcacagcatggtggtctcaaggttccaagaaggtgaggagaaacttcaaggcctcttaaagcttcagctgcagaactcacataatgtcacttcttccatgtattggtcaaaacaagtcaccaggccagcccatgcccaagggtaaagaaatagactccctctctcactaggagaaacagcaaatttccc

SEQ ID NO: 220330 - DNA, 495 bp, Homo Sapiens
atattttatttcgatttattttactttctttgtcttaatttatctcgttctaaattgatacagacgacccaaataaaactttaaaatagggggtggggaagggaatgagtccgggagcaagatcctaagaggtgcgagtttaccaggccggtgtggccgcatcccggccgctctcggagcctgaccacgccacgcccggggcttcctccgagcctctctttccgctctctgcgccgccgccggcagcctggaaccttctccgctggtgcggatatcgctgggttcccggcagcactggcatgtgaggcggtggcgctaagggacgtcctggtttctatagggcctggaatctccgccgaggccggcgagggagaggaaacggccggtcaatcccttccagcttggcccaacttcttactggacttggagggagggggagctggtgaggaggaagccgagggtcgtggaggctctacttggccctcctttcccttc

SEQ ID NO: 220331 - DNA, 556 bp, Homo Sapiens
cctggggctgttgacctattctgaggattgttcagggtatgcattgagtttcctttcttcactaccaacgcaggatttttatcctctctactaattaattcttctaagaaataatatataaaagaacaaaaaaggggtgaaagttcagttagccacacggctggctgctttttaggagtctggatgctggctgaaaatactgggcaaaaagagacttctgcattcaggcaggctccggaggatatttcaattatgtgcattccactgtcctgtcctggccgagttaactgcatatgtcaggaaaaagagaataatcccccaacccccatctgtctcataagagaacccctttttcctttgaagctaaaacacaccacacagctccagcaatggggagccatctgtggtgtcaaccgaggtggccacagtccctgaatggccacggatgtctgcctgggagtcagcccgacccattaacatcctcgatccttctggcttcagtgtttaggaaccatagtgcttcaggctcaatctttcactctctgcagtcacacac

SEQ ID NO: 220332 - DNA, 558 bp, Homo Sapiens
gtatgacataattttcaggtgcttaaccttacttcccaattaggctgagagcaaactggtgaacaagattcagaccttattcttctgttatgtcctcatgatcctgggatccacaggaaatgctttaaaaagaattcggttaatttgtaccatctacacattgatttcacccatgttcatgtccttaaaatatcatcatacttgtcatcaagtatgactgttaccgaaatggtgctgttacccaatgaccaagaaggggtatgttttccatttcttcccttttgtaaaatgccaaaaaagaaaccaaatagtaaaagcactgagattaaaggaggagaatgggaggtaaacaactacttttgtgctaaaagtgtcctatggcatttatatatattttttccgcaattaatcctattcccaactcttcaccaaggatagtactgtgtcatggttactataccctgggctgacatttagtcaggaggcaacagttgaaccagttgtttccagctagtatccattttgactcggtctctatattatactacttgttaaata

SEQ ID NO: 220333 - DNA, 569 bp, Homo Sapiens; identical to SEQ ID NO: 59139
  misc_feature (556)..(556): n is a, c, g, or t

SEQ ID NO: 220334 - DNA, 575 bp, Homo Sapiens; identical to SEQ ID NO: 60206

SEQ ID NO: 220335 - DNA, 968 bp, Homo Sapiens; identical to SEQ ID NO: 44412

SEQ ID NO: 220336 - DNA, 976 bp, Homo Sapiens
ctactttatgggcagcagctcagttgagttagagtctggaagacctcggaagacctcctgtcctatcaggccctccccatggctttagctgacttgtatgaagaaggaggtggaggaggaggagaaggtgaagacaatgctgactcaaaggggggattataaaactaatcatcaaagccaagaaggcaagagcaagcatgtaccgctgaaaacacaagataactgcataagtaatgactttcagtgcagattcatagctaacccataaactgctggggcaaaaatcatctggaaggctctgaacctcagaaaggattcacaagacgatctgccgaccctctgggagaaaatccagcaagatgcaagccttcagaatctgggatgttaaccagaagaccttctatctgaggaacaaccaactagttgccggatacttgcaaggaccaaatgtcaatttagaagaaaagatagatgtggtacccattgagcctcatgctctgttcttgggaatccatggagggaagatgtgcctgtcctgtgtcaagtctggtgatgagaccagactccagctggaggcagttaacatcactgacctgagcgagaacagaaagcaggacaagcgcttcgccttcatccgctcagacagtggccccacaccagtttgtgaggtctgcgctgcccggtttggttcctctgcacagcgatggaagttgaacagccgtcagctcacaatatgctgacgaagggtcatggtcaccaaattctatttccagggggcgagtgtcattggccgccggctgttcccttttggtgggggtgcggggcgggggcccggccggtccggttggggtcgggccctgggggggcccaggggcaacgggcggtgcctttggagggccgggcgagtttttggtggagccgtttttcgtttgagaccggcggcggcccacgggggcgcgccgcggggttgccgctg

SEQ ID NO: 220337 - DNA, 788 bp, Homo Sapiens
  misc_feature (538)..(538): n is a, c, g, or t
atccgctcccgttgctaccggaatgcctcttcaggttagcgattacagctggcagcagacgaagactgcggtctttctgtctctgcccctcaaaggcgtgtgcgtcagagacacggacgtgttctgcacggaaaactatctgaaggtcaactttcctccatttttatttgaggcatttctttatgctcccatagacgatgagagcagcaaagcaaagattgggaatgacaccattgtcttcaccttgtataaaaaagaagcggccatgtgggagaccctttctgtgacgggtgttgacaaagagatgatgcaaagaattagagaaaaatctattttacaagcacaagagagagcaaaagaagctacagaagcaaaagctgcagcaaagcgggaagatcaaaaatacgcactaagtgtcatgatgaagattgacgacgaagagaggacaaacaaatagaagatatgaaagaaaatgaacggataaaagccactaaagcattggaagcctggaaagaatatcaaagaaaagctgaggagncaaaaaaaaatccgagagaagagaactcttgtcgacagaaaagcacttcacgaaggccgacaacaccaataaatataagagtcttactagaaatgtggcttctagaaatctgctccacggggcaactccgcaactttttactggcagtacaggaacacgatccggtcccccggggggggttaatcaacttcccccggtttccaagtttcggatacatgcgcagggggggtcccgtggcctcgctgttgct

SEQ ID NO: 220338 - DNA, 630 bp, Homo Sapiens; identical to SEQ ID NO: 53132

SEQ ID NO: 220339 - DNA, 398 bp, Homo Sapiens
  misc_feature (324)..(324): n is a, c, g, or t
  misc_feature (383)..(383): n is a, c, g, or t
  misc_feature (393)..(393): n is a, c, g, or t
gagacgagggtctcactctatcacccaggctggagtgcagtggtgcgaacacagcttaccacagcctcagactctgggcctcaagcgatccttccatttcagcttcccaaacagctgggactacaggtgcacaccattatgtctagccatttatttatttatttgtttatttattttttattgttttggagagacaggagtctcaatattttgctcaggctggttgcaaacctctgggctcaagtgatccacccacctaggtctcccaaaatgctgagattacagtattttgagtcacaacacccggcctgctaacaacttttnaagcctttccctttccctgacccccttgtggccttgcatttggggcaagctcatgttgnaagtttgggnggttc

SEQ ID NO: 220340 - DNA, 404 bp, Homo Sapiens
  misc_feature (78)..(78): n is a, c, g, or t
  misc_feature (92)..(92): n is a, c, g, or t
  misc_feature (120)..(120): n is a, c, g, or t
  misc_feature (205)..(205): n is a, c, g, or t
  misc_feature (227)..(227): n is a, c, g, or t
  misc_feature (235)..(235): n is a, c, g, or t
  misc_feature (266)..(266): n is a, c, g, or t
  misc_feature (317)..(317): n is a, c, g, or t
  misc_feature (336)..(336): n is a, c, g, or t
  misc_feature (365)..(365): n is a, c, g, or t
gaggttaagaacaggggatctaaggtcacacagccagggtttaattccaccattgctgcttaagagctgcatgatgtnggaaaaggtacttnacctcctgaacctcagtttcctcaactntaaagtgggttttctaacctcctaaccttccgaggtggtcatgaggatgaaacgagtgtgtctaaagccctgtgcctgagccctnggatgtagaagtactcaatgangcagagtngaaatcttatcatgagcactgttaatccatnaaagttagggattgttcctgattgctagagttgtaattatagtaagttctngtttggatcagagtcaagngttggtaagtctattggcccacaggctanaatccagcccacattcagtttttttttaagtaagctttt

SEQ ID NO: 220341 - DNA, 415 bp, Homo Sapiens
  misc_feature (3)..(4): n is a, c, g, or t
  misc_feature (238)..(238): n is a, c, g, or t
  misc_feature (251)..(251): n is a, c, g, or t
  misc_feature (255)..(255): n is a, c, g, or t
  misc_feature (291)..(291): n is a, c, g, or t
  misc_feature (298)..(298): n is a, c, g, or t
  misc_feature (325)..(325): n is a, c, g, or t
  misc_feature (332)..(332): n is a, c, g, or t
  misc_feature (361)..(361): n is a, c, g, or t
  misc_feature (384)..(384): n is a, c, g, or t
  misc_feature (392)..(392): n is a, c, g, or t
  misc_feature (412)..(412): n is a, c, g, or t
atnnatactttgccaaaaaaaaccctctctgcagtgagtggccacagtatcaatgcttctcccagtgggcagcgttgggcacgtgctgccacccactcatgaagatagcatggaagacagcctggagcccttgaccaagaacaacactaaccagaagggcagtgtacagctggtgccacgtgtcatatgctgaaacaacacgcacaaaaccctgggtagcttcatcatcccagaaaantaacggcaacgantgantgggtgggatctaggaacatcaaagattgaggtgantacggantcactggcaactcagggccactgcggncagggtntaggataactgcttgaaagggtgcaagtnccgggggacagccagccaggggncacagggngcttggggtacgagggtttncac

SEQ ID NO: 220342 - DNA, 430 bp, Homo Sapiens
  misc_feature (5)..(5): n is a, c, g, or t
  misc_feature (74)..(74): n is a, c, g, or t
  misc_feature (312)..(312): n is a, c, g, or t
  misc_feature (397)..(397): n is a, c, g, or t
  misc_feature (411)..(411): n is a, c, g, or t
  misc_feature (419)..(419): n is a, c, g, or t
atctntcctcaggtttatttgtacaaatagcacaggaggaccccagccccatgcagatggtagcccaggggcgngggtggggggtcgcaccagtccttctgtcctcatgttggcagagatatctactctgaagcctttgtaggggcctgggtacgtttgggagcctgagctggaactgaagctggggctgcagcctggggccttggtttgatccttggccttggctttggctttggcttttggccggcacagcctgagccccttggcaatacgggcacgagcacgcttcccaagcttgggggtggggcaatntagggcaagtcgatccgagctttgcggctgacaccctttggggatctttggggcttaaacctccttggggctttaacgaaggggntttgataagcctcnggaacgtngcactcatggg

SEQ ID NO: 220343 - DNA, 405 bp, Homo Sapiens
  misc_feature (100)..(100): n is a, c, g, or t
aatgacatttcaccacattgcccaggctggtctcaaactcctcccactcaagtgatcctcctgccttggcctttcaaagtgctgggattatgggcgtgantgcccagccaacaagtctttatttaaatgagagatataaaaagtcccaatttgccccatgtttccacatgcttttcttcttcatcctctcaaaccatactccataaatatttgtaaaaatgatttgattttggtctgtcaccaaggatacactcctcaccctaaggggttatgacaacagggaaatactcatctcatttttgtgatggggctgattagagccaggaaaccttctgatttccttgatctaaatatttttccctcttgtaggcttcaaaaaaaaaaaatggctaggcaaatggcaca

SEQ ID NO: 220344 - DNA, 601 bp, Homo Sapiens
  misc_feature (418)..(418): n is a, c, g, or t
  misc_feature (499)..(499): n is a, c, g, or t
actatattgtccaggctggtcttgaactcctgggctcaagtgatcttcctgccttgacctcccaaagttctgggattccgagtgtgagtcaagtgctagctttcaaaatgatcaatcaattaaccacacaacagcccagataaggaatgaaaaccaacagtggggaccgatggcccaagcttaccatggcgacacccctggcctcctggtaggccaccttgacaacatctgcggtgctggtgttgaggaagaagtaacctgagccttccctgatgcggagctctgcctggatgccagggtggttgtagatggtcacctcttctgggctcaccctcacgtcctccaccaggatgagctctatggaggccgacagaggcaccagagggtcatgcggctgctttgttctggcagagctgangtgggactcctggtagccagtggcagtggcagtgatggctgtggttcctgatgcctcgtgaaccagctgcatggcaactangctcgatgctgccacactggcctgtggactccactggatgctcaaggcttgagttgcgaacgggcggcctctgtccgaagcagcccgttcagccgtggttgg

SEQ ID NO: 220345 - DNA, 397 bp, Homo Sapiens
gagagatgtttgtcatgccaaattaacttgcatgtttgttaaaaaaacaaacacatgttttgaagagaaaccagatctgaacgtgtatttgttgagttttgcaaaataaaattaattttgtaagtaaaaaaaaaaaaaaaaaaaaaaaaaaaaaataaagaaaaaaacaaaaaacaaaaaaaaaaatataaaaagtaaaattacaatataaatagacgaaattaaacaacgtaaaagaatggaaaaaccctagacgaaacccaacttagggggcttgcagaacataattcctttttaaaggtggcgttttaaacaaacaggggccgcatttatcaaacttgccaacaggaaaacaccttgaatgcccaatgtcaaattgtttgcgaaaatatctttt

SEQ ID NO: 220346 - DNA, 383 bp, Homo Sapiens
gtgagggctgccctcccacctccgctgggaggaacctgaacctgggaaccatgaagctggaagcactgctgtgtccgctttcatgaacacagcctgggaccagggcatattaaaggcttttggcagcaaagtgtcaaaaaaaaaaaaaaaaaaaaaaaaaaaaaaaaaaaaaaaaaaaaaaaaaaaaaaaaaaaaaaaaaaaaaaaaaaaaaaaaaaaaaaaaaaaaactcggggggggccccggtccccaattcgccctatagggagccgtattacaattaactggccgtcgtttaacaacgtcgggactggaaaaaccctggggttacccaacttaatcgccttgcagaaaatccccttttcgccagctggcgtaatagcg

SEQ ID NO: 220347 - DNA, 675 bp, Homo Sapiens; identical to SEQ ID NO: 50087
  misc_feature (551)..(551): n is a, c, g, or t

SEQ ID NO: 220348 - DNA, 388 bp, Homo Sapiens
caagggtgtgaggcacgtgagggcatcgccatgcgtattttacaggcctctttctctggactgtccttcaaagggaatgacctttgtctttccaggacctacccagtgagatctgcctgccattttcctatgagtcagttggcagtcactggcttgtggccctatgtaattatctcagccatcacacactggctctttcacaagggctggtcacacgcctcgagtgattcttcagaaatctgttgaacagcctgacacccagccctaggacgctgtgctggggggattccccagctactgagtggggccagagactctactgcctctgtgaccacatccctttccatactggtatctcgtttgttctaatgagtgtgtccattgcttt

SEQ ID NO: 220349 - DNA, 632 bp, Homo Sapiens; identical to SEQ ID NO: 50541

SEQ ID NO: 220350 - DNA, 612 bp, Homo Sapiens; identical to SEQ ID NO: 51848
  misc_feature (556)..(556): n is a, c, g, or t
  misc_feature (559)..(559): n is a, c, g, or t
  misc_feature (561)..(561): n is a, c, g, or t
  misc_feature (566)..(566): n is a, c, g, or t
  misc_feature (590)..(590): n is a, c, g, or t

SEQ ID NO: 220351 - DNA, 613 bp, Homo Sapiens
  misc_feature (441)..(441): n is a, c, g, or t
  misc_feature (444)..(445): n is a, c, g, or t
  misc_feature (452)..(452): n is a, c, g, or t
  misc_feature (474)..(474): n is a, c, g, or t
tttaactcctggccccaagcaatccctgactttatggcacttgctcagcctggtgtgacagtgtctgtctcctggaggccaagagcccctggcatgcagccagcatgccccatttataatcgtagcccagcacatggaagggacccaagagaatgacagcaacgttggctttgccatttcaaccctgaacctcattttactgttctattcatattatctgggggacaaaattttcccacattcctttctgttggtgccaccatctctgtgcctccgtgtgctgctgacctgccaagcccatggccagctcagcactcggattttatttggtctctcggtatgggttcctttatcagcatttcaaaaagcttttgtgttttatccataattgattaaagtttgtagctgtgaataaaagattgattaaaagcaacaacagcnaannatatagnggggggcggggacaaattttgncctaaattgggtttctttaggggggccccgcgccccaattcccccctaaggggggggaataaaaaatccagggcccggttttaccaccggcgggaactgggaaaacctggggggttgcccacttaaaataggttgggag

SEQ ID NO: 220352 - DNA, 654 bp, Homo Sapiens
  misc_feature (624)..(624): n is a, c, g, or t
gttttgtaataattaaacttgtaattatttgacttgaaatatttaatcattttttgggaaagaatggatagattttgttaatgttagcactcttaaaattaagcagtggcttttttccccgtgtctcccatattctccttgtgtttgaaacataaaacaaacactaaacctaagcaaaagttgctgggtttgttttcataattgaggtgagtttttccctcaactattacaataaaagaaaactttttatgattttaatgataatgttttgtggtgggttaaagacctcctaacaacagggggtttttatacaacaacaagaagtttttaaataattgagtttttaaagtggaaagcagcagtaaattaaactagaaggatatattttatacctagaaataaataaagctcaacttgttttgtaagcctgttttaaaaatatttaatcatttaatttgtgcaagtatagagttctcctatggcaaaactataccatcatcttctccaattgtgcatggcagctgtactaagttctgcaaaaacaagacatatggatgtgtttcataccttctcagaattggtatatcaagacacatttaaatataagccttctggaaatggatntatatacagtcaacataaatacccccttag

SEQ ID NO: 220353 - DNA, 777 bp, Homo Sapiens; identical to SEQ ID NO: 52966
  misc_feature (636)..(636): n is a, c, g, or t
  misc_feature (667)..(667): n is a, c, g, or t
  misc_feature (688)..(688): n is a, c, g, or t

SEQ ID NO: 220354 - DNA, 798 bp, Homo Sapiens; identical to SEQ ID NO: 45292
  misc_feature (587)..(587): n is a, c, g, or t

SEQ ID NO: 220355 - DNA, 627 bp, Homo Sapiens
  misc_feature (519)..(519): n is a, c, g, or t
  misc_feature (571)..(571): n is a, c, g, or t
  misc_feature (576)..(576): n is a, c, g, or t
caggcccgagctactcaggagagagggtctgtcgcttttaaaacgcattaaaggctctctcctggccttatttaacttgcctaagctaggtggagcacggctgagctcaggtaagctagcagctttccagcagaaggtgttctcccgaagaacgcagacctggggaagggttgactttttgggggcccctgctgagaacagttcaagagctccctaactgtagaggctgctggaggggcgaggggcagaaccccgggctgaatcatctcccgctttcccgggactttgctttcactttcctcagtcttgtggacagagtcaagtagattttcaaaagtgctccagaaaggccggaatagtcatgtagtggatgaaaagggcagtcacaaaactgcttaagaccagctgtcttgccagtaattgcagtgctttaagatttaattagtcacggctgctacgtgtatctgatgtagttaaccatggcctgtcatgattatattgctataaggaagggaacanaatctttatagtgtccaaagataattaattcttgtttaaatctttgccgcanagcanatatccgactgactggctcttagtctgtgactttgctctccgtgcacatta

SEQ ID NO: 220356 - DNA, 397 bp, Homo Sapiens
gtgaagcacaggtgctgagacttggaagcagggacctatttgggaagagtgagtagctgtaggctgtaatgtcaatattgtgtgtttgcactgtgcggaggaagaaaggaggacattggagatgaggctggagagataggttagagctagattatgaaaggggactgggtatggcaggcagctaaggaatttgagttttattttggtgaacgaggagagcaaataaaggtttctttttggttttctttttatttttatcttggaagatttcatagagaaacctactacctaggagtgaaattgctgggtcctatggtaacttcacatttacctttttgaggaactgccaaactgtttttcatagaggctgcaccattttagaaatatctaaaggcgg

SEQ ID NO: 220357 - DNA, 641 bp, Homo Sapiens; identical to SEQ ID NO: 42981
  misc_feature (541)..(541): n is a, c, g, or t

SEQ ID NO: 220358 - DNA, 614 bp, Homo Sapiens
gtaaaatttagtggcgtgtggttcattcacaaagctgtacaaccaccaccatctagttccaaacattttctttttttctgagatggagtctcactctgtcacccaggttcgagttcagtggtgccatctctgtccactgcaacctccacatcctgggttcaagtgattctcctgcctcagcctctggaggagctggtatcacaggcgtcccccaccacgcctggctaaattttgtatttttaggtgttcttgaactcctgatgtcaggtgattctcctagctccaaatgttttcattatctctcccccaaccggcccctgtcaatctggtttttgtcactatggacttaccaattctgaatatttcccataaacagaatcatacaatatttgatttttttttttttttgaaactaagccttgctctgtctcccaggctggagtgctatggtgcaatttttgttcactgcaacctctgccttccaagatcaagagattctccagtctcagctcccaagtagctgggattacaggcctgtcctaccatgcctggctaatttcttgtagtttagtagggacatgttggccaggctggtggtgagctcctggcctcag

SEQ ID NO: 220359 - DNA, 647 bp, Homo Sapiens
  misc_feature (478)..(478): n is a, c, g, or t
  misc_feature (491)..(491): n is a, c, g, or t
  misc_feature (578)..(578): n is a, c, g, or t
caaatattcagtgggcatctactaggtgaagccactgtgctataattagagactttttactataagcatcaaaaacagataaggctcttcctggcagagtttacagcctggtgtacttgctaatgtctctttaattaggtgaagaattttttttttctatcgaaattactaatcagttggggaaaaaaatactatagcagacagcactaatgtcatcaacaaacattgttcttctccgtgtcctgggtacaacatccaataatatttcttggcctcctttccgcttctcctctctgctgttcctctctacaagaacctggggggccaacgcctaaagatcataatatcacacaatggaaggaacctagattcctaaatgactgcataggacagatcccatctcctccacccaatacattattagactgaactgtgacctgaaatgagcaataaactctgtattaattcactgaaatgnttgggttgccggntatagtagtcggtccatcatgaccagtaaaacataaatcaaaagttaatgtaattggtatcccattatttagagcgaaaaaaatgtngaatatatggactttttcagattggaaatacccatttaaatttaataaattgctaaaaaaaaaaaaaaa

SEQ ID NO: 220360 - DNA, 984 bp, Homo Sapiens; identical to SEQ ID NO: 58249

SEQ ID NO: 220361 - DNA, 777 bp, Homo Sapiens
gatagggtatcttgtctcagccgccagggtatagtgcatcttagctcattgcagttgtgacctcccaggctcaataatcctcccgcctcagcctcctaagtagctgagaccacagctgtgcgccacgacatctagccaattatttgttttttgtagagatgaggtctcactgtgttgcccaggctgggtaggtgtctaactcctaggctcaagtgatcctcccaccccagcctcccaaagtgctgggattacaggcgtgagtcaccgtgcctggctttgtttaaggcattctttttccgcagcatctgttaccagcagcctgaagccatttctataacaatatcaggaagacacatggacagagaccctaatgtatgaaaaatgcatcaattatttgagattaatgagtcctcataaacagagactgagaggctctaactttcctccgctatgtgagagtaggaacggacacgtcctccctgtccttttgtaaggctgttatgtcatctaggctgatgaaattgcaacaatgctttaagacggaggggtgaaaacatcgggcattggcacaatgacgaaccctgagatttagaagaggaacgaggaggcatcagtggcgtgcctactgggacagtcttatttcaccaaatcacggaaagggaaaccctacatgggcgcagtggctcgcgcctgtaatcccagcaccctgggaggctgaggcagggtggatgactcgaggtcaggagtgcgagatcgcctgggccgcatggtgaaacc

SEQ ID NO: 220362 - DNA, 1000 bp, Homo Sapiens
aagtccaagcacttaaggacgagcacaattccatcccgtaatccattagtcacagcctcatcactgacaagcctccactgtgtagagagccagcggtccttgtcatattgcatgggtgagggcccgcactgaggtaccgttctaggaaggccttgggggtcatgccagttggtgatgcagaaggccaggtgctgcaggatgctctccatgctgtggtagtatactgctgccgggtgatgcgcaggtacttctggagagccctggccatggaggggaaaatggcctgggcggcctaccctagggtccatcaccatccagcctggggctttctgctgctcctcagcctggagactgctgaatgtggcatgaaggcacatcttccactgcaaccacacagccttgactttccgaattcatttacatcgccgatgtcaatgtacgagcctcttcataatacaactcgatagatggacttgagatcccatgaggccgagcagctgcagccaatcaatgggaccgggactggcgcaagtggacatagttagctagaggcacatctacagttgtagaacttgcagctcacgggccatatgcttgagatgctcggaatttggaggcagaagaggagagtaggggatcatagaatggggaactcttagaaggacactggactaggagcaaacaaggcagatacaccatggaatacatcaggatatacgaggcagaagaagcggggaatcgcagatcggaggagcaggacacaagacagcgagaccctggggcggagagcagcaggaaccaccagcaggacgaatagccgacgaagaaaaaagaaggccatccagggggaacaggcaagtcgaagccagaaaatcagaaagaaaaacaaaaggaccactgagagcaaggagacgccagaaaaaagaacaaaggaaaagagagaaagaaaacaaagacaaagagacaacgaaaaggaaaaaaacaagcggacaacaagagt

SEQ ID NO: 220363 - DNA, 1000 bp, Homo Sapiens
aaaggttttgcatcatggaacaatccatacccaggcactttattttcattaataatccagcatttttgttcagacaatgtaataacccaaacactgggtattcatatttgacacatgggcaaacttgccagtggaatggaattgtgacctgacagagcaagggaaggcaggctgacgacggtgatcgaatgggagaacagtgctgtggtgatcatgagaatgaggcttttctgtagcatgtaaaccaaaccggacccttggcagtacgtcgtccctcagttctccagatgctattttttgcaggttctaccaagtgcttgttgattaccctagttgtacttatctagggcaagagatgcaatgtcagtgagagtgcagagcactggaggcagggtgacagtgaaatgcaattagaggcagcaagagagtcctagtctgttctcacataaccggacttgaaccgctccagtgcgagcagagtgctgggggtggattccactgccgaaccacggcaagcttcgctttactcattcaagcatgcgcggtgccaaactagctgcacagcaaggttactgcacctggccaagccagcttacagctggtaactccatccgggataccccgggcgccaaatggcctgcgactcgcgtgagtgaagtgtctacattccaggcaacaaagattgagtttttaaagaagtggcccgttgagggaacgcgtgacaacagggagtagttgaagccatgacgcttcctctctactctggcagcagagcgtggcacatagcatacactgtacccctatagaatctcacgagtccatgacaacacggacgacaccaaggcatcacaggggagcagacaccagtgtaaacaataccaaccagcagcagagaccacaggcacagatcaggcacctacaaccacccacaaacgcagagagcaccacacgacacccacagtatgactcaaacacaatgtcgccaaaacaaacacaaaca

SEQ ID NO: 220364 - DNA, 883 bp, Homo Sapiens
agtgcctagagggagaaaatgagttaatatgctttgaagaactgtatccagaaaataaaattacaaaggaggagagggataggattccaggacaatctcaaaactatgctttttcctaaattcatgcaaccttaaaatcctaggccaagttctttaatgtaaattaacaagctaattctagaattcatatgcatattcaaaagtcgaataatgtcaaggctatcctgtagaatggacagagaggatgaaatttctaaatatcaagacctgttataaagccatagaaataatgaaggtgttaatttggcacaaggatgaaaaaactgactagtggaacagcatacagattcaaaagtagacccacgtgtataccatcacctgagtttgagaaaggtgacattgaagtgtagtgggggaaagggtgttctttccagtaaatgtacttgccaataaaatttgtaattgataaaaagttattggaggtggattgcagatctgaatatgaaatgtgaaagctttacaaagaaatcttaggacagttgtaatcttggagtaagcaaaggtttatgagaccaaaaagcattaaccattaaattagaacttaatatttaaattcggagaacttctatttatcaggacagaccaccagtaagaaaaatgacccggaaccatggggggggcgaagattattgcgtcactgtttgtgaacaacagccccggttcagcaacagtgttgggcaacttcattaagcaggcccgatggggaaatttccgcgtggtcaaaaggccacctgggatgggtgagcgtccgacccgcgtttaaaacatggcgtggggtccgaaacagataacccgaggggaaggaggaccaagaagcagcaac

SEQ ID NO: 220365 - DNA, 657 bp, Homo Sapiens
ccatttcatgactgatcattttctagagtatgaagaaatacacacctgggtgtctgcaaggatgtcatcatcttgggtttcatctgagagcatcactcagcatctcacacatagatgttaccatatttttaaatgagctttcctcatccggctccctaagcaagcgctgttggccggtgggagtgactaagtgctccacctgtgggtgtccttcttaatgtgctgctttgttctgtataaattcacaccacctcactcccaaaagtacttcctgtggctcagaaaaatatgttcaataagattttggatagataaatccatacaaaaataaaaagaggtatagttataaaacaagactacagaaaaagttgtggcagaaattgcatgcaggaaaatcccacaccattagtaaaagtaaggtcaactgtaagttcagctcagggcttcctagcagccatgtttagcgaagtgtgattctttttttttaaacaaaaacaagcaaagattgggaagaaaatgctttagacctaactttacaattattataacataagatgttccagggtcctttgaataaatgctgagtttagggaaatgattccaagggaccaagaatgggtagaaataatttcaaggccagagaagactaattttaca

SEQ ID NO: 220366 - DNA, 610 bp, Homo Sapiens
gagttgagaaggattcagaagaaattaggaatttccacatccttgaaagcaggtaatttgcaaggcaatcaaattgtgcagctgggagtctaaaagactgagacaacaagacaacagaactagaaagccacagaaacatgggttcatgatggctgaataatatagagggtgacagatggctacaaaccggtcatagggccatcacactcaggagcatgtctttcttccatgcctccaaaaatggcaaaaagagacatctgagtcaggcagcccgcataggagatgactgctgtgagattggatgtccacaatcatcttggggaccatggtggaggtgaaaccatgtcaggcaaggacaggttggagaggaagaagtacatgggggtgtggaggtgggagtcagggctgacggccaggatgatgagcaggttccccagcaccatgaccaggcacatggacaggaacagcccagcgaggaccggctgtagttctggatcctctgagagattctaggacgaggaatattgagacatctgtagtctagattctgtgggtctgtatagtttggacacctttggcctgagcattggtcctacggggtgtgccggga

SEQ ID NO: 220367 - DNA, 947 bp, Homo Sapiens
  misc_feature (947)..(947): n is a, c, g, or t
ctcctgaatcccttggtcccctaaatagccacccccagtccccgcccctagcccagctgcaggtggagtagcagctgctgtctccattcagcagatgggcagactggagcccaagagtgtggagcccagtctgaggtcacacagcagtctccgtgggttcccagcttggccttcaactggggagggaggacttggcctgggctccgtgcgccctcactgaagggctggctggctgcggccacgtcgcagggagctgccaagtctggtctctgagggcctccagtctctgggccaggtttggaaccccggccccacctctgtagccctggtgatgtcttcgggggcctcgacaggcaggggaggtgcagaaggtaccacctcctcctccgtcaacactctctgccaggactcgggtctgaggtccagtcactgtgactcctctctcttgggcacttggcagagccaggctgcatgggggtgcccagggtgggggccgggcatatgtgcgcctgtcacctgaggcctctgggtccagcacctggggcaggtggtgctcccctggcaggcaggccctagtgtgccagggcactctcacatccagtgcgcggatgtggccagcaggcgcacggagtagagggagtggcagtgcattgcaagggggacgctgtgggccgtcaatgcagggcacaccggtggggtccagggctcaggacccctggctgggtgactggtacgccagagcgagcaggacgacgccttctctagtgacgtggaccctggtggcgccctgatgaagctgctccatctgtgcccgtcttatggctattcgtggaccgggtcatgtcttcctgaggcctgcaatctctagctgactcctgtgcctccgaaggtcccgggcccagagccgggctctagtgagctaagcatacgcaatttacggcggaagn

SEQ ID NO: 220368 - DNA, 653 bp, Homo Sapiens
atttttatgactcaaaatagtgccattccccttaatgaaatagatttgagtctttttttcatgtaacccccaaatgagaatcatctacctgattcttgtaccaaaaaaaaatttttttcagtcttttttttttttaagagagggtctcttgtcaacgcaagactgggagtggcagtggcacgatcttagctcactacaacttctggcctcccaggctcaagcaattctcctgcctcagcctcctgagtagctggggattacaggcatgcaccaccacgcccagctaattttggtatttttagtagagacagggtttcaccattgtttggccaggctggtcccgaactcctgacctcaggtgatccacccacctcggcctcccaaagtgctgggattataggtgcgagccattgcgcccagcctcagttattttatttaacagtgtaagtacttagaaagtaagaaaatggcgtgattagttttttgtttttattttttttttttaaagggtttccccagaatttgtgcaagtttaggccaaagcccaattttcaaagaaacggagataaactctaaagtaggctattaacgctagtgtaatttttaaaacttttataaggggggctggaaagttctgaccttttaaaaggtac

SEQ ID NO: 220369 - DNA, 928 bp, Homo Sapiens; identical to SEQ ID NO: 41267

SEQ ID NO: 220370 - DNA, 584 bp, Homo Sapiens
ttaccagggaagagagtgcacgtggtacgtccagatctgtggtttcaacctcgagactccaaggacgagtagctctgatgctgttggcgccggcgggcagagcgcatcttctcgaaccgggcctccatctcctccagcactcgcggtgtgtaacggacaaccagcttcaccgagccctgggccgccttcagcagctccaccgccttctcatgctgctcaccctcaacgctcacaccgttcaccgacaacagttgatccccacgcttgaggcctccatggcggtcagccacaccccctgggatgacccgggagatgtagatgggcgagttttgctctttgccacccatgatgttgaagcctaggccctcatccgtcttgggtagctccactaccctgggatgtgcgtggccctcgctggctgtgaaggcagccactgtggccttggctgtggcatgggctcggatctcggcgctgccggtgatgtccagcgtgtcataaagctgctcatacacctctcggatagcggagcagaagcggctctgcagaactcgctggagggcctgcagcttctgcggcggcagctc

SEQ ID NO: 220371 - DNA, 875 bp, Homo Sapiens
cggacttttatatcacagagtagtgtattatgaatacttacactttgaccctaaaatattctcaaggtgctcagttacctcaatgtacttaaataccaaaaaaactgcctgtgctgaaatatgtactggctaggcttatctgaagggctaagggtgactaaattcacatccaaagttaaatcacaatgtagtaaataacaggtattctacttcttgctgaattctgtgagaattcaaagagaatgcttgcggttacaaactgctgtgtgaggttgaaatcgtcagccactacacttcgtgggcgctcctttaaaaaccacagcaaaacacaaggatgcaaacagatggctttgaaagaaattcgcgtgaggggaagcaggagaccaaggaggaatgagcctgcagaggggacggtagccgccccctcagctctccacaggagtggtctctggggttcccgggctcacagcaaagtgagaggtgggggtctcgggcgttcccctgagctcccggagggcctgtggctcctttaattccaggaccacccggctcagaaggcctttgagcagctgcatatctcggagcagaaggtccacgtcgggtatcagggctccagccgattgttccaagggcgtcggcggagcgcaggcgggtgaccccgcagccggggcgcccaacgccaaggaactgcagccggggaggtggtgtacaggacggaggtgacaacgggaccgatctggacaccgggggcttctgaaggaagcggctataacaaggagccaagctgcgtgccattggacgggcgtgatgaaagcgggtcagggaaacctggaatgctagccagacaacgcgtacaaaaacggagcaggtcacaa

SEQ ID NO: 220372 - DNA, 801 bp, Homo Sapiens; identical to SEQ ID NO: 54224

SEQ ID NO: 220373 - DNA, 629 bp, Homo Sapiens
tcccaaaatacttcgctagttatataatagactcataagattgttatgaaaaaatcatttcaaaaacattaaatgtttctcgggggttaaaagcatggtaattttgtaagcaaacgaaagtaaaatctagagcaaactgaagcattcactcaaagcaacaagcaataaaacaaacaaattcaccaaagcaattgcatgtatttatcagacatggtgatttcaaaggcctcaaggtaggcaagttagtaatgccatcatctggtaaaaagagcaccagaaggggaatctagaaccctaggattttgtcctggttgtcactgtataactgacactgtataacataataactgtcactgtataacataataagtcacagttaccagttacttcatttgtggaatggaaagctgagcttgacacttctaagagcgcttccaattttgaacgactaagaatttgtattcttgtcaaaattatataaatcatatattaaacatttttttaattctagatttttttaacccatgacaaagagctgctaaaatgttctaagataaaacaaaataacaatgagcctgcctttttgaaacaaaagtctctaagagtaacaatgggaaaatacctgtaca

SEQ ID NO: 220374 - DNA, 606 bp, Homo Sapiens
cgctgaactactgtattttaaatctcgtcaagtaactcctggcagttattaattttattaaaatgattacatatggcaaaacaaagaatagaggtaattctatttctctacaacataaattatgagttagattttcagctgccggctcagcattgttcaagattcttttaaaggactggggggattttaatatccagaaaatgttaaagcagcaaaagaaaaaataaattaaaaagtcattgcaattggagatattaccaaggatgtgcttactataaagtcttcttgacatgttaattataaaatcttccaagcctttggtattaaaaaaaatcatgtgaatagttgtcctatattgccttgtcatctataatttataacatagaagaaatttgctgatttttttaaaaagatggcaaacatgaatcatgactcattcaaataaaatacaaccagcattcattcatttaactgaaatatgtcaaaacaaaaacacttttattaacatatttaataccagaataacttataatagtatgaaaaagagtgaagtatttgtctttagttttcattgacatgctcacatttaggcatttttcggacgcg

SEQ ID NO: 220375 - DNA, 661 bp, Homo Sapiens
tcactgcaggcggctatattatggccaatttttacaaatgagccaatgaaaccagaagatggtgggtttggttgaatcttctctttagtgttctcctggataatatcccagagctgccatataaatttaggatgaagaatgtaaaatggctgatttgggtttctctgacgatgctgaatatatggagtgaacacggttgtaatccggttttttcgtaccacaggttaagatttgcggaatatggggcagggtcccaggccaccaaaatgacgtctttatacagtgaactgtcaatgaagtgatggctggggttggtcagaatctgcgaattaatgatgcgtatggtggttttattcccaacatctttctcataaccacgtgtaggagcagagttaaatctcaaaaccgcatcatgagaatctatttcctcgcccaaggaagagttgaggattgcgcctgcagacatgacgacagcgcagctgcgcaggccgcgggggtgcagctggctcaggggcacggcgggcaccaggcgccgtcagcccagcgcagaaaagggcgcctcggtgccgtccagcgtccgcacgcgcgcgcggctccgcagctggcacagccagctgtgccctgctcagcccggcctcccgtttcccgcggaagtcgcacc

SEQ ID NO: 220376 - DNA, 474 bp, Homo Sapiens
cccccccacaccccccccccgccaccgtgcagattattgaaaatactacagcgacttcagaaaaaatcaaacaggtccccgaggcgttttgaaattcatcccaactgtaggctgagtgacctgaaggttggacagactgccgaagtccaaaagcttcagcatttccttagtgtcaggatctacttcaataatctcctgatccaaggctgagacctcaggaacataattgtctctcctttctctctcctcctcctgcagcttgatggagatacctcttactgggcctctctgaattcgcttcatcagatgcgtgacataacctgctatcttgttgcggagctttttgctggggataatggcgatctcctcgcacacgcgcttgttcgtgtggaagtcgttgcccaggcgcgtgtagtacttttctatgatgacccgggccgccttcttcacggttttggtgcgaacgcggcccat

SEQ ID NO: 220377 - DNA, 439 bp, Homo Sapiens
  misc_feature (51)..(51): n is a, c, g, or t
  misc_feature (342)..(342): n is a, c, g, or t
  misc_feature (358)..(358): n is a, c, g, or t
  misc_feature (394)..(394): n is a, c, g, or t
  misc_feature (420)..(420): n is a, c, g, or t
cgagtagttggagttacctgtgcagcctgcccattcccatgcatgaatgancttaaatttcctgtagttgtgctggatgagtgtagtcagataactgaaccggcctctatccttcccattgcaaggtaacctaaaagattctttccccaggggtaatacctgtaatcctagcactttaggaggctgaggcaggtggattgcttgagtctaggagtttgcgaccagcttggacaacatggcgaatccccatttctacaaaaaatacaaaattagctggggcatgggtagtgtgtgcctaaaatcccagcaacttgggaggctgagggtggggagggattgttntgagcccagggaggtncaaaggctgccagtgagcaggggattgaaccgactngcacttccagcctgggttgacacagngttaaaaccccccttctca

SEQ ID NO: 220378 - DNA, 407 bp, Homo Sapiens
  misc_feature (341)..(341): n is a, c, g, or t
  misc_feature (346)..(346): n is a, c, g, or t
  misc_feature (354)..(354): n is a, c, g, or t
  misc_feature (397)..(397): n is a, c, g, or t
  misc_feature (402)..(402): n is a, c, g, or t
agggataacctgtcatctacatttgaaaattaatgaacaattctcgttacatagataatatttttcagtgacagtcgtatttttttctgtgggagggtgcacatttatattcatgaaattttagtttccagctttgaactggcacccttgttaaaaattctgatttttttttttttttaaactctggggattttacttaacaggttctgaaaggcttggaggctataacattctcacattgggaaattccttactagggaattacttaggtttgaacttaggaatgatggatggaacttttggggacttaaatatactataacttttgtcactagggatcngggantattcggnggtgtggaggtcaggtgagtgggtgttaatcaaggggtctggnaaggncctgg

SEQ ID NO: 220379 - DNA, 540 bp, Homo Sapiens; identical to SEQ ID NO: 60677
  misc_feature (506)..(506): n is a, c, g, or t

SEQ ID NO: 220380 - DNA, 539 bp, Homo Sapiens
ttttatttattatcttctttattaatactcacatgtaacctttgctttttacacaaaagtctactttagaagaatgcctcctcggcttatcatgcccaatggggctttttgtttctggaccacttcccctttctccacccccacccccacatccaaattactcttaacatgttcacagataccacgaatattttgtaaacaagatttgggttactggaacttgatttcattaacatcccacttcaaaatggaaggcaggtggaggacagggtaagaaataggagaaagaggacaagagaaggcaaagaagaagaggggcacctggtcagaacgttcaagtcttgccttttcttaggggtgtgtattttgtggctgttccttgaaatgcactgactcaaaacattgacagcaagtgtgtgtgtgattatttatatatctataatagaatatgtgggcttcctccgtttgagtctggactgtgtttatttaaacacactacgatcctctttataggtatcaccacagggaatcaggtctcc

SEQ ID NO: 220381 - DNA, 428 bp, Homo Sapiens
ttgtgattcttattattattttttattatggccaatgttacctaatgattaaggtccacaaagaagatacagggtagtacattctgagtacatattgggggattctgattttgttagataactgatttatttgcaaatgatgacattctctccatcaaaataatcctgataccaacgtgatgctttggtgctaatggctagttataaggtgccttcttccaaacagcagcttaaaagaatattaaaatgcaagagctataggtgccaaattgtattttaaagtatcccttgcagagtgggttaaaaccatttccccaatttaatatcatttggtttctaagggaacatcacacaaatttcttgtatctgccatactaaaatgcatgctgttggtaatagtttgtaagtaagtgagaatactgtataga

SEQ ID NO: 220382 - DNA, 508 bp, Homo Sapiens
tttcctgaccgtactcctcaaaatccagattgtttgtgcatacatttaaaaaaaaaaaaatcaatggaaatttccacctttgttcgaacacataaagtatgccatgagcaatataacatcacaaacgtactgtgacaaaccattaataaagaaggattactaagccaggtgtggtggtgcatgcctgtagcccagctatgcaggaggctgaggcaggaggatcacttgagcccgggagtttgagtccaccctgggtaacacaccaagactccatctctaaaaaattaaattaaaggattactgaaagatctcatttctaaaaaaagaaaaagaaaaagatcactgaagtcagacatgatattttaattttgtattttgaaaagtcagtatataaataagaaaaaattattttagaaattatgtgaaaatccactcttgggtggagtaaatgcaatggtttgccagcactggctctgagccaactgtgcacatcctttctgaactctaa

SEQ ID NO: 220383 - DNA, 474 bp, Homo Sapiens
gggctgtagtggtttatttatggtcttctataaaaggtcaccatagggagaagtgggagtaacagggaactctcaaggcaacggaaatgtaaatcttaacatcttgtctatttcaggtgatattcttgccctttacaatacagcactgaagccaggacatgcagctgcattttcagaagattgtgattcagcctctactaaagttgtcatccgtggagcaggaaaccaggtaaattgcttaccaaacacccctcttcctacaatattgtttaatgggaagaggttgcaaattcagggaactcttttgctgcaatttacactccccaatcatttcatcccaaaactcaagcctgcttttctgtagacttcttcatggacttgacagcctaattgttcttgaacatctggtttattatgtcaacatctaggttcctattctaacttggaatttcaaatatttattttctaatctga

SEQ ID NO: 220384 - DNA, 463 bp, Homo Sapiens
caaggttaagcaaataatttattctattaactagagatttacatattgtgatctagcaacattacctcaccagatccttatagataagctttgttgtttccagatatgggctaatcacatcctcatattgacaaagggctccaccaaggcaaagatgtttgaaaagacaaaacaggaactcttctctatctggttggctgaatatttcatatttttctgagtcttccactagcaaaacctaatatgatccattgtccagaagaatctgaaagtaacttcaaattgggaataacatttgggtctttgaaaaaagccataacgaaatcatccttccgataggactgaaaggtctggtcaaagccgaacgcctgcgccttgattctgcccagcatggaccactggcggagccggctggtgatctccttagagctcagagactggaaggttttctgaggcaagaacc

SEQ ID NO: 220385 - DNA, 498 bp, Homo Sapiens
  misc_feature (310)..(310): n is a, c, g, or t
aagactttgttatggtttatttatttatttatttattttttaaacaaagctcaaattctcctgacttcacgcctgttactacagctggagggaaaccgatttcagaatctatctgatatgtcggatttctttgtggcatccacttcatcgctcagcagccagccatgatgtcataagcccatcagatttccggtagggggaaaacgctgcccccgggttgctgaagggtgcctcggtcacggggccgcgtctccacaggctcaacagctgcgagtccccgggactgccgacctcagccttggggatccgncttgaccacccccggattcggaggcgcccgggccggaccacctgtgctggtctccacctcctcggcaaccccgggtcaccggagatgctgcagctcgagggtcccgcctgcaccatccatggctctcgagatccttcagagcgcggacccggccgagaccccgcggagccgctgcgcgtggctggtgc

SEQ ID NO: 220386 - DNA, 576 bp, Homo Sapiens
taattactcagaacaagctgttgttgctgtttatcaagggagagcagatacatcagtgtcttctgacagaaaaagtgatcgccatcaggatggtgatgaccacgatgatccctaggatgacgagcaggatgcggttctggatgattcttcgcaacatccctgtcagaatcctggagctttttcccaaattagcatctgtttcccgaagtctttcacgtgctcgctgtatcttttctctgtcatgactaaggttttccaacatctcctgaccaatttgctcggtttccactgctatttggtatccagcctctagtctccgagatgacctttccagcctctctgtgttatcgagcagatgtgccctctggttctctgaggaattcccatcatcccccaggagctcattccgtacttcgtcactgtaggcgatccgtgaccttttaaaatctgtttcgagttttcccatttcttgtttgtagcttctcattctgttgctgacatccatcgactctgagggggtgtctctcggacttccatatcgatctgtgaatgcgattctctcttctcttcatgctg

SEQ ID NO: 220387 - DNA, 548 bp, Homo Sapiens
atgatttaaagattttaatacataattaaaaatcaacaattattacatagttatataacattgatactgttagatatgtggatgtatatatttttctttccagtaaaatagtttcatgcttataaaagtcaccctaggtcaacttgggacaaagaaaacaatgtacagtagaaataaaccaagtattaaatagaatatataggtaaggaaaaaatattataaagcagttacatttttgacacacacacacacacaaataaatacacttttctattatttgaaggcaattcacaatcatttccaggaattccgtgagaatttaaggccatttgttctaaagaaatgctttaatttagacacaacttcacaaaactgtaattcttgtaaaaactgtacatgcaaaaaccctttacaattattcgtggacaggcaggtcagtatataggagtaggttatttcacaaatgtgttgtgcactaagtcacatagttgtatatatttaactgggaatttcacaaaagacttccagcctgtgcaccttgtgtggca

SEQ ID NO: 220388 - DNA, 462 bp, Homo Sapiens
tgctcacaagataattataaaatttattaaaaggtaggaacttacagtgctccacaggcacagtggcctggtaatagagtacaggtttaaggatatacaaggagggtctttgatcccatcagccagtggagccgacataatgtataaccttctttagagataatgttgaaagcctaaattggagaccctggccaaacggctcttctggcctctttcccagtgatgacaggctgtcctgctgcttctacacacagtaggtactcattgtttgctgaatcatgggaacaaatacagctttccaagttggttactgaaaatccacatacagtaagtattcccaagaaacactgcagtccagaacaatggggcaggaagccacctcctcctccagtgaccccaaccctgagtccagctgaaggctgcaacaggaagcccctcagccactgtccttccactccctct

SEQ ID NO: 220389 - DNA, 644 bp, Homo Sapiens
  misc_feature (529)..(529): n is a, c, g, or t
  misc_feature (599)..(599): n is a, c, g, or t
tatctgtaacactgtttattgatcaaacgaaggacttgctgctatctaaaatttcataaacaccattaaaaattcaaaattgatattatactgaaccttaaattttcaatagttcaaagagacagtttttacatgtatagcacacaatagatgaaacttaatagcagacatctctagaataccaatgacaagtccaccaagatgcatacaaaattacagataagcatttctttcactgtttttgttgtgcagggaaaaacatttatagaagaaatagaaactcagctggtgaatttcagatatcatcatcatcttcttcatcctgagaagatcccgcctgattagatgcactggctgaggcagcagcaagctgggcttgttgggcagcttgctgcatttgaagccattcctgttgggccaattctgcttgttgctgtctagcttttgcaaataattcttgttgctgtctcaataactcttcttcaggaatgccaaggttttccaaacgagaactggcctttcttctttntaatgctactgttttacactcttgcaagacttcttttacttcactgatgtaagagccaaatcccaaactntctagtgcttgtatgacatggctctgggtgagatgggtctctttt

SEQ ID NO: 220390 - DNA, 681 bp, Homo Sapiens; identical to SEQ ID NO: 59553
  misc_feature (571)..(571): n is a, c, g, or t

SEQ ID NO: 220391 - DNA, 512 bp, Homo Sapiens; identical to SEQ ID NO: 60883

SEQ ID NO: 220392 - DNA, 383 bp, Homo Sapiens
aaacatgaataacaaaacaactgctttctgttatgacatgggttcagttcaatttgataccttctaaccgtgctctagaggccagtgctgcctgttgggctgggccctgcctggggccaagggcggcacctaccttccttctggctgcctgcagcgctctgctgctgcagcaggctctggctgtacagagtgggcagcgcggcggctgcgtactggttgaattcctgagtaggcctgggtgagggcgtccatggtgccagccgtgccattcgtcaagcctgtggcgccaagtcctccattcagagccgccatacctgagagcatttgagcaactttacaaaaaacccaacaatagagaagagaaacagcacttattcattagt

SEQ ID NO: 220393 - DNA, 1000 bp, Homo Sapiens
gcggcctcgctccttcagctgggcactcgctttctgcaaggcctgctggaaactgcaggaggaatccaggtaccagacacgcggcatagcggcttggttcacctgagaggctggtgtggggcctgggctgccaggaacctcattttcctggggcctcacctgagtgggggcctcatctacctaaggactcgtttgcctgaagcttcacctgcctgaggactcacctgcctgggacggtcacctgttgcagcttcacctgcctggggattcacctacctgggtcctcactttcctggggcctcacctgctggagtcttcggtggccaggtatgtcccttacctgggatttcacatgctggcttccaggagcgtcccctgcggaagcctggcctgctggggatgtctcctggggactttgcctactggggacctcggctgttggggactttacctgctgggacctgctcccagagaccttccacactgaatctcacctgctaggagcctcacctgctggggacctcaccctggaggcactgggccctgggaactggcacccatgggcccacccatgagtgatggttctggctgatttgtttgtgatgttgttagccgcctgtgaggggtgcagagagataatcaccgcaccgtttccagatgtaatactgcaaagaaaaccaatgatgaggccgggtgcggtggctcacacctgtaatcccagcactttgggaggccgaggcaggcggatcacaaggtcaggagatcgagaccatcctggccaatatggtgaaacccgtctctattaaaaaatacaaaaattagtggggcgtggtctcaggctcctgcagtcccagctacttgggaggctgaggcaggagaatggtgtgaacctgtgaggtggagcttgcagtgagccaagatcgcgccattgcactccaacctggacgacagagcaagactccatctcaaaaaaataaaataaaggccatatgtttaatca

SEQ ID NO: 220394 - DNA, 1000 bp, Homo Sapiens
agagctcatcaaggcaattggtttgaggcaaaaaggagttgtgtcgagctcacagcgtttctatcaacttacaaaacttcttgataacttgcatgatcttgtcaaacagcttcatctgtactgcttgaatacatttatccagtcccgggcactgagtgttgaatttccagaaatgatgtctgaagttattgctgcacaattacccaagatattggcagggatggtgaaaccccttctctttcataaaaagtgaatgtcatctttttcttttaaagaattaaattttgtggcatgtctttttgttttggtcaggattatgaggtcttgagtttttataatgttcttctgaaagccttacatttataacatcatagtgtgtaaatttaaaagaaaaattgtgaggttctaattattttcttttataaagtataattagaatgtttaactgttttgtttacccatattttcttgaagaatttacaagattgaaaaagtactaaaattgttaaagtaaactatatcttatccatattatttcataccatgtaggtgaggatttttaacttttgcatctaacaaatcatcgacttaagagaaaaaatcttacatgtaataacacaaagctattatatgttatttctaggtaactccctttgtgtcaattatatttccaaaaatgaacctttaaaatggtatgcaaaattttgtctatatatatttgtgtgaggaggaaattcataactttcctcagattttcaaaagtatttttaatgcaaaaaatgtagaaagagtttaaaaccactaaaatagattgatgttcttcaaactaggcaaaacaactcatatgttaagaccattttccagattggaaacacaaatctcttaggaagttaataagtagattcatatcattatacaaatagtattgtgggttttgtaggtttttaaaataaccttttttggggagagaattgtcctctaatgaggtattgcgagtggc

SEQ ID NO: 220395 - DNA, 1000 bp, Homo Sapiens
gcaaaatccagaatagagtgaggtctataggaccaatgtctcgggtttccaacaaaacaaatacgtgacaggcaaaaaacaagaggaggggccaggcgaggtggctcatgcctgtaatcccagcactttgggaggccaaggcgggcggataacctgaggtcaggggttccagaccagcctggccaacatggtgaaaccccatctctactaaaaatacagaaattatccaggcatggtggcgggcttctgtaattccagctacttgggaggctgaggcaggagaattgcttgaacctgggaggcagtttgcagtgagctgagatcacgccactgcactccacctgggcaacaagaacgaaactccgtatctaaaaaaaacaaaaaccaaaaagcaaaaaaaaaaccaaggggagaggagaactgttacagatgaagcaatataggagacatattaaccaagtacaatgctggacttcgtttgaatcagattcaaataaaccacttgtaaaaagacatttaagagataatttttaaaaataaaataaaagccaaaaatattaattcttccaatgcatgaaaaaaagagagcaactcggggaaatttgaatgctgactgtgtgtatttgatgatatttgggaattactgttaatttttttgttgtgataatggtagttatgttttaaaaaaagagactttatctcttggagatagctcttaaagatataaatgtttatggctgaaatgttatggcatcttggatttgctttaaaataacccagcttgctgcaggaggtgggtattgtgtgtgtgggaaggtggggaggctgcgggaggaagagatgacccaagattaggcagatgttgttaactgtggaagcagggtggtgagtgggggctcatgacattatgctctctactttgtgtacgtgtgaacatttccgtaataaaagatgccttcagaaacaaaaaaaaaaaaaaaaaagaaaaaaaaaaaaaaaa

SEQ ID NO: 220396 - DNA, 1000 bp, Homo Sapiens
tttgctcaggacaacaacccagatgcacagacactccagaaattggcagaaaggacaggcttgagcagacgtgtgatacaggtgtggtttcagaattgtagagcacgccacaagaaacacgtcagtcctaatcactcatcctccaccccagtcacagcagtcccaccctccaggctgtctccacccatgttagaagaaatggcttattctgcctacgtgccccaagatggaacgatgttaactgcgctgcatagttatatggatgctcattcaccaacaactcttggactccagcccttgttaccccattcaatgacacaactgccaataagtcatacctaattcttttttcagggatagacttgattaaggatataaatttgtcatttattatgtataaaataccattgaaaagatattactgttaattttttatttaacacctaaagcatttccaacatcactttgctgcccaggtatgtatctatagttggcctgcaagacacttttattaattcttcattttttgtaaaacttatgtttacaagaagaaaacaaatcaaaacattttttgtattgtctggaaatagttcactctagtgtgtatctgttaatttatttgtcatcaaaagagcactttgcctaaaagaaaggactgacaagtgtgcaaaatgtttacaatcttttgtgaaattgtagtttatcattagtttgtatctgtaagttattgtaataaatattacctgtattttttgttatatacaactttatactttgaagcttgtatctgtgaatttgcaactgaaatttattttgccaatgttttctgaatgaactgaataaagcttctgttgtagcatgccatgcaaacacattattgtgtttgtggttgatgaattatggctgtaaataacactatagtttaataagcccaccattctgagtttattaaacattttccattcttgtgaaaatttcaaaaaaaaaaaaaaaaaaaaaa

SEQ ID NO: 220397 - DNA, 1000 bp, Homo Sapiens
tgctgggtctccctttccatggcaaatgggcagctccatcctcttgactcttctaaatgcccaaaagaggtgtcatgctttgggggtacgatgtttatactccgtaaagaacatacaaggacattcactgctgatttttttttttgtttgtttgagacagggtctcactctgtcgctcaggctggagtgcagtgatgcaatcttggctcactgcaacctccgcctctcaggttcaagtggttctcctgcctcagcctcccaagtagctgggattacaggcacctaccaccagggccagctaatttttgtatgtttagtagaaacggggtttcaccatgttggccaggctgttctcgaactcctgacctcaggtgatctgcccgcctcggtctcccaaagtgctgggattacaggcatgagccactgcacctgacctgctgaattgtttataatggcaagaaataggaaaccccccaatgtctgttgaacagctatcacgttgaaccacgtgaaactgctgttttctaggccaaaaatggtgagcgatcatttatttcatgattcaacctgatacatttacatagtgcaaaactgtgtcacagtttcaggcttttatgaggaaagcgtttctgtgtagaaactggaagctgttcagggcatcggcagctgaaccctgctccgttggtcagcgttactatcatctcggatcatatggagctcatgtcagccgtgtgggtggcgggtgcacagagacggtctggaaggaaacacgcggatctgaacagcagtaatcctgggggatacgggggttgggctagattacagagggctcattttctacgtcatgtattttatgatacttgaattttttgaaatgggcatttattttataacatgttaaaatgtactttttaaattaagtcattttgtaatatttgaatttttacatttgttgtacaatcaggaaaagcaataaagatttttcaaaaatagaaaaaaa

SEQ ID NO: 220398 - DNA, 1000 bp, Homo Sapiens
gcgctaccagagaatgaatgggagatacaactttaaaatccagtccaacaacttcagctaccaggtgttctacgaataggaggcgcaggctgacaggaaggtcgccgtgagtcaagctgcctccagaacctcagagcttccctggtgggctcccccgggatccccagtgtctctctgcacctccacccatccctcggttcttaactcttcaagccttaacggaggtctgctctgacgggtgggctctgccagagcccgggtgagcccagaaaggaagacagcagccaccgtctgtcccgaagaggcaggccgtcctgtaggtcctagaggagccacagcccaggggcagatgaaggggctgcggaagacgggggcagtcctgggggtgctgcggctacaccaccacccgcgcggcccccgcagcctagacctcccaggcctgtgaccctccacaccagccctcagaaccctcctgggcttgccctcccttggcgtccgtcaccctttggcaaatatagaatatttcacattctcagagagacccgaccgcgctcttgatgctctttcgaaaataggtcagtcttagaaatacactgctaatgttatttttagtggatgtttatgctgtttgacttttctcctgtgtaccaaggtattgcttttatttacacgacagcgactcaaaaggcactcgattaatgtgacaaccttttcaataagcagaaataacgtaggtacacatcactctttacatttttctaagcattttcacagccgtttcttcatataatccgaccacagtgggaggtgtgatttacccattacacaatgagaaaccagaggagccgatgagttacttaattgaggtcacagaatgaattagcaagaaaatggttctaaaatctaagtattttagtctagaattttctccattacatcatcctaagagataatgctctgtacttcatttgaaataaactggaattgtattagatagctc

SEQ ID NO: 220399 - DNA, 1000 bp, Homo Sapiens
tcagaccctcctcttcacaatgttcctctccacatacctggtcaccatcattggaaatgccctcattatcctggccatcatcacggactctcacctccacacacccatgtacttctttctcttcaacctctcactcgttgacaccctattatcctccaccaccgtccccaagatgctagcgaacatccaggctcagagcagagccatcccctttgtgggctgcctcacccagatgtatgccttccacctgttcgggaccatggacagctttctcctggcagtaatggccatcgaccgcttcgtggccattgtccacccacagcgttacttggttctcatgtgctcccctgtctgtgggctgctgctgggagcatcatggatgatcaccaacctccagtctctcatacacacctgcctcatggctcaactgaccttctgcgccggctctgaaatctcccacttcttctgtgacctcatgcccctgctgaagctctccggctcagacacgcacaccaacgagctggtgatctttgcttttggcattgtcgtgggcaccagcccattctcctgcatccttctctcgtacatccgcattttctggacagtctttaagatcccttctactcggggcaagtggaaagccttctccacctgtggcttacacctcactgtggtgtcactgtcctatgggaccatctttgctgtgtacttacagcccacatcccccagctcctcccagaaggacaaggcagccgccctaatgtgtggggtgttcatccccatgctcaacccctttatctacagcatacggaacaaggatatgaaggcagccctggggaagctcatcggcaaagtggccgtcccctgtcctaggccagaacagttattggatgtttatcatgttccaggatcactgttggctgctagggacacagagatgcatcccatcccctaccctggaggagttcagagtctagctgggaacagagacatggaataa

SEQ ID NO: 220400 - DNA, 387 bp, Homo Sapiens
atgagtgagggtggaggccaagtctcatgcatttttgcagcccccacaagactgtgcaggtggccggccctcattgaatgcggggttaatttaactcagcctctgtgtgagtggatgattcaggttgccagagacagaaccctcagcttagcatgggaagtagcttccctgttgaccctgagttcatctgaggttggcttggaaggtgtgggcaccatttggcccagttcttacagctctgaagagagcagcaggaatggggctgagcagggaagacaactttccattgaaggcccctttcagggccagaactgtccctcccaccctgcagctgccctgcctctgcccatgaggggtgagagtcaggcgacctcatgccaagtgtag

SEQ ID NO: 220401 - DNA, 1000 bp, Homo Sapiens
tgagacagagtctcacttgatcacccaggctagagtgcagtggcgtgatcttgactcactgcaacttctgccacccaggttcaagcaattctcctgcctcagcctcccaagtagctgggattacaggcgcctgccaccacacctggctaatttttgtatttttagtagagacgggatttcatcatcttggccaggctggtcttgaactcctgacctcgtgatccgcctgcctcagcctcccaaagtgctgggattataggtgtgagccaccgcgcccggcctgcctttttttttttttttgttaacctagtgaaagtatgctttggcataatgcattaaagccttgcactactgaatcatagcagagtttataagagtagaagatacatgaggttctattcttaggggcataggccttccagtgactgtttcttttctttctttcttttttttttgagatggagtctcgctctgtcgccaggactggagtgcagtgacacgatcccggctcactgcaacctccacctcccaggttcaagcaattctccttcctcagcctcccgagtagctgggactacaggcgcgtgccatgacacccagctaattttttatttttaatagagatggggttgaaacccccatgttggccaggctggtctcaaactcctgacctcaggtgttctgccctcctcggcctcccaaagtgctgggattacaggcatgagccaccatgcccggcccagtgactgtttcataaggggtcaagttacattttccactgagaggggaatctgattgccatcaaggccaatggtaatactgttagccaaggcaatccagtcaattcacttaactttgccagtttcagttccaagatgccatttgtcctttcaacctttccagaagactaaaggtgatagcaacaatggtaatgccattgtgtttgtaacactttattttattgctttataactttccgagtaaaattggtatctctgtc

SEQ ID NO: 220402 - DNA, 1000 bp, Homo Sapiens
ccgtgagccaataaacctctgttccttgtaaatgagtcagcctcaggtattctcttgtagcagcacaaatggaggcagacacttccttcaccaatctcatgggaggcccactcctgtgagctgcctctagttccccaggccacagactccatcagggctcacctggagccgtccctgtctcacctggaagctctcccactcctctggccagcctgggcatctccacccaatatgagtgatggcgactgattcccttactttagcaagctgggaataaggaatgtttgcctgttcttattcaggggtctctgcatctccacacttgcacaggttgtgtgtacatacattttcctgtctttctggtaagcccctggggtggagctctgggccacagggcaggaaaactcagtgttgctaggaactgccagacattttcccggagtgagtgcagcatttacattcccaccagaagtgtgccaggttcttgtcatactgcgtcctcgccagcgcttggtgctgtcagtcttcttagtttccatttagagattcagtgtttaaattttgaacgtcttgggtgaacaccttggtttgagaaaagtaagaaaaagggtctgtctggctatgggccatggagacccagggcagtgctccacgtgccaaccctggggcagggagcccaagctaggactgtgactgtctgggctgtgggcatctgaccatctccagtgtccccgtctttgatttccctggcgatggtgctagcttagtttgtgcgcatcggcatttgtgggagaaatgaaggattaatacattttgttttatgtcagactctctcagtgagaagttctcagggacaataatagcagggggtcctgctgaagaaaaactgggagatggctgagctctggtccatctttcattgattcattcatttcttcattcattcaaccatgtattgaatgcttatagccaatgaaaataaagtacacagtatatttta

SEQ ID NO: 220403 - DNA, 731 bp, Homo Sapiens
ggctggaggaaagggaactgaacgcggttctgggagcagcaagcccacgggtagcagccgaggccccagaatgagtacaaggaatgcttctccctgtatgacaagcagcagagggggaagataaaagccaccgacctcatggtggccatgaggtgcctgggggccagcccgacgccaggggaggtgcagcggcacctgcagacccacgggatagacggaaatggagagctggatttctccacttttctgaccattatgcacatgcaaataaaacaagaagacccaaagaaagaaattcttctagccatgttgatggtggacaaggagaagaaaggttacgtcatggcgtccgacctgcggtcaaaactcacgagtctgggggagaagctcacccacaaggaagtggatgatctcttcagggaagcagatatcgaacccaatggcaaagtgaagtatgatgaatttatccacaagatcacccttcctggacgggactattgaaggaggagaatgggagagcctcccctgggcctgaaaacttggagcaattaattttttttaaaaagtgttcttttcacttgggagagatggcaaacacagtggcaagacaacattacccaactatagaagagaggctaactagcaacaataatagatgatttcagccatggtatgagtagatctttaataaaagatttgtattgattttattaaaaaaaaaaaaaaaaaaa

SEQ ID NO: 220404 - DNA, 1000 bp, Homo Sapiens
tctctcttgcacgggccttgccaaggcccaggagggacttgggcagtatgttcatgtggtcatatgtttttgtaaaaaattgtgaaagtaagatatgtttgtattgtttttcttaaagaggaacctcgtataagcttcaagcctcacaaaccttctagcctctgcccttggggatttgcttcattaatttcaggcaagtgaggtcaatgtaagaagggaaagggagaagatatttgaagaaccagaatgtaaattcatgtgtttccacttctcagatatagtcagagaattattcatttgcccaaaaggacttaagtggttgtggtcatccatcattgtatttatcaagacaaagccaactttgttataagattgcatttttttcttttcaaattgctttagtttttcttagggagctatgagggggaaaaatcactaacatgaaaggcaaaaaatggactatgattcctgtggggaaacaatttcattctctccatcgtgaaaataagtgaataagagtgaagcaaaattacacctttatgagaaaccataaaattgtttttatttttcaggccagacatagcttcctaatgaaagaaaatggaaatgtaattcgacgactcctcaaaggggactttagaggacttcatacaaagctgggcattaagaaaaccacaatgcatggccgggcgtggtggcttacacctgtaatcccagcactttgggaggccgaggtgggtggatcacccgaggtcaggagttcgagaccagcctggccaacatggtgaaaccccatcactactaaaaatatgtaaattagtcgggcgtggtgtcacgtgcctgtaatcctagctgctcgggaggctgaggcaggagaatcacttgaacttgggaggtggaggttgcagtaagctgagattgtgccactgcactctagcctgagcaacaagagcaaaactcagtctcaaaaaaaaaaaaaaaaaaaaaaaaaaaaaaaaaa

SEQ ID NO: 220405 - DNA, 1000 bp, Homo Sapiens; identical to SEQ ID NO: 115525

SEQ ID NO: 220406 - DNA, 1000 bp, Homo Sapiens
tgcaccagaggtctcatatgttaccccagggagttctcagaggattgggttggcctctaacatgttccttgttaattcttgttctgtaacatgcattcaagaagctaggggaaaaatatctcatgcacttaaataatggtcttcaatttaatttaaaaatattttgacaatatttaatttgtgcttatgtggtgtttggtgtgagtgcagatattgcactgtgtcacctctggatctctgctcagaagcagaacaagtgatgacctaaatgtcaaaatcactgctcgttttcatttggtgaacttcaaactctgttctttttggtcacctgtggaatgaatgcaagcatgattttggcaggaacatttgtacatattctgccgtagataatgtggttctgatggttgttgtgtattttcagtatcactggatccctcagtcttcaccgttttataaacgtataagattaggatgaacttttgaatttacttggtaggaaaaaaagtaggacattattgccatattgtatgtcttaatatttaacttattcggaaatatattccacactgttacatacattttccatggtagaaaggaagttcagtcagtcctgtggaatgaaaccatctcctaaaattcagcatttgcagcattctaaaagcctgtgtaggtacaaggacattgattttgtattcagaattcaagttaactatcttttaaattcgtggttgatgtaagtaataaaaaacattcttaaagttgagggttataagagagattatttctgtggtctaaaggttaaaaagccaacaacctgttaccaattatttcagctttttttgttttaataagtgtgacaacttaaaacttgtttctatttaaagtgaaatgtatctttcaactgtttagttacccagctgtttaatattccagtcttcccaaagtgaaaagatttgtatacaaatgttttctatgatttaataaaaatatatggcacacc

SEQ ID NO: 220407 - DNA, 1000 bp, Homo Sapiens
gggtgcctacagccagctcaaagtggtcttagagaagctgagcaaggacactcactgggtacctgttagttgggtcaggtaactttatcccagaacatccaagctggacgggaccttgaagatcatctagtccagactccctcattttaccatcaaggaatctcaagcgcagagagggagagaattctccacaaattccatcatcgagaagagtataagtgggaagtcttgtttgttgttggtttttgtctgttgtttttcactgcacctctttggatcatgatttgaaaggggcatatcagaaaacaacacatttcatttattaaagtatcacaggcaagctgaccctgattctttgtaccaaagttaagtagccactgtcttttgtgggtggtagtggttaatttatacagtactgattcgcagaatgtttaagctttttaaacatagtgacgcttagtagtttttttggaagctaacttgttttatccaaggggattttacatgtaactgaagttcccctgtcttcaagcactaaaacgttgatcttaaccttttttttgaagtgcttgcctggtaatagaaaacgggttctctgcctattttaaaatagtgaatatacgtaaattttctctggaaggctgaggcacacttcaccatcaacatgaattactgtactatcctgtactgcagtggtgccttcagggactcgaggaatgtaaggttgcctttcccctttctaaataccctcagattcctaacatcgagcccatgctttgtttgatttgttctattccatccattgtcccttttgttactgacagttgccttggtcctagccagtccctgccatgagatcataggggttcccattgtgctagatcttgggaaaccagatgactctccctgtcaaaactatggctacgtcactgtaaaccatttctgtcaagaataaaagtatgtagacccagagtgtgggcctaaaaaaaaaaaaaaaaaa

SEQ ID NO: 220408 - DNA, 1000 bp, Homo Sapiens; identical to SEQ ID NO: 115775

SEQ ID NO: 220409 - DNA, 1000 bp, Homo Sapiens; identical to SEQ ID NO: 115826

SEQ ID NO: 220410 - DNA, 1000 bp, Homo Sapiens
tagacctgtgtgtagatatttcaaaaggctgtgtctacttggaacggatgcatttcattcacagggatctggcagctagaaattgccttgtttccgtgaaagactataccagtccacggatagtgaagattggagactttggactcgccagagacatctataaaaatgattactatagaaagagaggggaaggcctgctcccagttcggtggatggctccagaaagtttgatggatggaatcttcactactcaatctgatgtatggtcttttggaattctgatttgggagattttaactcttggtcatcagccttatccagctcattccaaccttgatgtgttaaactatgtgcaaacaggagggagactggagccaccaagaaattgtcctgatgatctgtggaatttaatgacccagtgctgggctcaagaacccgaccaaagacctacttttcatagaattcaggaccaacttcagttattcagaaattttttcttaaatagcatttataagtccagagatgaagcaaacaacagtggagtcataaatgaaagctttgaaggtgaagatggcgatgtgatttgtttgaattcagatgacattatgccagttgctttaatggaaacgaagaaccgagaagggttaaactatatggtacttgctacagaatgtggccaaggtgaagaaaagtctgagggtcctctaggctcccaggaatctgaatcttgtggtctgaggaaagaagagaaggaaccacatgcagacaaagatttctgccaagaaaaacaagtggcttactgcccttctggcaagcctgaaggcctgaactatgcctgtctcactcacagtggatatggagatgggtctgattaatagcgttgtttgggaaatagagagttgagataaacactctcattcagtagttactgaaagaaaactctgctagaatgataaatgtcatggtggtctataactccaaataaacaatgcaacgttcc

SEQ ID NO: 220411 - DNA, 1000 bp, Homo Sapiens
aagtggttcaagaatgggaatgaattgaatcgaaaaaacaaaccacaaaatatcaagatacaaaaaaagccagggaagtcagaacttcgcattaacaaagcatcactggctgattctggagagtatatgtgcaaagtgatcagcaaattaggaaatgacagtgcctctgccaatatcaccatcgtggaatcaaacgagatcatcactggtatgccagcctcaactgaaggagcatatgtgtcttcagagtctcccattagaatatcagtatccacagaaggagcaaatacttcttcatctacatctacatccaccactgggacaagccatcttgtaaaatgtgcggagaaggagaaaactttctgtgtgaatggaggggagtgcttcatggtgaaagacctttcaaacccctcgagatacttgtgcaagtaagaaaagaaatcctgtgtgtcgcttatgtctataactccttgtttcagatgattctatgtctcatgattgattgttgctttttttccaattttgttgcatcatgttgaataatgctgttttatatgtagagtcttttaaaacattcacaccattcgtcatcactcctctgtcatatgcagttttgttttttgctcttttcaatgtgtgtgaggtgttttttgtttttgtttttgtttttttgccatgttatttatagtgttgctttccttgtgctttccttgtggttttcttggttggttattcagaaaagatgtgcagatatcacagaggcctatagccttttggtatctacttctacatccaatgtatgaattaagctgtaagataatgttgctttcttatcccagtgatcacctgccaaatgaataagacaacaaagagaagcagaagggcaagaagattatttactgacatatatctattacacttgggattgtgcttactgttgcataactattttttaaacggagtttagttttatattgctagtaaaaaaaaaaaaaaaaaa

SEQ ID NO: 220412 - DNA, 1000 bp, Homo Sapiens
agagaacaattggacagcctaatctgcctagaaagcagcatttttgaagctttacgactgtcctcatattcaaccaccattcgttttgttgaggaggatttgactctcagttcagagaccggggactactgtgtgcgaaagggagacttggtagccatctttcctccagtcctacatggtgaccctgaaatctttgaagctccagaggagtttagatatgatcgttttatagaagatggtaagaagaaaaccacctttttcaaaagagggaaaaagctgaagtgttacctaatgccgtttggaactggaaccagcaaatgtccaggccgattttttgcacttatggaaataaaacaattgttggttatacttttaacttattttgatttagaaataattgatgataagcccataggactaaactacagccgcttgttgtttggtattcagtatccagattctgatgttttatttagatacaaagtgaaatcttagagaagctaaaaggaaagaaaataaatctatcaaaattaccctaaacatcctaagctcatctatttctttttaatttctgcaaagtaattgatttatttgtttaaaaagcgctaatttctatttgatctgatatcagtccagtttgtccttagtcacaaagcccatataatataaaacaggatggtggcaggaaaatggacatcaaaatcaacttaagggtaggctcaaaacagggttgttgttgtttttttagtttctccttgttgtgattttcacctgttataataaatgtaccttcacaccaatagattgggcactgtggaatttaaatcactcaaattgttctctaatatgtaaaattacactttgaactactagaaaattgtgctggaaatggacacagtctaacaaattccaaattctcacagaagaaggaaattgaatttccatgagttacactggatgaaaatgtttcccttaagcatatattaataatacctatatc

SEQ ID NO: 220413 - DNA, 932 bp, Homo Sapiens
gagcagcagaatcaggcccagctcccaattccctctccccagtcttctccaggtgtcccctcccacgagcgcacaggaaaaggaccacatggcctggcgagccctacacccactgctactgctgctgctgctgttcccaggctctcaggcacaatccaaggctcaggtacttcaaagtgtggcagggcagacgctaaccgtgagatgccagtacccgcccacgggcagtctctacgagaagaaaggctggtgtaaggaggcttcagcacttgtgtgcatcaggttagtcaccagctccaagcccaggacgatggcttggacctctcgattcacaatctgggacgaccctgatgctggcttcttcactgtcaccatgactgatctgagagaggaagactcaggacattactggtgtagaatctaccgcccttctgacaactctgtctctaagtccgtcagattctatctggtggtatctccagcctctgcctccacacagaccccctggactccccgcgacctggtctcttcacagacccagacccagagctgtgtgcctcccactgcaggagccagacaagcccctgagtctccatctaccatccctgtcccttcacagccacagaactccacgctccgccctggccctgcagcccccattgccctggtgcctgtgttctgtggactcctcgtagccaagagcctggtgctgtcagccctgctcgtctggtggggggacatatggtggaaaaccgtgatggagctcaggagcctggatacccaaaaagccacctgccaccttcaacaggtcacggaccttccctggacctcagtttcctcacctgtagagagagaaatattatatcacactgttgcaaggactaagataagcgatgatgatgatgaacacactttgtgaataataaaattat

SEQ ID NO: 220414 - DNA, 1000 bp, Homo Sapiens
gaagttcaagattactgtcaaacaagctgcccacataggatgttggttatccttacttgagtatcttctctattttttatcttttctcatgacttgtgaaaattcttcagttgttggaataaatacctcttatgaaggaattccacaagatttatatgtggaaaatgacatctttgctgattgcaatgtggattgcaactgtccatctaaaatatgggatcctgtgtgtggaaacaatggcttgtcatatctgtcagcttgtcttgctggttgtgagacatccattggaacgggaataaacatggtgttccaaaattgcagctgtattcaaacatcaggaaattcatctgcagttcttgggctgtgcgacaaaggacctgactgttccttgatgctccagtacttcctaatcttgtcagcgatgagcagtttcatttattctttggctgccatacctggatatatggttctcttgaggtgtatgaaatctgaagagaagtcccttggtgtgggattacatacattttgcacaagagtatttggtaaaaatagttattttttcccacatcctatcagaacaatattattattattattttttattacactttaagttttagggtacatgtgcacaacgtgcaggtttgttacatatgtatacatgtgccatgttggtgtgctgcacccattaactcatcatttaacattaggtgaatctcctaatgctatccctccccccttcccccaccccacaacaggccctggtgtgtgatgttccccttcctgtgtccatgtgcagaacaatattaaatactagataaacaaggtaatattatttcagaaaagcagtctagcaaatgtcccttctgtatgtaaaaagcacgttataaatatgagaatgcagcacacaaagagatagagaatctcttttacttgaaaaggccctgtctgaccttaattacactattctttgtttgaagatttgaaaataaaaaaaaaa

SEQ ID NO: 220415 - DNA, 1000 bp, Homo Sapiens
atttggggcccaaaatttcacacttcatgtgccttactgatgagagtactaactggaaaaaggctgaagagagcaaatatattattaagatgggttggaggattggcgagtttctaaatattaagacactgatcactaaatgaatggatgatctactcgggtcaggattgaaagagaaatatttcaacaccttcctgctatacaatggtcaccagtggtccagttattgttcaatttgatcataaatttgcttcaattcaggagctttgaaggaagtccaaggaaagctctagaaaacagtataaactttcagaggcaaaatccttcaccaatttttccacatactttcatgccttgcctaaaaaaaatgaaaagagagttggtatgtctcatgaatgttcacacagaaggagttggttttcatgtcatctacagcatatgagaaaagctacctttcttttgattatgtacacagatatctaaataaggaagtatgagtttcacatgtatatcaaaaatacaacagttgcttgtattcagtagagttttcttgcccacctattttgtgctgggttctaccttaacccagaagacactatgaaaaacaagacagactccactcaaaatttatatgaacaccactagatacttcctgatcaaacatcagtcaacatactctaaagaataactccaagtcttggccaggcgcagtggctcacacctgtaatcccaacactttgggaggccaaggtgggtggatcatctaaggccgggagttcaagaccagcctgaccaacgtggagaaaccccatctctactaaaaatacaaaattagccgggcgtggtagcgcatggctgtaatcctggctactcaggaggccgaggcagaagaattgcttgaactggggaggcagaggttgcggtgagcccagatcgcgccattgcactccagcctgggtaacaagagcaaaactctgtccaaaaaaaaaaaaaaaaaaaa

SEQ ID NO: 220416 - DNA, 1000 bp, Homo Sapiens
aagttgatctctgtacatttaagtgaaaagtctttataacttttcacccttaaaatatttcagcagacatgtctgcacatgacagtgtaaaaaagtttaatgtcaaatgcaaagtttttattcattccaagccaccactgtaaggaataaagcttagcttctgtacatggaaagagctaataattatccctctgtcagagatgagatttttaaatgcttatgatatttaatcataaaaagggattaatccaaccattttctagtaaagccagaaattcttgcttcccatttctagaatagtttctagaacagtgctatgcacatattagatcttaataaacatttgctgagtgaaagtaagataaactcaactatctcttgggaagaactggcttcattcctagtacatcttttaaaaagttactaattttccagcagtacaaatattaacaattatattaacacctgcctcatgtcagtttatgcttctagagcaatgtctagtgaaacttatctgatggcatttattgaaaaccttctaaaaagtagactaaggaaaccataatcagaattactatgtcttttgattcccaatgagaagttctattttcatgttcttaatattacatacaagaaaatgcagttaggttatttcaattgacaattctgcctcctcttttgatttatcacttacccaaaattattaattttattaggcttttggaaaagaaaaaaaactttttgatgttttaggtgatttaaaaatataccgtgttggtggtgaatgactattgatgactgtgttaagtgcatctgtattgtaagtgaaatgtaattatttctgtgtaccatatggagtaactaaggtcattgtttttgacaattttgtttgaaattcatatatcttatttcaaaggatagcataatatctgcattatgctggaaaaaaatagacctttggagaatacttaaataaaacatgtgcatgcttgaacaggac

SEQ ID NO: 220417 - DNA, 942 bp, Homo Sapiens
atgaattgggtaaatgacagcatcatacaggagtttattctgctgggtttctcagatcgaccttggctggagtttccactccttgtggtcttcttgatttcttacactgtgaccatctttggcaatctgaccattattctagtgtcacgcctggacaccaaacttcatacccccatgtatttttttcttaccaatctatcactcctggatctttgttacaccacatgtacagtcccacaaatgctagtaaatttatgcagcatcaggaaagtaatcagttatcgtggctgtgtagcccagcttttcatatttctggccttgggggctactgaatatcttctcctggccgtcatgtcctttgataggtttgtagctatttgtcggcctctccattactcagttatcatgcaccagagactctgcctccagttggcagctgcatcctgggttactggttttagtaactcagtgtggttgtctaccctgactctccagctgccactctgtgacccctatgtgatagatcactttctctgtgaagtccctgcactgctcaagttatcttgtgttgagacaacagcaaatgaggctgaactattccttgtcagtgagctcttccatctaatacccctgacactcatccttatatcatatgcttttattgtccgagcagtattgaggatacagtctgctgaaggtcgacaaaaagcatttgggacatgtggttcccatctaattgtggtgtctcttttttatagtacagccgtctctgtgtacctgcaaccaccttcgcccagctccaaggaccaaggaaagatggtttctctcttctatggaatcattgcacccatgctgaatccccttatatatacacttaggaacaaggaggtaaaggaaggctttaaaaggttggttgcaagagtcttcttaatcaagaaataa

SEQ ID NO: 220418 - DNA, 1000 bp, Homo Sapiens
cagcttctcagctctactgtgtttgaccctgtgttcaaggttaggggaattatagtttcccaggtctccatcgtgggggtaatcagaggggcagagaaggcttcaaatcacatttgttacaaaattgatgatatgaccgcgaaaccaatcgaggcccgacagtggtttggtagagagaaagtcaagcaggtgactccattgtcagtcggagtatatgtcaaagtgtttggtatcctcaaatgtcccacgggaacaaagagccttgaggtattgaaaattcatgtcctagaggacatgaacgagttcaccgtgcatattctggaaacggtcaatgcacacatgatgctggataaagcccgtcgtgataccactgtagaaagtgtgcctgtgtctccatcagaagtgaatgatgctggggataacgatgagagtcaccgcaatttcatccaggacgaagtgctgcgtttgattcatgagtgtcctcatcaggaagggaagagcatccatgagctccgggctcagctctgcgaccttagcgtcaaggccatcaaggaagcgattgattatctgaccgttgagggccacatctatcccactgtggatcgggagcattttaagtctgctgattgaggcagggaaaacatcctttcatttttcgaagacccttgcatccagctgtgagtaattttgacctgttgactttttaggagtaggactaaaaaaaaaaatctcaagtggcattctttgtcaactcgctgcttttctaactgctttgaacttttcggattttctgtatttgaagctcagagagagacggtgatggataaattgacaactctgtaggatttactagcaagctaatggaaacatgattttcggggaagaaaaactacagaaaatgtagaaatttattatttaattgtgttggagcttctttttccaaaagaaaaactagttgcagtcagggagccagcgaaaagacaaaaaaaaaaaaaaaaaa

SEQ ID NO: 220419 - DNA, 1000 bp, Homo Sapiens
gtggcgctcatgctgctggggaacaaggtggactctgcccatgagcgtgtggtgaagagggaggacggggagaagctggccaaggagtatggactgcccttcatggagaccagcgccaagacgggcctcaacgtggacttggccttcacagccatagcaaaggagttgaagcagcgctccatgaaggctcccagcgagccgcgcttccggctgcatgattacgttaagagggagggtcgaggggcctcctgctgccgcccttgaacctggctgagctcagtcctctggaggaagccgcccagtccctagaaggctggacagagggtctccaggcccttctgactttgttgcccagtggccaacgcccgagtgtctgttttcaggagccccaggtcaagccttgtcccttcctcctcccagcaacagtcccaacaagcaggcttctgagagcccgtggccgcacactggccgccacggaaaagcagtcttctgcacgggacggggagcggcaagtggacagactttgccacggtgctctgctgccccctcctgggcacgtccaggtgagggagggctggggctggcaccacgcacagtgcctaaccctagaaaagccatgtcttcagccgcacatgctcaggcagctaagggaggacgcctgcccacgcctgggacagaaggcttcactgctaatcacatcgtgcatctgtgtgtcctgggagctgcctgctcccggcccaccctctaggaggctctggctcaaacagcaatagggtcttcctcactgaccttggaggatgcctgtggccttgtgataaaatgtgggaaatcacagaaaacaccagaaacaacaactgccagcccggcctggccacaggtgaggtctgtgatttccgagcacgctccaccttgcactcaacttggccttttgattgcacaagcctttgttttcagtcctagtgaataaagttgtgttttctggaaaaaaaaaaaaaaaaaa

SEQ ID NO: 220420 - DNA, 1000 bp, Homo Sapiens
cgactatctcaggaatctccccatcacagcccacccagaagtgttcggcctccatgagaacgcagacatcaccaaagacaaccaggaaaccaaccagctgtttgagggggtcctgctgaccctccctagacagtcaggaggaagtggcaagtcccctcaggaagtggttgaggagttggcacaagacattctctccaagcttcccagagactttgacctggaagaggtcatgaagttgtaccccgtggtctatgaagaatccatgaataccgtcctaaggcaggagctcatcagattcaacaggctgaccaaagtggttcggaggagcctcatcaatcttggccgagccatcaaaggacaggtcctgatgtcctcggagctagaggaagtctttaacagcatgcttgtgggtaaagtgccagccatgtgggcagccaagtcttacccatcactgaagcctctggggggctacgtggctgacctgctggcccgcctgaccttcttccaggaatggattgacaaggggccccctgtggtattttggatctctggattctacttcacacagtcttttttgactggcgtctctcaaaattatgcccggaaatataccatccccattgaccacattggatttgagtttgaggtaaccccacaagaaacagtgatggagaataaccccgaagatggggcctacatcaaagggctcttcttagaaggtgcccgttgggacaggaaaacgatgcagattggggaatctctccccaaaatcctctatgacccactgcccatcatttggctgaaacctggggagagcgcaatgtttctgcatcaggacatctatgtgtgtccagtctacaaaacaagtgcccgcagaggaaccctctccaccacaggccactctaccaactatgtcctctccattgagcttccaacagacatgccccagaagcactggataaaccgaggggtggcctcactgtgccagctggataactga

SEQ ID NO: 220421 - DNA, 1000 bp, Homo Sapiens
tttttttttttttttttttgagacagagtcttgctctgtcatccaaactggagtgcagtggcacaatcttggctcactgcaacctccgcctcttgggttcaaccgattctcctgcctcaacctcccaaatagttgggattacaggcacatgccaccatacgcagctaatttgtatttttagtagagacagggtttcaccatgttggccagcctggtcttgaactcctgacctcaagtgatccgcctgcctcagcctcccaaagtgctgggattacaggcatgagccactgcacccggcttgaatcatccttttgtccagtattatatccatgctgtatatgctacccgcccactagtcccttagctgtctcagttgtcagattgactgtcatgggattgcagtgcttgcattaaagctacccttattgtataatgaccccaaagtgcaagagtagtgatgttggcaatttgcatacaccaaaaataagttataaagtgcttccttaaagtgaaatggttaaagttcttgacttaataaagaaaaaaaatgtatgctgaggttgttaagatttacagtaagaatgaatcttctatccagaaattgtgaaggaggaaaaagaaacttgtgctagttttgctgtcacatctgaaactgcaaaagttgtggccacagtgcatcataagtgctaagacgaaaaagacattaaatttgcggatggaaggcgtgaatagaaatgggttctgacagcaatcaggttcggtactattcacagtttcaggcatccgctagggatcttggaacatatcccccatggataagggaggggtactgtaccttgtcatattgtgcattaaagaattcattgagtgtaatcatgtaagtctaacacacatttaaaaagctctcagatatcatttcgccttcggttgatgtaagaaaattcaaagctactcaaatcattcaataaatgataaaattatttaaaaaaaaaaaaaaaaa

SEQ ID NO: 220422 - DNA, 1000 bp, Homo Sapiens
ctgccatcatctttaggaagagagaagtgaccatgcctgaaccagtcattggcaagaggaacggtgttatggactgaatgttcatgttcctccagaattcatatgctgaagcctctgtccacacatgcacaccagatgagggccatgtgcgcacacgaggtggctgtctacaaggccagaaagagggctgtcaacaggaactgcgtctgctggcaccttgatcttgaacttcccagcctccagaactgtgagaaagaaatctctatggtgtaagccactagtctgtggcattgttatagcagctcgagaagactaaggcagatgggcttccaggactggcccagaccagccagggctccttgtagaaaaggctgatgccagggttggcacatggagggtacaaggaggactcgcctggagtatcttaaggaacctatcgaagaataatggcttgttccactggccaaagatgggacaatttgaacatcaaaagagatacttactgactccactcctgacttctgcttctgaaaaaatgaagtaggtgttttccctattcctcccactaagtacagttaacaaccctggatgttacatataaaacaaacaaaaagactccgagcgatggagagaaggcaccctagcctggctgggatcctcaggacctgaggctccacagagagaaattcctggaatctggaccccatggcccagtcaggttacacaaaactgatcatcacagatctgtagaactatacaaaagtgctaacattcatgattagggtctcagaaggtaaggaggaagagagtggaatggaaaaagtattcaaaaaaataatcactaaaggccaggtgcagtggcccatgcctgtaatcccagcactttgggaggtgggacaattgctttagaccttgcaactggcctgagcaacacagggagactcagtttctccaaaaaaataaaaaattagccgatcatgaaaaaaaaaaaaaaaaaaaa

SEQ ID NO: 220423 - DNA, 1000 bp, Homo Sapiens; identical to SEQ ID NO: 117605

SEQ ID NO: 220424 - DNA, 1000 bp, Homo Sapiens
ctttgcaagacacaaagcctgcgaatcgatgctgcctcctgcgccatttgctaagactctatctggacagggtatttaaaaactaccagacccctgaccattatactctccggaagatcagcagcctcgccaattcctttcttaccatcaagaaggacctccggctctgtcatgcccacatgacatgccattgtggggaggaagcaatgaagaaatacagccagattctgagtcactttgaaaagctggaacctcaggcagcagttgtgaaggctttgggggaactagacattcttctgcaatggatggaggagacagaataggaggaaagtgatgctgctgctaagaatattcgaggtcaagagctccagtcttcaatacctgcagaggaggcatgaccccaaaccaccatctctttactgtactagtcttgtgctggtcacagtgtatcttatttatgcattacttgcttccttgcatgattgtctttatgcatccccaatcttaattgagaccatacttgtataagatttttgtaatatctttctgctattggatatatttattagttaatatatttatttattttttgctatttaatgtatttatttttttacttggacatgaaactttaaaaaaattcacagattatatttataacctgactagagcaggtgatgtatttttatacagtaaaaaaaaaaaaccttgtaaattctagaagagtggctaggggggttattcatttgtattcaactaaggacatatttactcatgctgatgctctgtgagatatttgaaattgaaccaatgactacttaggatgggttgtggaataagttttgatgtggaattgcacatctaccttacaattactgaccatccccagtagactccccagtcccataattgtgtatcttccagccaggaatcctacacggccagcatgtatttctacaaataaagttttctttgcataacaaaaaaaaaaaaaaaaaaa

SEQ ID NO: 220425 - DNA, 1000 bp, Homo Sapiens
aaaaaaaggtttggtttggttttgtgacggagttttgctcttgtctcccaggctggagtgcagtgacacaatctcggctcactgcaacctccacttcttgggttcaagtgattctcctgtctcagcctcccaagtggctgggattgcaggcatgagctaccacgcctggctaattttttgtatttttagtagagactcggtttcaccatgttggtcaggctggctttgaactcctgacctcaggtgatccacccgccttggcctcccaaagtgctgggattacaggcgtgagccactgagcccggccaaaaaaaaatgtatttattaaaaaaaaatttttttaacccgccgaataattcccataagagtaacaaaaaggaccagcctgaccagcgtggagaaactctgtctctactaaaaatacaaaattagccaggcgtgatggctcatgcctgtgatcccagctactcgggaggctgaggcaggagaatggctggaacccgggaggcggaggttgccgtgagtcgagatcgcaccattgcattccagcctgggcaacaagagcgaaactccgtctcaaaaaaaaaaaaaaaaaaaaaaagaaagaaaagagtaacagaaagatagggatttttaggagacaattagataaaaatgtatgtgatgactgtataaggaggcctgtgtgtatgaatttatagggagtagaaccgtctctcttcttagttggtgactgtttggggcctggtattttaatagatgaacactacttttttaattttttatttttttaaccctacccttaacccatgaacactatttttaattaaagtatctgatgtaaaattattttgagtttttaatattttgataaacgtgtattcctgaaactttttgacttacttatcttacatgtggtgtcttcctgtatatagtacattatatcaatttctacttgaaataaatattttgaaaaaaaaaaaaaaaaaaaaaaaaaaaa

SEQ ID NO: 220426 - DNA, 1000 bp, Homo Sapiens
gtgcatcaggaaacacctcactcatactgtcatataatgcaacagggaggcatagtctctctacaggtctctctctttacgttgtaccattctgttgggcaacaattgtcccaacaaccacacttaaatccagtggggaaaaaaaggttaacagtaaaaatttcttccacgtaattcaatttctcacaatagacagaaacagggggaaaatgtttgccctgttcaaagtactaaaactagataacttaaataatttaagccaataaataatattatattgtatttaacccattattcctcacctaccctcaaagtaggtatacaaaagactagtttgttattaatccacaaatatgctaaatgttagcaagatgatttttaagtacaaaaaagtttaagattgcaaggaaggaaacaatggtcacaaggtctttacttatgcacatttgtgcataaatttccacccaatttccaagacagttgtatcacaaagctgtgaaatgtgcaagagtatactttgtacccatcatgtgctctgttttgacataatgagtaatgcagacatttacatgttcttccagcttcaatcagtagacctgattttcaaaatctgccctcagatgaaaataaaataaacgaaacatttagacaatggctatattaatctgggaaggcaacacctgtggataaaacattagaagaaaacatatattttattttcatacttttgatatgattgtaacatatttcttgagtaatttaaatgctttgttttcccacacatattcaaatcagcaagcttgtagctggactgcaatatcaacaacaagttgtttcaaacagcatcaaaatacaacttcattgctacacttacaagtaatgaattttatgtgactatgaaacgaatataagcttaaaataagtgaatctaataaaatggctattcctctttttacttggaaataataaattaacattatattctaaaaaaaaaaaaaaa

SEQ ID NO: 220427 - DNA, 1000 bp, Homo Sapiens; identical to SEQ ID NO: 117945

SEQ ID NO: 220428 - DNA, 1000 bp, Homo Sapiens
cagttcttgcctttaaacgagagggttacagaccctttgacttcagtgccacagatgttatggatataattatcaatagtggcttgattaaactggcatcccagaatttttcctatggagttactgaaatgtataaagcatgttttcttggtgcaacagtgaagtatcttcaaaaattcatccctgaaattactatcagtgatatacttaggggcccagctggagtaagagcccaggccctggatagagatggaaatctggtagaagattttgtatttgatgcaggagttggggatattggaaatcgcattcttcatgtgagaaatgcaccttctcctgctgctacttcttccattgcaatttctggaatgattgcagatgaagtacaacaaagatttgaattataaataatgaaaggagctaggtatgcactgtaatcttcatgtcagcaacaagaatgtactaattgcattctttaatttaaaaaatggtttttaaactttcgtttttaggtcaaagataaccactgcattgttaaaatgatgtaacatagaaataataattttctacaaaaattagccaggcatggtggcgcatgcctgtaatctcagctactcaggaggctgaggcaggagaatcaattgaaccgagcagacggaggtgagctgagagctgagattgcaccactgcactccagcctgggtgacagagcaagaaaataataataataataattttcaaaatgttaggctgggggccgtggccagcactttgggaagccaaggcaggtagattgtagcccaggagtttgagaacagcctgggcaacatggcaaaaccctgtttctacacaaagttagctgggtctggtgcctctgtggttccagctcctcagtaggctgaggtgagaggatcacttgagcccaggaggtctaggctgcagtgagcttatgttcatgactctgtattccaggctggatgatagagcaagatcttgtctc

SEQ ID NO: 220429 - DNA, 1000 bp, Homo Sapiens; identical to SEQ ID NO: 118098

SEQ ID NO: 220430 - DNA, 1000 bp, Homo Sapiens
cattcccgttcctaccaaccaccagaactggatggtggcacccctaatgtgcatgaggcatcctgggaatggtctggagtaacgcttcgttatttttatttttatttttatttatttatttatttttttgagacggagtttcgctcttggtgcccaggctagagtgcaatggcgcgatctcagctcacctcaacctccgcctcccgggttcaagcgattctcctgcctcagcctccctagtagctgggattacaggcgcccgccaccatgcccggctaattttgtatttttagtagagacagggtttctccatgttggtcaggctggtctcaaactcccgacctcaggtgatccacccacctcggcctcccaaagtgctgggattacaggcgtgagccaccgcgccccacctaacccttccttatttagcctaggagtaagagaacacaatctctgtttcttcaatggttctcttcccttttccatcctccaaacctggcctgagcctcctgaagttgctgctgtgaatctgaaagacttgaaaagcctccgcctgctgtgtggacttcatctcaaggggcccagcctcctctggactccaccttggacctcagtgactcagaacttctgcctctaagctgctctaaagtccagactatggatgtgttctctaggccttcaggactctagaatgtccatatttatttttatgttcttggctttgtgttttaggaaaagtgaatcttgctgttttcaataatgtgaatgctatgttctgggaaaatccactatgacatctaagttttgtgtacagagagatatttttgcaactatttccacctcctcccacaaccccccacactccactccacactcttgagtctctttacctaatggtctctacctaatggacctccgtggccaaaaagtaccattaaaaccagaaaggtgattggaaaaaaaaaaaaaaaaaaaaaaaaaaaaaaaaaaaaaaaaaaaa

SEQ ID NO: 220431 - DNA, 1000 bp, Homo Sapiens
catactagagagaaggcctacaaatgtgatgaatattgcaaagcttttaactggtcctcagctcttactacccttactcagcataagataattcatactggagagaaaccctacaaatgtgaagagtgtggcaaagcctttaaccggtcttcataccttattcgacatgagataattcatactggagagaaaccctacaaatgtgaagagtgtggcaaagcctttaaccagtcttcacaccttactcaacataaaataattcatactggggagaagccctacaaatgtgaagaatgtggcaaagcctttaaccggtcttcacaaccttctcaacataggataattcatactggagagaaaccctacaaatgtgaagaatgtggcaaagcctttaatacgttctcataccttaccgtacataagagaattcatgctggagagaaccccaacaaatatgaagaatgtggcaaagcttgtaaccattcctcaaaccttactaaacataattcataatggagaaaaaccctacaaatgtgaagaatgtgtcaaagcttttaactgttcctcaatccttactaaacataagggaattcataatagaaaaccctacaaatgtgaagaacgtggcctggcttttaacaaatcctcaacatttactaagcataaaataattcatgctggagagaaactcttgaaatgtgatgaatgtggcatagcctcttcccagttctcaactcttactaaacatgagaacactgtggaagataaagcctacaaatatgaagaatgtgacaaggcctttaaaagttctcaacccttattacacataatttatactggacagaaatcctaaagtgtgaagaatgtcacaaagcccttaataagtcctcaattcttaacagatataagatgtttcatactggagcgaaactacaatcctgaatgatgtcacagtgcttttaacaatacctcaaacttttctaaacataaaaaaaaaaaa

SEQ ID NO: 220432 - DNA, 1000 bp, Homo Sapiens
agcattaggatcttcgtcccgttctcttttgcgtagcttcaaaaaggcgtaacagtgacctgggaggggagatgaagagctaggcctttcagaaagtgaccaatggaaggtgccggcagagcaccctgcagtaacagaaggtgaaagccggagcctggtggctgttgctgcaaacaaccacccaaaacttagtggcttaaaatcaccacagtctagctcatgaatctgtaacttgggcagagctcggtggagacggtttgcccctgtggctcgactggagtgttcgttcacacggctgccaagtggaatttggctgggaatctcaggccttggttcctgcccacgtgagactctccatggaggaggggcatcttcttaggaaggcagctgccataccgtgaggaaacccgacaaacagggcagccagagccagacagcaggctcctggtcccagtcccggaaaatgcaaagggacaagtatgtgttgatttcagagaagctcagatgtagcattaggaccttcatccatacccttctcttttgcatggcttctaaagggcatgacagtgacctgggaggtaactgtgccagaataaagaggggagacgaaaaaaagagggtcactttcagaaagggacctgggcttcctcacaatatggcggttgccctcctaaggtggacatcgggagggtcagatggaagctctgtggcctttcctaactcggcctcacgtcacagagcgtcacctttcctgcactccacggcagcagtgacaaggaccccaccccaggttcacggggaggggacgtggcagggaatgtgagacaacacaatattgctgtggccattcatgaacagtcagtcagccccactcggcgttcactgtggggatttggctggtgcacctgcgaggtggcctgacctgttttccgatttccttcatcttctgcaaaaggttaaccgctggagtgatgcgagattaaacagaggtgataaaaat

SEQ ID NO: 220433 - DNA, 982 bp, Homo Sapiens
atgcgcaagcgtctttctgccccagagttgcggctgagtctgactaaggggcctggaaatgatggagcttcacccacccagtctgcaccttcctctcctgatggcagttctgacctggagatagacgaattggagacaccttcagactcggagcagctggacagtggacatgaatttgaatgggaagatgaactaccccgggcagagggtctgggcaccagtgagacagctgaaaggctgggccgaggttgtatgtgggatgtgactggagaagatggacatcactggagggtgttccgaatgggaccacgggagcagcgcgtagacatgactgtcattgagccctataagaaagtcctgtctcatggaggttaccacggtgatggcctcaatgctgtcatcctttttgcttcctgttatctacccagaagcagcatccccaactacacctatgtcatggaacacttgtttaggtatatggtgggaactctggagctgctagtagctgaaaattacctgcttgttcatttgagtggaggcacaagcagggcccaagttccacctctaagctggatacgtcagtgttaccgtaccctggatcggcgagttttataagtaatcttggtcatggagcgatgtagaagcatgcaaaaggaacttacgcgagggtagagcacaagatggaaatggagcagaaaaagaccaggtggtcgggcgcggtggctcacgtctgtaatcccagcactttggaaggccgaggctacggaaaaacctgcgagccctggtggttgtccatgctacatggtatgtgaaagcatttctggcactgcttcggcccttcatcagttccaaattcacacgaaaaatccgttttctggacagcctgggggagctggcccaactcatatccctggatcaagtccacatccctgaagctgtcagacagctggaccgggatctccatggctcaggagggacatag

SEQ ID NO: 220434 - DNA, 1000 bp, Homo Sapiens
ctcttgaagaaactgaacttccaggacaaggagaatcatttcaaatagaagctacaccacctgaaactcagcagtcacctcatcttagcctgaaggatatcaccaatgtctccttgtatcctgttgtgaaaatcagaagactttctctttctccaaaaaagaataaagcaagcccagcagtggctctgcctaaacgtaggtgcacagccagcgtgaactataaggagcccaccctcgcttcgaaactgagaagaggggacccttttacagatttgtgttttttgaattctcctattttcaagcagaaaaaggatttgagacgttctaaaaaaagagccctggaggtatcacctgccaaagaagcaatttttattttatattatgttcgagaatttgtttcgagattcccagactgtaggaaatgtaaacttgaaacccacatctgcttgaggtaaagtccacgggcttcacatccttagaaaacttttttagtccatgcattcactaatgtatgcagacctttaatagattctagctttatgtgttgggggagagatggaggggtgttgacagtctgtttcactcagcctacatacataataaaatctaagccctttaattagagatagcaactttcccagggtgaccgaggaatcagtacgtgttgaacccctcttttaagtttccttttggttgtgtcacttggagattgccttttctttcttgtaagctcagctgtgtcctcaaatatattgcattttacccagcatttccaggtgttttcaggggtcaaagtttttaagttatcttagtctttgatattgtgtaagcgaaattctccaatcccatctcctagatgatttttttttaaatcacaaaatgtgattatgcttaacagctgtttcctgtttctcttaaaataaaatccatttcctatttctcttaaaataaaatccattattcttaaaacaaaaaaaaaaaaaaaaaaaaaaaaaaaaaa

SEQ ID NO: 220435 - DNA, 1000 bp, Homo Sapiens
gggagactatggcaacgtgaaagtcagtggtgaaatccttctccatatcagctactgctacaaaactggtgggctgtacatttttgtcaagaattgcagaaatctggccataggagatgaaaagaaacagaggacagatgcttatgtcaagtcatatcttcttcctgacaagtcccggaacaacaagcgtaagaccaaaatcagaacaggcaccaatccagaattcaatgaaacactaaagtacactatcagccatacccagctggaaacaagaactctgcagctctcagtctggcactatgatcgatttggacgtaatagcttcctcggggaagtagagattccttttgactcatggaactttgaaaatccaactgatgagtggtttgtgcttcaacccaaggtggagtttgctcctgatattggccttcaatacaaaggagagctgacagttgttttacgttacattcccccagaagagaacctgatgcttccaccagaacaactccaaggaaataagacttttaaaaagggaaagaagaaggagtcacctgtaatctctggaggaatactagaagtgttcatcaaagaggcaaagaatttgacagcagtgaagtcaggaggcacttctgatagctttgtgaagggctacctgctccctgatgatagcaaagccaccaagcacaaaactctggtaataaaaaagagtgttaaccctcagtggaatcatacattcatgttcagtggcatccatccccaggatataaagaatgtttgcctagaacttactatctgggacaaggaggccttttccagcaacatctttctgggaggagttcgtttgaattctggaagtggtgtgagccatgggaagaacgtggattggatggactctcagggggaagagcagcgcctttggcagaagatggccaacaaccctggaactccctttgagggtgtactcatgcttcgttccagcatgggaaaatgtaggctctaa

SEQ ID NO: 220436 - DNA, 1000 bp, Homo Sapiens
gccggcgcttctcctcctgatgcttttgcagaccgcggtcctgcaggggcgcttgctgcgttcacactctctgcactacctcttcatgggtgcctcagagcaggaccttggtctttccttgtttgaagctttgggctacgtggatgaccagctgttcgtgttctatgatcatgagagtcgccgtgtggagccccgaactccatgggtttccagtagaatttcaagccagatgtggctgcagctgagtcagagtctgaaagggtgggatcacatgttcactgttgacttctggactattatggaaaatcacaaccacagcaaggagtcccacaccctgcaggtcatcctgggctgtgaaatgcaagaagacaacagtaccgagggctactggaagtacgggtatgatgggcaggaccaccttgaattctgccctgacacactggattggagagcagcagaacccagggcctggcccaccaagctggagtgggaaaggcacaagattcgggccaggcagaacagggcctacctggagagggactgccctgcacagctgcagcagttgctggagctggggagaggtgttttggaccaacaagtgcctcctttggtgaaggtgacacatcatgtgacctcttcagtgaccactctacggtgtcgggccttgaactactacccccagaacatcaccatgaagtggctgaaggataagcagccaatggatgccaaggagttcgaacctaaagacgtattgcccaatggggatgggacctaccagggctggataaccttggctgtacccccaaagtgctgagattacaggtgtgagccaccctgcccagccgtcaaaagagtcttaatatatatatccagatggcatgtgtttactttatgttactacatgcacttggctgcataaatgtggtacaagcattctgtcttgaagggcaggtgcttcaggataccatatacagctcagaagtttcttctttaggcatta

SEQ ID NO: 220437 - DNA, 1000 bp, Homo Sapiens
catgtcctgcgtgccgcaggttggcttggtgggaccagcttcagtcacctttccagtggtggcctctggagaaccagtgtctgttcctgacaacttgctgaaaatatgcaaggccaagccagtgatatttaaagtatttgtaaatggtgctacccaaatggtagcccttggtccggcagaacctgcatcgccccggagcttatgagaggcgtgaattcatggacccatcctggaatcagaatcaggccccacttctgcatcagaagccctgggtggcaccagcaagtgtttggcaagcccttgagaagcagtgtctttgagaacgtgacctgtgccccaggcaccagctttactccccgagcccagcaggacatctgcatataacacacagccgaagtcagaaaatatatttttggtgactaaatggagtacctggagtacaagataacacacacacacacacacacacacacacacacacacacacacacacacgccacctttgggagctcagcagccccgagaggatttgatagcttcaccgcttcacctggttttacaaatgcggagactgaggtttagggcagttaagcttcttgcttagcatcatgtaggtaaagaatggtggaaagatatttgaacccgacctgggcaattccacctctgagggctgtcctcagaatgaatcttctgatgggctgggcacggtggctcacgcctgtaatcccagaactttgagaggccgaggcgggtagatcactttaggtcagaagttcaagatcagcctgggcaacatggtgaaaccttgtctctactaaaaatacaaaaattggccgggtgtggtggtgatgcgcacctgtcatcccagctactcgggaggctgaggtgggagaatcacttgaacttgggaggcagaggttgtggtgagccgagatcacgccactgcactccagcccggggacagagcaagacactgtctcaaaaaaaaaaaaaaaaaaaa

SEQ ID NO: 220438 - DNA, 1000 bp, Homo Sapiens
caagatcaccggcaaaggctgtctagagctgttcattcacgtcagcggcaccgtcgcgaggctagcgaaggtctgcgtgctccgcgtgcgccctgacagcctgtgcttcggccccgcgggttccggcggcctccacgaggccaggctgtggtgcgaggtgcggcagggggccttccagcagtttcgcatggaaggtgtctcggaagatctcgatgagatccacctggagctgacggcggagcacctgtcccgggcggcgagaagcgcagcgggcgcgtcctccctgaagctgcagctgacccacaagcgccgcccctccctcacggtggcggtggagctggtctcgtccctgggccgcgctcgcagcgtggtgcacgatctgcccgtgcgggtgcttcccaggagagtgtggcgggactgcctgccgcccagcctgcgcgcctccgacgcgagcatccgcctgccgcgctggaggacgctgaggagcatcgtggagaggatggcgaacgtgggcagtcacgtgctggtggaagcaaacctcagtggcaggatgaccctgagtatagagacggaggtggtgtccattcaaagttattttaaaaatcttggaaaccctccccagtcggctgtgggtgtgcctgaaaacagagacctggagagcatggtgcaagtgcgggtggacaatcggaagcttctgcagtttttggagggacagcaaatacatcctacgacggccctgtgcaatatttgggacaatactcttcttcagcttgttttggttcaagaagatgtctctcttcagtatttcattcctgccttgtaaaaattcagccagcttagattttttttttaaggttttgatcttttcaaaactaaaacagaccctgagttaattgggttgaaaatttggaccttcactgacttatgcagggcgtatattttgttgagcccttcctcctttgcaaaatttatattaaagcattggtaaaacaaaaaaaaa

SEQ ID NO: 220439 - DNA, 1000 bp, Homo Sapiens
atgatctagttgatgtctctgacctcaagacattattgatggacaaggaccttcatacagctaatgctatacttactgtaatgttaagacatgtacctgaacatgaaagtggcaaggttagcattcaagaatttatgactaaattatccgatatattgacaattcctaaagctgcaggtaagttttatttaatatgtacttattgcccagatctagaaaggcaagcagtggtttacatgttaaaaacaatacaggattcgatagttaaagcacaggtaagtaagaagcaatacaatatgaatataaaacaacacaagattagtttacataacttctgtttgaattctaaggcaaatattgctaagcttaacccaaactcaaaattttaggtagtcttacttgatagtgctagaaaattactagattatatattattcagtatgcatatttgacttctgaaattattagaaaataatttttaaaacttttgacaaatccagtagaatttttatcactatctgttatgttctcatgtatcttcagcgactctcttgatcacactttttaaacattcatgctttttgaggtataatgtacatatggcaaaattcactctttttaggtatacagttctttggattcttaaaaataatgtaatgtaacccttactatacacaacatatagactatattatcccccagaagtctcttatgcccttttggtaatccatttcttcctctaccctgagcccctggcaactactgattcattctttgtccctctagttttgccttttgtggaatatcatgtaaatgattaaatatgaagtggtttgagtttggcagtcattgcatgcatataccttgaatttactttgtttatactctcatttatactaccaaccctccctagaaaaaatggattctgattggttctggttgcagtattacaaattccaaataaagctttatttgaggacccccaaaaaaaaaaaaaaaa

SEQ ID NO: 220440 - DNA, 1000 bp, Homo Sapiens
agcctctagccgtatgtagctatttgtattaagattaattgaaattttaaatccagttcctcagtcacactagccactttctaagtgctcagtagctctgtgtgaccagcggctactgtattggatattatagaaggttctttcattcaagatcatcattcttgacagacccataaatatttcctataaagactgtagaagtgtgttctggagggtttgctctccaaaaagaattgtaatatagagtagaattgggatagagtattgaagacactgggtttagacattggatattttaatgattgtgtgttctaattcatgtgctgccaactgagttatctagtgatatgacctcactgtcttgaccaaagccagaatagaaggcaggattcctgaattctatcttaaaatttgcaatgaagagccttttccctaaattatcccattatgtaattcttggtcagctcaagaactgggttctttttctaataattaactcactaaatctgagccagtgtccaaggacagtttgtcattaaggagtactgagacttcttagctttggtactgacagttttcttttgcctcttgacataataggtatatggatctgataactgaggtcccatcttccctactcattcctatgggaatgatgctttggaaattattagatatatcctattcccttcctcccatttttttcctgctagtgcaaaaggtagatgagtaggaagattaggactcctgagttgcccatgatttcatctaatttttggattcagaatgtattttatgaataatatgcagagatgcatattaggaatgtgaagccagaatgggtcagttgtagctgctgcaaagttctgtagctgatggtcatttaattgcatgggggttattttatctttcatgattgtggtgcacctgatgctggcggggtatttgtgtgtttttgtattgttatttgattacaaaaataaagcaaaaactaacaaat

SEQ ID NO: 220441 - DNA, 1000 bp, Homo Sapiens
attaactctatggtatttttcttattcttgtttgatcatgttaaaaattggacctaataaaagtattttattcttgcttttccatgcttctctacaggtccaaatactgaatgtctcctttactttttctcttttaaatttttttctagacagggtctcactctgtcacctaggctacagtgcagtggtgtgatcacagctcactgcagcctcgacttcccaggctcaagtgatcctcccagctctcagcctccaaagtagctggcactacaagtgtacacccccacacaaggctaagttttgtattttttgtagagacagggtttcaacatattatccaggctggtgtcgaattcctgggctccagggatccacagtcccccttggcctcccaaagtgttgggattacatgcatgagccactgtgctgggcttcatttacattttaactgtctgttccttgcctagattcacagaaatccaaagctgtatgtagtcaacatggttcacaagtgttggaaaatgtgttttttgttttgttttgttttgtttcgttttgttttgagacagagtttccctctgtcgcccaggctagagtgcaatggcgtgatctcggctcactgcaacctccacctcccagattcaagcaactctctgcctcagcctcccgagtagctgggattacaagcacccaccactacactcagctaattttttgtatttttagtagagccggggtttcaccatcttggccaggctgatcttgaactcctgagctcatgatccacccgcctcagcctcccaaagtgctgggattacaggccccttgttcagccactgcacctggccccttattttgtttttgttttctaatatactttgatgtaatcagcttgagaaagcaacacaatttcaaatcctatcttctagatgcaagcagtgttaaatttgttaataaatttgcttttcacacctttctttaaataaaaggtatatctctc

SEQ ID NO: 220442 - DNA, 1000 bp, Homo Sapiens
gtgggatggacaaagcacgcactggcagtagcccacccatcgtcagcttggacaaagcgagctcagaaacagcagccagccgcccattcacgcggtttatcgaggataacaaggagattggtatcaactagccagtgactcgctcatctgccctgcccaggcccacgttttgaagttggagcatcaggcctccgacctttcttgcctcggttctcattacactttcacccatagcagaaaacactttgtgcggctgccgagaggtggtcttgtaagcgctgcatggcgctcccttcaacagcaagcctgactgttctcgagaactctgcaatcttttaaataagcttccttcaaaaaaaaaagtgcttggaaaaccgccttaggaacagaaagagctcagaccatgtccacttcctttctcctgaaacctaataatctctccgagggagaaaggggttctctgcggtattccagtgaaactcatttgatggtttcttttgaattagttagacacttgaacggtgttttttagaactcttcatgttaaagacgtggtttagtactcccaatgctgtgtatcatgacactatcttcgtctgtagtatttatgatgttaagataatgcgggtaacagacaatataatagccccgaccttaaacgaagcttttgtactgcagaatacatctggctgtgtgattttttttttaagcaagatttgttttactataaataagtggattatttcaatgcaggcaaaattgtgaagttctgttgggaaagatagcatgcttttcgtgtgcaagtacctgtcagtaataagccttttttttttttttttaatttaaatgtttgtagctgctatgtggacagttgttttctagtgtggtctgtagcccaataactggggaacgagttacagacaaacatcaccgtaaatgactcacaacattataaacagttgtgagaaaatatttcacattatcaaagctgtacaataaa

SEQ ID NO: 220443 - DNA, 1000 bp, Homo Sapiens
actggatctgtcagcatcaataactcttccctggagggctttaccatctattccctggagatgaaaatgagcttctttgagaggctccgctctgccacctggaagcctgtcccagacagccaccagggcccggccttctactgtgggaccttgaaggctggcccttctcccaaggacaccttcctgagcctgctgaactggaattatggattcgtgttcatcaatggacgtaaccttgggcgatattggaatattgggcctcagaaaacactgtaccttcctggagtttggcttcatccagaagacaatgaggtcatcttgtttgagaagatgatgagtggctcagatatcaaatctacagacaagcccacgctgtaaaactgtgtctgaacattttttttttttttttgagatggagtctcactttgtcgcccaggctggagtgcagtggcacaatctctgctcactgcaagctcagcctctcgggttcacgccattctcctgcctcagcctccccagcagctgggactacaggtgcacgccaccacgcctggctaattttttgtatttttagtagagatggggtttcaccaagttagccaggatggtcccaatctcctgaccttgtgatctgctctcctcagcctcccaaagtactgggattacaggcgtgagccaccactcccggccgtgaacatattttttgggttgctggagttcatctataagtcatttttgaggaataagatttatgttaagactatcaaacacagtgttgcctacaatagcaaaaatgtgaaaataacaacaacaacaaaacagcagaggaattgttatgtattttgtagtctatctatatgatgcctatttttaggctttaaaaagtcttcaaaatctttaatgactgatttatctagttaaatgcttaatccttagcaggctcttattctttaattaaacgtgcctttgagtagatgtgaataaaataaaaacaagtttc

SEQ ID NO: 220444 - DNA, 1000 bp, Homo Sapiens
caaagactgaatgatactacacagtcctctccctattaatatgggcacattcttgccaatttcacacttgtatcttcagcagggacattacaatcaaacaccaattcctggttaatgaagggagagtgtgggcttagcagagttaccctcatgcccctatctgagccacaaccttctgtaattcacttcatacatccatctaaatggatacctttccatcccctcaaacgagaacaaaaagtattccctgcaagcactatgaatggaccttactactctctttgacagaagactcaaacacagcctctaagaaacaaggcagctgttagtgtgacatagcttccagctcctctgttatcttcacagctgacttcacactcactggccctcaatagcttagagtgggactcctgatctccctggttgacgtttataaggttttgtaatttagcttctggtactacatgtatctatccacacactgctgaagggaacttgaccctacgcattccaaaagccttcctcataagttatccccaaggggttcagggactacagaccattagtacccaagtgaagtcttctgacgatccagaattcctaaggtggctctgatattatatcatactttaatagagagttgcataccttttggacaaagattccagagcaaaataattatgataatgctgtttctcacaggagaatagctatgagtcaaatctaacctgcttaaataagagtttggtgagaaagtgaaaccacctgatcttgaatcaatgttgaggtgaaaaaggaaatgtcaggagggataagacagggtgaggccctgcttcttttcctaagagtctgaaaccattccatttcattttggtgaaatgtgtctgtttctaagaaattctgttttcttagttctctggttaaaaaaaaaaatacataaactgtatccttctttctttcacttcaaaaaaaaaaaaaaaaaaaaaaaaaaaaaaaaaaa

SEQ ID NO: 220445 - DNA, 459 bp, Homo Sapiens
gtaggggactgtgcgggaagctgggggtggatgcatggtggggcccggggttctgggccgggatgcagccctactgagcccctttctggttctccacaggtgatggagacccgccaggtgtccaggagccctcgggttcggctgctgctgctgctgctgctgctgctggtggtgccctggggcgtccgcactgcctcgggagtcgccctgcccccggtcggggtcctcagcctccgccccccaggacgggcctgggcggatcccgccacccccaggccgcggaggagcctggcgctggcggacgacgcggccttccgggaacgcgcgcggttgctggccgccctcgagcgccgccactggctgaactcgtacatgcacaagctgctggtgttggatgcgccctgagcgcgctgcccgtccccatcttaataaagaccatgccctgcgctccggactgcg

SEQ ID NO: 220446 - DNA, 1000 bp, Homo Sapiens
tagggtccctgtctatcactggatgctgcagcttctgttcattactgttagtgtatcattcttcatgcctctgtttctgtgatggtctcatcatatgtgaaccatttgacctggcgtattgtgtactagtcaccgtcaccatctctccatatgtatctccctgtatttcgggcccattccctctatgtcaagagtaaatagaggcacagagactgatgagaaacgttcataacatgaaggtaagactcagggagacagagactttgtggaagtatctctgagggagtcccagacacaggcagagagggccacatatcgtgtgccagaggctgagagactgagagggatgacaggcttaggggaaaactcagagaggagagatgcacattcctagtgaaattgcacaggcttccagcatgctggagggaacagaaaaggcatgggcctgaattcaggctgcagagcctgactcctccctgtggctacttttgggacctaagataagtgactttcctgaacctccatgacctcctcatatgtaaaccagggacaggacccaccttgtgtagtgcctgacccaaagcctggccctgcacactgtctctgactcacagcaatcatcagcacctctctttgcctcctacttgctcagtctctgtcacaagaactggatctccatccccttgatgctctgagcatcttcacccatttggtcgttgagacatatctgtccatgtctgtctaaaaggggaggagatgagggagaaaaaagggaatctactcagagcctgtgtgtgctgcccagtctaccaaataatttatatacatctcagtcctcacacaaccatccctgttttatagaggaggaagtggcttagagaatgtaactgaccaaagtcacactgccaggaactggaagcactaggatttgacagcatatccaaatatgtcagcaatttcaataaacatgactgtactcaacaaaaaaaaaaaaaaaaaa

SEQ ID NO: 220447 - DNA, 1000 bp, Homo Sapiens
gagatgcgctgtcagtatgaaacggtgcttgccaacaatcgcagagaagctgaagaatggttggctgttcagacagaagacctgaatcagcagcaactgtccagcgcggagcagctgcagggctgccagacggagatcttggaactgaaacgcacagccagtgctctggaaattgagctccaagcacagcaaagcctgacagaatctctggaatgcaccgtggcagaaaccgaggcccagtacagctcccagctggcccagattcagtgcctgatcgataacctggagaaccagctggccgagatccgctgcgatctggagcgacagaaccaggagtaccaggtgctcctggacgtgaaggcccggctggagggtgagatcaacatgtaccggggcctgctggacagcgaggacagcaggctttcctgtagcccatgttcaaccacatgcacctcgagcaacacttgtgagccatgctcagcctatgtcatctgcactgttgaaaactgctgtttgtgaatgttaaggacagcaggtagaggaatcaaagccagcagcatcctagaaaggagatggggcttcaaccagggacatccaaaccggaagcacaaatccaggaggctctcatatcctggaattgccctccaggtatcctcagtctttctgctttactatttcctctccttccggcttatttgtggtatactggaagcccataaagcattcttgctcatctccaaataaaacgtgttttattcctttagcatggtaaatatagctctatggctgattactgttgatagaatattcattttatggcaaggaaatcatctaaacccataaccatagtttaaatgtacataaacccaagctgaaaatattttttaactcctcaaatacaaataaattaatgaacccatgagaaatgtcatatatcttagaaaatagttgtgtgtatctttctgaggaaaaatattaggaataaaatatgataaaatgt

SEQ ID NO: 220448 - DNA, 1000 bp, Homo Sapiens
gccttttattataacactaaaactggacagtctcctgagacaagacctcctactgtactctttctggggaagcagaactgcagtgacccacttcaaagatattcagaggctgagcggtgcagggagtgctcagttgctggggatgggatccaagtccatttcttagttccacacagcagcaaatcgcttcaccttcttgaagcctctcctctgtaaagcgagagggctaaatgggtccatctctaggggccttccctcccaggtctgtgtctgatagcatacacacacacatatatatacacacacacacacacacacacacacacacacacatacatacacacacacatatatatacacacacacacacacacacacacacactctctctctctctctcaaacacacacaaatgcccaaccagctctaagagggcactgaagaggtggctggacatgtgctgggtcatttttagggtgaggtgtagggggtcttttgcttctcccttctcatattttgttttcttattgctgctcagaggggggtaaggaatggaggggccatcagaacttgaatcctttaacatccaccaggaagttttatgaagagtgggtgataggatctaaaatctctgcagacttttttcctcccgggagccaaatatcacatttccttatggtgcccacactgactcaaccagaactggctaccagcttcagaaatgtgttacttatgttcaagtaatttgttataggaatagatgacatttttttttttcaaaaactttggatttggcatatagtcatctatagggggattggttccaggatcccctgcagatgccaaaatacatggatgcccaagtcctcagctaaaaatagcgtagtatttgcatataacctatgcacatcctcctgtatactttaaatcatctctagattacttataatacctaatacaatgtaaatgctatgtaaatactcaaaaaaaaaaaaaaaaa

SEQ ID NO: 220449 - DNA, 1000 bp, Homo Sapiens
agctgcacgtccttggcgcccagtgtgagccgtgtacagtagaggctgactgacgtcttggaggcagaagtcctgatccctgactgccatctggacttggaggcggggttggggaggatcctgctcctggagggagagggatgtggagtggagaaaatctcagccaccaggaagacaaatgggaggacggagccttcccgccaggcaggtggtggggaggagtggggtggagccaggcggcacaggcagcagcccttgatgtgccaaggctggagcgtgaactggctcttgcaagaagaggtcctttgaggaccctgcggctccaggactttctgcagaagtgtgccactgagctgatggggggatgcgacttgggggacggaacgtcagctgccatgtcagtgccaggggcactaggctggcaagagagccaccatttctgcccaagcactagccaggggatgatggacattgtgacaaagaaacaaggacagttgggtgtgacagtgacaatgggctctctgtgtgccatgacatagcaggaaaggccaggccagacggactgtggatgtctgatggctttgagtgaactcaacaaccattgactaggtgaagaatgggaagggcaccagctgaatcctgaggaccatcatctgttgagcacctactgccaccgtgtgctctgcatgcatcacctcacttaattttcccagcagccatggccagtaaatgttattgtatcccatttgacaagtaggcaaactgaggctctgggagatgtagtaattttctttagttcatgcagccgtgccttacacaaggggtgcaggatttgaattctgtgcttctgtaacagggatattatccctgtgaggccacctaataggaggcatgctgtcagaaaagaaaattctgaccaggctactggcctcttttctttctttctttttcttttctttctttttttaaaaaacaaaacaaaacaaaacaaaacaaagcc

SEQ ID NO: 220450 - DNA, 1000 bp, Homo Sapiens
cccttactgaacatcatagacttcataccggagagaaaccttacgaatgtggtttctgtggcaaagccttcagtcagaggacacatctgaatcaacatgaaagaactcatacaggagagaaaccctataaatgtaatgaatgtgggaaagcctttagccagagtgcacaccttaatcaacacaggaaaatccatactcgggagaaattatgtgaatataaatgtgagcaaactgttcgccacagtccttcatttagcagcacataacttatggtgggggaaatcagataaatatataaatgtaggagattttttggtcagacctttttatcccattcaatatcaaattattcatagtggagagaaagcttatacataaatttttgttttgttttgtttttgagactgagtctcactctgtcacccaggctgaagtgcagtggtacgatcttggctcactgcaacctctgccacctgggttcgagcgattctcctgcctcagcctcctgagtagctgggaccacaggtatgcaccaccacgcccagctaattttttgtatttttagtagagacggggtttcaccatgttggccaggctggtctcgaactcctaacctcaggtgatccgcccacctcggcctcccaaagtgctgggattacaggcgtgggccactgcgcctggccataaactttcaatgcgtagaaaccaaattaatttagaccttaaactagcagcatattacattcccaggaggggttataaaaagaaaaaataatttattttacaaatgagattatatttggagtcatgttccaaatctgatataaaactttttaaaaaatcagaagtccttatccaggcatggtggtgcacacctgcaatcccagctactctggagactgaggcatgagaatggcttgaacatgggaggtggaggttgctgtgagctgagatcacgccactgtactccagcctgggcaacagagcaagactctgtctc

SEQ ID NO: 220451 - DNA, 1000 bp, Homo Sapiens
tgcagtgcacggccgcccgactgtgcacccgcaacggggaactgaacgctgcatgaagtacatctccaagttgttctttaagaaggcttagggtccctggaagaccctcgcccacacccagcgtggagcgttgttgctcacgtggccacacctctcgggatggccgtgggtctccgtgatgggcaggcgagtggaaccacaggtgcttcccgtcctggtcacaaagtcagagtggctgggccaagtgtcctgagaagagtcacctcctgggatcccatcagcctggccatagcagaacacccagacaggggcccatccccgaggctcaactcaacgcatgcagccaccgtagaaaagtctggaaagtagttcttcaaccgactagacatggtgagcccaaaacccagccatgacactcctaggcatctgccccagaggaatgaaagcatccatcccctgcaaactcatccttacacagcagcgtgactcaagacggccaaaggcggaaacaccccaaacgtccatcagtggacaaacgggcagatgcaatgcactgtctgtaccgtgggatgtcactcagccatatgaaggaaagactccagtgtggatgagccctggaaccacggtgctgcgtgatcccgtaacacatggccagaacagacacggcccggaacctgaggccgggaggatgcgtgcaggtggcggggagacagaggggcgatggcccagtttcttttgggctgaaaatggtctaaagttgactgtggtgatggctgtacaactctgaatatgctgaaaactcgaattacacacttcagttgggcgaactgtactccatgtgaattacctctcgatggttctctcctgggctcaggcgcttctcccaccttggcctcctgagtagctggaactaccattcatgtgcggaaataaaacaactcggtctcaaaaaaactcaactcaaaactcagtctcaaaaaaataaaaaagtaaaagaggc

SEQ ID NO: 220452 - DNA, 1000 bp, Homo Sapiens; identical to SEQ ID NO: 119067

SEQ ID NO: 220453 - DNA, 1000 bp, Homo Sapiens
atatttttagtttttatgtgagtgatggaaccagtcgttcagaaattcacagcatcaatatcaccattgaggtaaagactttggaagttggaaaggttgagcccttgaccacaatatttcacaccattagagagctttctttatagggactcaaaagcaaagaagattggatttgaccttcaaaattgaaggtcgttcttaaaatatagccttcaggaatcttgtagaattaaggttggcatttggggaaggcttgagttagaaatctaaatttccatttcaggattgaatttatttgttcggtgtgaaaaacagtttgtgaaggtcagagatgctttgccagtctcatatataaatgaaaacttacatatgtctatgtttctctgaaattgtgtttggttctatatgcatatttgccttttcttattttactgcatttatttatttaattgtaacatcaaagaaatgtgttccttgatgctgtatttattctcatttgagcaactacacaggcttgctctaccgagagagagacacaggggaggggaaagataaatctcagaatgaaataccctctgccttgggaaaataaaatgtaaagaaccctctgcactcttaagggtcagtggtggaaaggggctggcaccagggcagggagacagctttagagacccacactttcaaatatagtgtccttctacaggtactgtggtatgcttagcattttctaagagagttctgagttatattagtatggtcttttatcttcaaagtatgttaatacttgtacttgtcaaagcacatatccatatttttggtctagaaaatatggtcattgtacttacggaagatatctgagaaaacttttatgaaatgtccatcagcttcttttgaagggggcattttgttgcctggacttgctctcttttcaaactaactattttgcttgggaagtaaagatggtgccacattaaatgctattttgaggtgaaaaaaaaaa

SEQ ID NO: 220454 - DNA, 1000 bp, Homo Sapiens
tcagaataaactcacttcttgcccaattatgacagttcattcaccttctactcaagggagactttaagagttgttgaagttgaacttctcaggttcttatacttagtgacactgttcatgcaatggctcagtatttcttgatttctcagaaccagcaaaagtcacaaactgaatcctcaaattggaattcgtaagtgactaacttgtagcataactttattatactaggaaagatggggcaagggacagaaaaaatatctgtaacatcttatatgttcaaatataagcgctttatgtatatttagtcattcaaactccaaatacacattaagaagtagtcatcaatattccactctctaattctacaatttctacctttttagattccacatataagtgagatcatatggtatttgtcgctctgtgcctgacttatcttacttaacataatgtccttaggttcatccctgtttgaaaatggcagaattgcctgtttttttttttaaggctaaatagtatcctattttgtatattcagcacattttaaaaaatctgttcatcagctgacggacacttaggttgattccttatcttggctcttgtgaataatgctgcaatgaacacaggagctcaaacatccctttgaaatactgatttaaatatctttgggtataaacccggaattggctgtggggagttagacagggaaaatgtccacattgctctacggatacaaagtttcagttaggaggaataattctggtgttctattgcacagcacagtgtctatagttaatagtaatgtattatatatttcaaaatagctaaacaaagagaattttaatgttctcaccgcaacgaaataattgtttcagaaaataaatatgctaattagcctgatttgctcattccacagtgtatatacatgtatcaaaaagtcacattgtaccccataaatatacaaaattatttgtcaattacaataaaacttttaaaaagt

SEQ ID NO: 220455 - DNA, 1000 bp, Homo Sapiens
gtgtgttagactctgacagtggcgttgagttcacaaaccaggttgttcatgagctcaatgagttgtggccagacctaaagattgtatctggtaagtaccaccctggccaaagccagggctccctggaaggagcaagccgtgatgtaaagaacatgataagtacctggatgcagagtaaccactcatgtcactgggccaaaggcctccgattcatgcagatggtgaggaatcaggctttcgacgtttccttgcagcaaagtccatttgaggcaatgtttggctataaagccaaatttgggctatattcctcaaacttgccccgggaaactgtggctactttacaaacggaagaagagctagaaattgctgaagaacagctagaaaatagcctttggatcaggcaggaagaaagggctgagattggagcagacagatctgatatggacgatgacatggatcccactcctgaagcttcagaacccagcacctcacaagggacttccggtctcctctgctggtgaacagatggctgctgggtggacagtcacaggtgtctctctgagcatagtcatctgagaactgttgccagaggccccagaggaaaagattgaaggctgcactctcaggtcaagttgtacatggcagtccttgctcaaaaagacaaaagttcaggtctgtgtatttattcttagggctgccataaaaaattaccacaacctggccgggcgcagcgctcatgcccgtaatcccagcactttggtaggccgaggtgggcgggtcacttgagatcaggagttcaagactagcctggccaacatgatgaaaccctgtctctactgaaaatatagaaattggccaggcttggagctgtgtgcctgtaatcccagctaaccaggaggctgaggcaggagaatcacttgaacccgggaggcagaggttgcagtgagccgagaccatgccactgcactccggcctgggtgacaaagcaagactctgtctc

SEQ ID NO: 220456 - DNA, 1000 bp, Homo Sapiens
agggcgtctataaaaaacccacagctaaaatcaaacttaatgaagaaagactgaagactgaatgcttttctcctaagatggggatcaatgcaaggatgtccaatcccaccacttttatttaatattatactggagattgtatccagtgcaataaggcagaaaattaaaaattaaaggcatccagataaaaaggaaaacatacaattctattcacagataacatgaccctgtctgtagaattcacaagcagataaaaactggctagcactaataaatgaatccagaagggcccataggatatcaaatcaatataaaaattaattattaacatatttctctatagaagcaatgaaaatctcaactttcctatcacagtagttaccagaagagcgaaataggaataaatttaggaagacagcagtgtttgttcactgaaaataaaaaaacattcctcagagaaattaaaggtctaaataaatggagagatgcgagttggaaagctcgataatactgttaagatggcagttctcccccagtagatctataggttcaacacaatccctatcaaaatcccagcaggattttatagaaaattgacaaaataggccgggcgcggtggctcatgccggtaatcccagcactttgggaggctgaggcgggcggatcatgagatcaggagatccagaccatcctggctaacacggtgaaaccccgtctctactaaaaatacaaaaaattagccgggcgtggtggcaggctcctcgggaggctgaggcagaaaaatggcatgaacccggtaggcagaagttgcagtgagcggagatcgtgccactgcactccagcctgggtgacagagcgagactccgtctcaaaaaaaaaaaaaaaaaaaaagaaaagaaaaaaagaaaagaaaattgacaaaataatcctaaaaatgtatatgaaaatgcagaggatgcagaagggccaacacaaatttggaaaaaaaaaaaaaaaaaaa

SEQ ID NO: 220457 - DNA, 1000 bp, Homo Sapiens
ttgtgtaaccacattcgagatacttaaaaccactattatcaaaagacactcttattgccacccttttagccacagtcacctcagaccctcaagcctaactcttggcaatcacaatctgttttccacctctctgttagttcatggtattacgtaaatggcgtcatgcaatgtatgttcatccttttgagattggcttttttcactcaggataatttccttgatgttcatccaagttgtgtgtgcctttttattgctgagtagtattccatggtatggacatgctacaatatatttaaccatacatccatcaaaggacattggggtagtttctagtttttcaaacattattattattattattattattattttgagatggagtctcattctgttgcccaggctggagtgcagtggcacgatcttggctcactgcaacctccacctctggggttcaagcgattctcctgcctcagcctcctgagtagctgggattacaagcatgcatcaccaggcccggctaatttttatatttttagtagagacagggtttcaccatgttgacccggctggtctcaaattcctgacctcaggtgatccacctgcctcggcctcccaaagtgctgggattacagacatgagccaccacacctggcctgattttttaaatagcaaattttgaaagttatttacatattataggaataagtcctttgcctgctatgcgccttgcatgtatttttctcccagtctataatttgtcttttcatcctcagggtctttgacagagtaaaatatttttatttggatgacatccaatatatcaatgatgaaactgttctatatcttgactctatcaatgtcaatatccttgttgtgatactgtaccatatagttttgcactatgctaccactgggggaatctggtaaggagtttacaggatctctctgtattatttcctacatgcatgtgaatatacaattatctcaaaataaaaagctt

SEQ ID NO: 220458 - DNA, 1000 bp, Homo Sapiens
cacacaggagagtgtgtcccttctgctgctgcagctgcggtgacagtgtcaatgagaagacctccctctcccagcgcgtccttccgcacccaggggagaagacctgcaggggtgggagcgtggagagcgtcagcctcgcacccagctcagtcgccccggacagcacctctgggctccggccctgtgggagccccgggtccttccttcaacatctgcccccatccacactcctgccccgacctcccttcctttatcctggccccccactcagtctccagcctctggttccatccggccttcccgcagtgcctgcagtgcctctgggaggcctggaagttgcccaggttccgccagccacccagccggcagctcagcaggagggggcgatggggcccagaagctgtgcgagcgcgggacgggactcgcgggaggcggttcaggccccaggctaccctgagccagcccggaaggcctcgcagcacagagcggccggaccgctcggcgaggccagggccaggcttcagcgacagtgccgagctcctccaccgccctcgaacccacactggagaggagccctaccagtgtttccggtgtggaaggcctccagccggaggtccaacctggcccgacactgaagaaccagcgtgctgcagccctgggtggaattgttgcagccgccggtggactgtggatctgagatgcagtcccctccctccacacagacccgctcaggacggcttttctgtatggcagatctttctcagaagtgctgggggctattttgtttgttttttttcccctgaattctcgctcctttcccttatacattaagggatttaggcaggtgcggctgcgggcggtgactcacacctgtaatcccagcgctttaagagaccgaggtgggaggatcgcgtgagcccgaagaatttgagactagcctgggcagcctagcgagaccgcatctctgtgaaataaaaataaaacgagctggtgtggtggc

SEQ ID NO: 220459 - DNA, 1000 bp, Homo Sapiens
cagcattttggactatcgtgctgtcattgagaaaattccagaggacgacaaacctagtttctttggtctgcctgccaatatcgctcgctcatctcagcgcatgatcagttctcaggttatttcacagttgaggattttgggcagatccataacagctggttccaaatttgatagagaaatctggtctaatgaactttctcctgtcctcaatctctggaagaaactaaaccagaattcaaacctaatacatcagaaagtgcctcctcctaacgatcgacaaggatctccaatactgtcattcatcattcttgaacaatttaatgctattcgtttagtacaaagtgtccaccagtctcttgctgctctcagcaaagtcatcagaggaactactttactgagttcagaagtacaaaaattggcaagtgctttattaaaccaaaagtgtcctctcgcatggcagagcaagtgggaaggcccagaagatcccttacaatacctgagaggtcttgttgcccgtgcccttgcaatacagaactgggtagataaagctgaaaaacaggctcttctctctgaaacacttgacctatcagaacttttccatccagacacatttcttaatgctcttcgccaggaaactgcaagggcagtgggtcgttctgtggatagccttaaatttgtagcctcatggaaaggtcgactgcaagaagcaaagctacaaattaagatcagtggcttgttactagaaggatgtagttttgatggaaatcaactttctgaaaatcagcttgattctcccagcgtgtcatcagtgctcccttgttttatgggctggattccacaggatgcatgtggtccatattctccggatgagtgcatctctttgcctgtttacacaagtgctgaaagggatcgtgtggttaccaatattgatgttccatgtgggggcaaccaagaccagtggattcagtgtggagcagctctattcctaaaaaatcagtag

SEQ ID NO: 220460 - DNA, 1000 bp, Homo Sapiens
agcgaggtcaggttcaggccccgcaggctgcccgccgccacctcctccagcagcggccagttgtcaatctccaggtgcagcagcccgggcagcctgcggaagttctggtcctccagggaggcgatggccaggtggcgcagccgcagggcgcccaggctgcgcagatggcccagcgactccccggacagagccgtgaggttgcagcgctccagggtcagctcctccagggccagcagccccgcgaaggcgcggcgcgagacgaataccaggtcgttgtcgcccacttccagccggcgcaggctgtgcaggtcctggaaagtgtagtccagcaggattaccagcttgttctcgctcaggtccagcagcgtgaggttgtccaggcgcgtgaagaccccgggcgggatgagcttcagctggttgccacggagacgcaggacgcgcaggcgcggcaggttggcgaaggcgccgggctccacgtgcgcgatggcgttctcgctcaggtccagctcctccagcgcgggcagcgcggccaggtcgcccgggttcaggcagcggatgcggttgcggctgagctccagcaggcgggtctcggccgggatgccgtcgggcacggcggtcaggcggcggcgcgtgcaggccaccgcgcgggtctgcacggtgcactcgcagcgggccgggcagcctccagccgggggcggcgccgcgggcagcaggagcaggggcaggctcaggacgcacagccagcaggtcatggtgcggagcgtgggcctagggccgcgccaccatcctcctgcgcacctgcgggcgggcggggagcgggcagcgttagcaccgttagcacccctccgcggcgcctctgccgccagcccgcccctaacccgtcccagcacggcggctcgctcctgtaaacccagcattttgggaggctgagatggaagaattgcttgagttcaagagttcgagaccagcctgcacaacatagcaagactcccatctctac

SEQ ID NO: 220461 - DNA, 1000 bp, Homo Sapiens
atccccttcctttacagtcatcccctccctgacacacaggcctgtgccactggtgccagcctggatgcaggctgggtaggtctggcagtcaggtgatggtggggcctctggcagcctcacccctctggaagtgtggctgagaatgtgctgagagggctgggccagaattttcctgggccactgggggagctgtggtgtttattcacattaggaaaaagaagaaggaaaaagaaagatggaaaataaggtgggagctgctgagcctgagggaggatgagctggcttctgagcagacaggtagggcccctttccaggtgatggttcacagaggcagagtgggcagggacaagggagcctctgggtccagaaaatgcccagaggaaatggaaccatttcacagagaagacacgacaggataggataggtaagagaagaaaactaaatccaaggtgggggcagtaggtacagagccatctgttagctggagagttgaggcaggcagcaaagactgggaaagacacaccaagaaaaggcagagaggccaggatggtggaagagggccagacaaagaaggagtgcaaggtagcggcctaagctaggcctttgtcccaatccaagggaaagtggggaggagccagctctcaggactgtggctggaggctgggtctgctataatgccttcctatctggctagttcctcttcaattaggagtgagaggccaagcgtggtggctcacgcctgtaatcccagcactttgggaagccaagatgagtagatcacctggcatcaggagttcaagaccaacctggccaatgtggcaaaaccctgtctccactaaaaaatacaaaaattagctgggcgtggttgcacacgcctgtaatcccagctgcttgggaggctgagggcaggagaattgcttgaacctggaaggcggaggttgcagtgagccgagatcacgtcactgcactccggcctgggtgacagagccagactccatct

SEQ ID NO: 220462 - DNA, 1000 bp, Homo Sapiens
actccagcgcaaagcatgtttctccttttgagctgcggaagccttgcttgttcccgccattgggagggcattccatcatctgcagctgccttcctcggtgggccttgtcccttagcgtccacctaggggacattctaagcttcttgagacctgcttgtccaccccaacatgtctcagcatatggctgtgccctaaggggtctttgagggcattttaggaggtgagcggcgcccctacctgggctccgcggggccgattcggtttgccctttgctggcatgtcagtgaattaactgctgtccttgggatgacctgccctatgatttggcctctggagcatcccgggtgtgtatttcagaactcctcccatcttatccacctgctgaaggcctggccccctgatatggtttggctctgtttccccacccaaatctcaccttgaattttaataatccccacgtgtcatgggcgggaccaggtggaggtaattgaatcatggaggtggtttcctgaacgctgctctcgtgacagtgagttcacaagatttttttttttaacggagtatcactctgtcactcaggctggagtgcagtggcgcgatcttggttcactgcaacctctgcctcccgggttcaagagattctcctgcctcagcctcccgagtagctgggattacaggtgcgcgccatcacgcccggctaatgtgtatttttagtagagaaagggtttcaccatgttggttaggctggtctggaactcctgaccttgtgatctgcctgcctcggcctcccaaagtgctgggattacacgcgtgagccactgtgcccagccgatctgatgcttttataaagggctttccccgtcccccttcctctctctcaccaccctgtgagaaaggtgcctttcttcccccttcacgtgaactgcctccatgattgtaagcttcctgaggcctccccagctataaggaactgtgagccaattaaactgctttataaatt

SEQ ID NO: 220463 - DNA, 1000 bp, Homo Sapiens
gagccacgatgagagtggggagggagcccgcgcttctcaagctcaaatgcctaggagtcctttggagatggcgttcagatgcagattcttgttccatagatctggctggagcccaaagttctgcagctggcgggctgattcagaaaacatgagttggtgcttttcctctttttgccgccgtactccattgagagtcttagtcatggagggaaacccgaaaaccaccggtgtccgggacagatactctgacgcattctcccggaacaccctggggactgcgagaaagcccctgctggctcactcgtttgctgggatcagttcccatcaggcatgcggctgtgcttcttggtatcgatttgcttcttggtcccatggcttctgcagcccacgtcgggagggcaaggtgtggtgcagcctgagagaagcatgctcctttgcaggaaggagagggaggcgcacaggcgggccttttggagcagaggaggcagaggagtccaagctgggtgcagttcctctgctgcagccctgagctgggcagacaggacacttcgctggcctttcctggcctcatacttgtcactcggtgacactgcgaccagtgtgagcaaacgttcagaaagcacatttaaacactgttacttaaaattgcaacttcacagggccagtattctttttaccatgttccaaatgaggaaaccggggtgctgaatgattaagtgacttatccaagaccacagggcttgcaaatggcaagtgggaggattgtttgagcccaggaatctgagaccagcctgagcaacatgatgagaccccatctctacaaaaaattaaaacattagctgggtgtggtggcgcatacctgtggttccagctacttgggaggctcaggcaggaggattgcttgagcccagtaggtcgaggctgcagtgagctgtgattgtgccactgcactccagcctgggccacagaacaagacttcatctcagaaaaaaaaaaaaaa

SEQ ID NO: 220464 - DNA, 1000 bp, Homo Sapiens
ctttgcactctcagaggcccagcaagcccccctgcccccgcaggctcagtcgtacctggtcccaccacctggcatctctccactcccagagtccactccaacttcggatccaagttgaggctgaacccaggcacagtcgcaacccggcccagtttgtgcaagctcagggcagtgctgacatgccagccccctgccacctcggccccctccagactttgggcagtgacgagcacaagacggaggttgaggtggggctaagagtggctcagcactggcctgaaggcactcctcagctcgaacagcctcggcaatgtgggcacagctaaccacagtgtgtctctctcagctgctgagagctgaaaagacgttgggatgacctgcctgcagaaaggagttacccactgcagttctcctctgagctgtactgttgttcaataaagcacctcttcaccttgctcaccttctacttgcccacatacctcattcttcctggactcaggacaagaactcgggacctgccaactagcagggctgaaagaggtgtaacataaacagggctgaaacgccccccttgcttgccaaattgcaggcaagaagaagagaagagagaaggagacaagagctgtggcccttcagggagcccagacctaggagctccctaagccagggctgtgatgtcttctttggggctctgcagttcctgcatctccaagtttctgggcgccactgcattccctgatacacacagtggaagctgtttgcagtcggtctggtccagctgcagcctcacagggagctggcatctgtgccggtacctggagctgcccacctcactgcagctggcatgcttggctgtgtgcagtggccagatcccatgcttgcttgctcacacacccttcactgctctgtacccagctcacccttggcaggtgtgggatccacaccactagcatgagccgagtggatggaatgaacccagtgggcccgagcaaaacacagg

SEQ ID NO: 220465 - DNA, 1000 bp, Homo Sapiens
gtaatgatgcttttgttgaagtaggcatgcctcgaagtccttcccattctgggaatgctggtgacttgaaacagatgatgtgtccctccaaggtttcctgtgccaaaaggcagacagtggaactattgcaaggcacgaaaaactcacacttacacagcactgacaggttgctctcagaccctgaactgagtgctaccgaaagccctttggctgacaagaaggctccagggagtgagcgcgctgcagagagggcagcagctgcccagcaaaactccgaaagggcccaccttgctccacggtcatcatatgtcaacatgcaggcatttgactatgaacagaagaagctattagccaccaaagctatgttaaagaaaccagtggtgacggaggtcagaacgcccacaaatacctggagtggcctgggtttttctaaatccatgccagctgaaactatcaaggagttgagaagggccaatcatgtgtcctataagcccacaatgacaaccacttatgagggctcatccatgtccctttcacggtccaacagtcgtgagcacttgggaggtggaagcgaatctgataactggagagaccgaaatggaattggacctggaagtcatagtgaatttgcagcttctattggcagccctaagcgtaaacaaaacaaatcaagtgagcgttgtgttttatgcacacttttaggtatccccagattagaatgtgtttatttgggttggagtatcactgactgtggcctctctgacttcaagtgcttggtgtaattcacatgccatctcctctgtgaagcctccttgtttctcccagtgaagcaggccacctggttctctttcctctcactccattttgtgcgtgctttcactctagcacttgccataccaaagggcaattatttatctacctatctgtatctccttgtgaaatttgtgctccacaaaccaaagactgtatttgttcattttataaacatttatgaagtgtc

SEQ ID NO: 220466 - DNA, 1000 bp, Homo Sapiens
gcataaacgtcatccctcagagacgctgactcgatctctaataaaagctatcagcctgtccccctttactacgagacccctcttagctctgcagagcatccatcacagttaggcatttttgcctttttttccatccacccacgcttcccaccccaccaggacgtgagcttggacttcatcttgtcatcccagcagcaaggagtcgattttgcaggatggatggaaaacacagagaggaccagctgtttcatttctaggcacctcacttctaacctggaaccggttccgagaggaaggaccaggaagacccatgtgtcgggaatggtggacagaaggagtgtgctcagctgccgccgagaagaccacacgctgggtgctgaaaagatggggggacctgctaggaaccatggccctgggctaagtcggggatgaaggcgggagctgctgtgctggactgcagctcagcacagagacagtgagcctagattgcagagctgcccagggagggatgtcaccttgggggatggaggctgcaggtgctcctcagaccttagggaaacatttgggagggagcttgttgaggagatacaggcacctcagggtggctgggctggatggactttgatgacccttccttttttgagacctgatggttctctaatttgggaatcatttccaaagatgggtctaaaaatccttgtttcattggaaataatgagtttgctatgatgcttaagaccaagcatgtcaccatttgttattactgcacttttccctgccgttttcctttccttttatttttaatggatgatgttaggttgcaatgacattttgtttctatataaatatttaaaggtcttcataaacatataaatgtcttcatacatttttgtttgcttctagaacaatgtgtatcctactattgtatttttgctacagtatatgaacgtggaggtgtgcataagacagtaaaacactattcaccaaaagataaaaaaga

SEQ ID NO: 220467 - DNA, 1000 bp, Homo Sapiens
aatattttagatttccagtattttaaggatttttggtctccttactgttcctccctgccctattcccatacccagtaagtttggtttagctcatttaaactgatgcatatttttaaaaagggcatatgttgctttttttaaaaaaaatcaagttttattgaggtatgatttataagtaaaaaagtaatttttattatattgctgtataaagtctgacaaatgcatataatggaaccactgccacaatccagacaaataatattcccatcattctaaagtttcctcccctcactcataggtcctagcaaccactgatctgttctctgtccctgtctatagctttgtcttttctggtatgttatgtaaatggaatcatacagtatgtagccttatgtttcaggtttctttcacttaatgctttgattcatccatgttgatgcatgtttgttgatgcttggttgttttttacagctgagtagtatttcattgtgtgaatatatcatagtatgtttattcgccatttgatgaacaatttttggcatttaggaatgaaggtactgtaaacattcatgtgctgttctttgtacattaaggtgcaagtctttgtgtagacatatgttttcatttcttttggttacacatctaggaatggaattcttgggccgtgtgcaagtgcatgtttaaccttaaaagaaattaccagctgggcgcagtggctcagacttgtaatcccagcactttgggaggccgaggtgggcagctcacgaggtcaggagattgagaccatcctggtcaacatggtgaaactccgtctctactaaaaatacaaaaattagctgggcgtggttgcgggtgcctgtaatcccagctactcaggaggctgaggcaggagaactgcttgaaccagggagtcggaggttacagtgagctaagatcgtgccactgcactccagactggtgacagagtgaaactccgtctcaaaaacaaaaaaaaaaaaaa

SEQ ID NO: 220468 - DNA, 667 bp, Homo Sapiens
gaagactgtttgtccagcgtgtatttcaggatatctggatcccttttattgactcacaatttgtggcaccactttctcatcccagaacttcattcttatttctctcctcatctggcctcccaagtgctccgttgagctgatgaaaagttctttgtactccctcaacgtgtcggaaacaggaggccacacagcacagctttgtttggggtgggcaggagtcaggagtcttgagcagatgcatcactgtgaagaagaacgacatgtcggggctgcacctgtcctcccgtcggcatttgacgaaagctccctgaagcggggcagcactctcctcctgagagatttaccatttattgcccctgtgaggaatgtgtgcttgggaactgccaagtcttaccccttctggaagaagaggttttctctgacaagagcctagagcgtcggctctattatgctgggacttgacagaggagccatggggtttaaacagtaggaaagaggagccacggtgcccagcccatctcttagtcttccattcccttggtgaatttggaaacttgaaaaacttggggacttgacagcaggctccatgttcttctggcctcactgtactgtgtaaggaaagagctgcttgtcaggaacggaagaggggacgctagtaaaaaaaaaa

SEQ ID NO: 220469 - DNA, 1000 bp, Homo Sapiens
aaccctggacatgggccgcatcggcatcgcctcccaggccctgggcattgcccagaccgccctcgattgtgctgtgaactacgctgagaatcgcatggccttcggggcgcccctcaccaagctccaggtcatccagttcaagttggcagacatggccctggccctggagagtgcccggctgctgacctggcgcgctgccatgctgaaggataacaagaagcctttcatcaaggaggcagccatggccaagctggccgcctcggaggccgcgaccgccatcagccaccaggccatccagatcctgggcggcatgggctacgtgacagagatgccggcagagcggcactaccgcgacgcccgcatcactgagatctacgagggcaccagcgaaatccagcggctggtgatcgccgggcatctgctcaggagctaccggagctgagcccgcggcggactgccccaggactgcgggaaggcgcgggagccaggggcctccaccccaaccccggctcagagactgggcggcccggcgggggctccctggggaccccagatgggctcagtgctgccacccagatcagatcacatgggaatgaggccctccgaccattggcagctccgcctctgggcctttccgcctcctcaccactgtgcctcaagttcctcatctaagtggccctggctcctgggggcggggttgtgggggggctgagcgacactcagggacacctcagttgtcctcccgcgggccctggtgccctggcatgaaggcccagtgcgacaggcccttggtggggtctgtcttttccttgaggtcagaggtcaggagcagggctggggtcaggatgacgaggcctggggtcctggtgttgggcaggtggtggggctgggccatggagctggcccagaggcccctcagccctttgtaaagtctgatgaaggcaggggtggtgattcatgctgtgtgactgactgtgggtaataaacacacctgtccccc

SEQ ID NO: 220470 - DNA, 1000 bp, Homo Sapiens
aaggcccggtccatcctgtgctgcatgcgccaccagcccaactggtcccccaaggtggtggagctgtgtaagaagtaccagcagcagaccgtggtagccattgacctggctggagatgagaccatcccaggaagcagcctcttgcctggacatgtccaggcctaccaggaggctgtgaagagcggcattcaccgtactgtccacgccggggaggtgggctcggccgaagtagtaaaagaggctgtggacatactcaagacagagcggctgggacacggctaccacaccctggaagaccaggccctttataacaggctgcggcaggaaaacatgcacttcgagatctgcccctggtccagctacctcactggtgcctggaagccggacacggagcatgcagtcattcggctcaaaaatgaccaggctaactactcgctcaacacagatgacccgctcatcttcaagtccaccctggacactgattaccagatgaccaaacgggacatgggctttactgaagaggagtttaaaaggctgaacatcaatgcggccaaatctagtttcctcccagaagatgaaaagagggagcttctcgacctgctctataaagcctatgggatgccaccttcagcctctgcagggcagaacctctgaagacgccactcctccaagccttcaccctgtggagtcaccccaactctgtggggctgagcaacatttttacatttattccttccaagaagaccatgatctcaatagtcagttactgatgctcctgaaccctatgtgtccatttctgcacacacgtatacctcggcatggccgcgtcacttctctgattatgtgccctggccagggaccagcgcccttgcacatgggcatggttgaatctgaaaccctccttctgtggcaacttgtactgaaaatctggtgctcaataaagaagcccatggctggtggcatgcaaaaaaaaaaaaaaaaaaaaaaaaaaaaaaaaaaa

SEQ ID NO: 220471 - DNA, 1000 bp, Homo Sapiens
tttccagcaaaactccctcaactggatgaagaaactatctccccggaccatccacctgaccatgccccaactggtgctgcaaggatcttatgacctgcaggacctgctcgcccaggctgagctgcccgccattctgcacaccgagctgaacctgcaaaaattgagcaatgaccgcatcagggtgggggaggtgctgaacagcattttttttgagcttgaagcggatgagagagagcccacagagtctacccaacagcttaacaagcctgaggtcttggaggtgaccctgaaccgcccattcctgtttgctgtgtatgatcaaagcgccactgccctgcacttcctgggccgcgtggccaacccgctgagcacagcatgaggccagggccccagaacacagtgcctggcaaggcctctgcccctggcctttgaggcaaaggccagcagcagataacaaccccggacaaatcagcgatgtgtcacccccagtctcccaccttttcttctaatgagtcgactttgagctggaaagcagccgtttctccttggtctaagtgtgctgcatggagtgagcagtagaagcctgcagcggcacaaatgcacctcccagtttgctgggtttattttagagaatgggggtggggaggcaagaaccagtgtttagcgcgggactactgttccaaaaagaattccaaccgaccagcttgtttgtgaaacaaaaaagtgttcccttttcaagttgagaacaaaaattgggttttaaaattaaagtatacatttttgcattgccttcggtttgtatttagtgtcttgaatgtaagaacatgacctccgtgtagtgtctgtaataccttagttttttccacagatgcttgtgatttttgaacaatacgtgaaagatgcaagcacctgaatttctgtttgaatgcggaaccatagctggttatttctcccttgtgttagtaataaacgtcttgccacaataagcctccaaaaaaaa

SEQ ID NO: 220472 - DNA, 1000 bp, Homo Sapiens
ggagcagccaagtttgtcttcaggcacaatgaccctgaccacctaaagaaacttctagagaagtctaaccctaagatacccaaaattgtggcctttgagactgtccactccatggatggtgccatctgtcccctcgaggagttgtgtgatgtgtcccaccagtatggggccctgaccttcgtggatgaggtccatgctgtaggactgtatgggtcccggggcgctgggattggggagcgtgatggaattatgcataagattgacatcatctctggaactcttggcaaggcctttggctgtgtgggcggctacattgccagcacccgtgacttggtggacatggtgcgctcctatgctgcaggcttcatctttaccacttctctgccccccatggtgctctctggagctctagaatctgtgcggctgctcaagggagaggagggccaagccctgaggcgagcccaccagcgcaatgtcaagcacatgcgccagctactcatggacaggggccttcctgtcatcccctgccccagccacatcatccccatccgggtgggcaatgcagcactcaacagcaagctctgtgatctcctgctctccaagcatggcatctatgtgcaggccatcaactacccaactgtcccccggggtgaagagctcctgcgcttggcaccctccccccaccacagccctcagatgatggaagattttgtggagaagctgctgctggcttggactgcggtggggctgcccctccaggatgtgtctgtggctgcctgcaatttctgtcgccgtcctgtacactttgagctcatgagtgagtgggaacgttcctacttcgggaacatggggccccagtatgtcaccacctatgcctgagaagccagctgcctaggattcacaccccacctgcgcttcacttgggtccaggcctactcctgtcttctgctttgttgtgtgcctctagctgaattgagcctaaaaataaagcacaaaccac

SEQ ID NO: 220473 - DNA, 1000 bp, Homo Sapiens; identical to SEQ ID NO: 115068

SEQ ID NO: 220474 - DNA, 1000 bp, Homo Sapiens
cctacagcacgggaagcagcctgatgccccagaagaaaaaccccgacagtttggagctgatccggagcaaggctgggcgtgtgtttgggcggtgtgccgggctcctgatgaccctcaagggacttcccagcacctacaacaaagacttacaggaggacaaggaagctgtgtttgaagtgtcagacactatgagtgccgtgctccaggtggccactggcgtcatctctacgctgcagattcaccaagagaacatgggacaggctctcagccccgacatgctggccactgaccttgcctattacctggtccgcaaagggatgccattccgccaggcccacgaggcctccgggaaagctgtgttcatggccgagaccaagggggtcgccctcaaccagctgtcactgcaggagctgcagaccatcagccccctgttctcgggcgacgtgatctgcgtgtgggactacgggcacagtgtggagcagtatggtgccctgggcggcactgcgcgctccagcgtcgactggcagatccgccaggtgcgggcgctactgcaggcacagcaggcctaggtcctcccacacctgccccctaataaagtgggcgcgagaggaggctgctgtgtgtttcctgccccagcctggctccctcgttgctgggctttcggggctggccagtggggacagtcagggactggagaggcagggcagggtggcctgtaatcccagcactttggaagggcaaggtgcgaggatgcttgaggccaggagtttgacacagcctgggcaacacagggagacccccatctctactcaataataaaacaaatagcctggcgtggtggcccatgcatatagtcccagctacttgtaaggctgaggtgagaggacacttgtgcccaggagtggaggctgcagtgagctatgatcacgccactgcattccagcctggataacagagtgagaacctatctctaaaaataaataaataaacgaaaaataaa

SEQ ID NO: 220475 - DNA, 1000 bp, Homo Sapiens
tctgttcaagtattctaatcaatggctttgaaaagtttatcaaatttacatacagatcacaagcctaggagaaataactaattcacagatgacagaattaagattataaaagattttttttttgtaattttagtagagacagggttgccattgtattccagccttggcgacagagcaagactctgcctcaaaaaaaaaaaaaaaaaggttttggcaagctggaactctttctgcaaatgactaagatagaaaactgccaaggacaaatgaggagtagttagattttgaaaatattaatcatagaatagttgttgtatgctaagtcactgacccatattatgtacagcatttctgatctttactttgcaagattagtgatactatcccaatacactgctggagaaatcagaatttggagaaataagttgtccaaggcaagaagatagtaaattataagtacaagtgtaatatggacagtatctaacttgaaaagatttcaggcgaaaagaatctggggtttgccagtcagttgctcaaaaggtcaatgaaaaccaaatagtgaagctatcagagaagctaataaattatagactgcttgaacagttgtgtccagattaagggagataatagctttcccaccctactttgtgcaggtcatacctccccaaagtgtttacctaatcagtaggttcacaaactcttggtcattatagtatatgcctaaaatgtatgcacttaggaatgctaaaaatttaaatatggtctaaagcaaataaaagcaaagaggaaaaactttggacagcgtaaagactagaatagtcttttaaaaagaaagccagtatattggtttgaaatatagagatgtgtcccaatttcaagtattttaattgcaccttaatgaaattatctattttctatagattttagtactattgaatgtattactttactgttacctgaatttattataaagtgtttttgaataaataattctaaaagc

SEQ ID NO: 220476 - DNA, 1000 bp, Homo Sapiens
atcgctctggggatctttttaactgtggaagcctcactatccggtccccttggggctgtgttggtcatggggctctctatcattctcagagtcctgaagcattttttgcccattgcccaggaatcaaggtggttatacccagaagccctttccaggccaaaggacttcttttgtcatgcatagaggataaaaatccttgtatattttttgaacctaaaatactttacagggcagcagcggaagaagtccctatagaaccatacaacatcccactgtcccaggccgaagtcatacaggaagggagtgatgttactctagttgcctggggcactcaggttcatgtgatccgagaggtagcttccatggcaaaagaaaagcttggagtgtcttgtgaagtcattgatctgaggactataataccttgggatgtggacacaatttgtaagtctgtgatcaaaacagggcgactgctaatcagtcacgaggctcccttgacaggcggctttgcatcggaaatcagctctacagttcaggaggaatgtttcttgaacctagaggctcctatatcaagagtatgtggttatgacacaccatttcctcacatttttgaaccattctacatcccagacaaatggaagtgttatgatgcccttcgaaaaatgatcaactattgaccatatagaaaagctggaagattatgactagatatggaaatattttttctgaatttttttttatatttcctccgacttacctctttttgaaaagagagtttttattaaatgaaccatcatgatattggctgaaaagttctacattctattattgtattgtaacacacatgtattgatgattttcattaagagtttcagattaactttgaaaaatattccacatggtaatcttataaattctgtttaattacatctgtaaatattatgtgtgtgatagtattcaataaagtaaaatcaaattgtcaaaaaaaaaaaaaaaaaaaaaa

SEQ ID NO: 220477 - DNA, 1000 bp, Homo Sapiens
aagagtgcaaaaatccagtcaggtatatttggaaaaggatctgcttattcacgacacaatgccgaaagactttttaaaaagctgatacttgacaagattttggatgaagacttatatatcaatgccaatgaccaggcgatcgcttatgtgatgctcggaaataaagcccaaactgtactaaatggcaatttaaaggtagactttatggaaacagaaaattccagcagtgtgaaaaaacaaaaagcgttagtagcaaaagtgtctcagagggaagagatggttaaaaaatgtcttggagaacttacagaagtctgcaaatctctggggaaagtttttggtgtccattacttcaatatttttaataccgtcactctcaagaagcttgcagaatctttatcttctgatcctgaggttttgcttcaaattgatggtgttactgaagacaaactggaaaaatatggtgcggaagtgatttcagtattacagaaatactctgaatggacatcgccagctgaagacagttccccagggataagcctgtccagcagcagaggccccggaagaagtgccgctgaggagcttgacgaggaaatacccgtatcttcccactactttgcaagtaaaaccagaaatgaaaggaagaggaaaaagatgccagcctcccaaaggtctaagaggagaaaaactgcttccagtggttccaaggcaaagggggggtctgccacatgtagaaagatatcttccaaaacgaaatcctccagcatcattggatccagttcagcctcacatacttctcaagcgacatcaggagccaatagcaaattggggattatggctccaccgaagcctataaatagaccgtttcttaagccttcatatgcattctcataacaaccgaatctcaatgtacatagaccctctttcttgtttgtcagcatctgaccatctgtgactataaagctgttattcttgttataccaaaaaaaaaaaaaaaaaaaaa

SEQ ID NO: 220478 - DNA, 1000 bp, Homo Sapiens
aaaggggagaaagagattgatgaccaaaagaactgcaaaaagagaagagccttggatttcttgagtagactgcctttacctccacctgttagtcccatttgtacatttgtttctccggctgcacagaaggcatttcagccaccaaggagttgtggcaccaaatacgaaacacccataaagaaaaaagaactgaattctcctcagatgactccatttaaaaaattcaatgaaatttctcttttggaaagtaattcaatagctgacgaagaacttgcattgataaatacccaagctcttttgtctggttcaacaggagaaaaacaatttatatctgtcagtgaatccactaggactgctcccaccagttcagaagattatctcagactgaaacgacgttgtactacatctctgatcaaagaacaggagagttcccaggccagtacggaagaatgtgagaaaaataagcaggacacaattacaactaaaaaatatatctaagcatttgcaaaggcgacaataaattattgacgcttaacctttccagtttataagactggaatataatttcaaaccacacattagtacttatgttgcacaatgagaaaagaaattagtttcaaatttacctcagcgtttgtgtatcgggcaaaaatcgttttgcccgattccgtattggtatacttttgcttcagttgcatatcttaaaactaaatgtaatttattaactaatcaagaaaaacatctttggctgagctcggtggctcatgcctgtaatcccaacactttgagaagctgaggtgggaggagtgcttgaggccaggagttcaagaccagcctgggcaacatagggagacccccatctttacgaagaaaaaaaaaaaggggaaaagaaaatcttttaaatctttggatttgatcactacaagtattattttacaatcaacaaaatggtcatccaaactcaaacttgagaaaatatcttgctttcaaattgacacta

SEQ ID NO: 220479 - DNA, 1000 bp, Homo Sapiens
ccaaatcccagtggggcaaagaattccttattgagaaggcggtgatctccccagggtttgatgtctttgccaaaaagaaccagggaatcctggagttctatggtgatgacatagctctgctgaagctggcccagaaagtaaagatgtccacccatgccaggcccatctgccttccctgcacgatggaggccaatctggctctgcggagacctcaaggcagcacctgtagggaccatgagaatgaactgctgaacaaacagagtgttcctgctcattttgtcgccttgaatgggagcaaactgaacattaaccttaagatgggagtggagtggacaagctgtgccgaggttgtctcccaagaaaaaaccatgttccccaacttgacagatgtcagggaggtggtgacagaccagttcctatgcagtgggacccaggaggatgagagtccctgcaagggagaatctgggggagcagttttccttgagcggagattcaggttttttcaggtgggtctggtgagctggggtctttacaacccctgccttggctctgctgacaaaaactcccgcaaaagggcccctcgtagcaaggtcccgccgccacgagactttcacatcaatctcttccgcatgcagccctggctgaggcagcacctgggggatgtcctgaattttttacccctctagccatggccactgagccctctgctgccctgccagaatctgccgcccctccatcttctacctctgaatggccacccttagaccctgtgatccatcctctctcctagctgagtaaatccgggtctctaggatgccagaggcagcgcacacaagctgggaaatcctcagggctcctaccagcaggactgcctcgctgccccacctcccgctccttggcctgtccccagattccttccctggttgacttgactcatgcttgtttcactttcacatggaatttcccagttatgaaattaataaaaatcaatggtttccac

SEQ ID NO: 220480 - DNA, 822 bp, Homo Sapiens
gggctgctccacgcttttgccggagacagagactgacatggaacaggggaagggcctggctgtcctcatcctggctatcattcttcttcaaggtactttggcccagtcaatcaaaggaaaccacttggttaaggtgtatgactatcaagaagatggttcggtacttctgacttgtgatgcagaagccaaaaatatcacatggtttaaagatgggaagatgatcggcttcctaactgaagataaaaaaaaatggaatctgggaagtaatgccaaggaccctcgagggatgtatcagtgtaaaggatcacagaacaagtcaaaaccactccaagtgtattacagaatgtgtcagaactgcattgaactaaatgcagccaccatatctggctttctctttgctgaaatcgtcagcattttcgtccttgctgttggggtctacttcattgctggacaggatggagttcgccagtcgagagcttcagacaagcagactctgttgcccaatgaccagctctaccagcccctcaaggatcgagaagatgaccagtacagccaccttcaaggaaaccagttgaggaggaattgaactcaggactcagagtagtccaggtgttctcctcctattcagttcccagaatcaaagcaatgcattttggaaagctcctagcagagagactttcagccctaaatctagactcaaggttcccagagatgacaaatggagaagaaaggccatcagagcaaatttgggggtttctcaaataaaataaaaataaaaacaaatactgtgtttcagaagcgccacctattggggaaaattgt

SEQ ID NO: 220481 - DNA, 1000 bp, Homo Sapiens
cccaaagacttgtgggctttgtcctccgaagagatctcattatttcaattgaaaatgctcgaaagaaacaggatggggttgttagcacttccatcatttatttcacggagcattctcctccattgccaccatacactccacccactctaaagcttcggaacatcctcgatctcagccccttcactgtgactgaccttacacccatggagatcgtagtggatattttccgaaagctgggactgcggcagtgcctggttacacacaacgggcgattgcttggaatcattaccaaaaaggatgtgttaaagcatatagcacagatggcgaaccaagatcctgattccattctcttcaactagaatcatagagttctggatgtaaagcgggaaggacattacagaccatggatatgttgtttaacggtacccaaaacacattttccatatttggatggtgaagtcacattagtgtgttgtctctttcctacaagttaaccagttgcactacataatctctggaaattaattttctctttaggagaaattatagttaggcttccatgatgttacattaggaagatatcatgaaagaataaataagattgctatggtttaattatatttgctttttaaaagatttttttaacttaaaaagtagttagccaatatgcaatcactgaaaactatgcaagagaaattccaaccgtcctgacctataacctgtaggaaaccgacgaaaaagtcactcttttgggatctaactgttgttactggaagacgaaggtaaactaaggggctttgcttttcaaaccagagaaaggaaagccagaaggaaaagagtaatggtattttctagactgtgaagattcagttcaaatgttatccttgttcctgttacaatatttagcattattagtttgttatgtgtgtatgtttatgttaattttaatttctgattataagacaatgctgctttggttaatctcttctaaaggaattta

SEQ ID NO: 220482 - DNA, 1000 bp, Homo Sapiens; identical to SEQ ID NO: 115075

SEQ ID NO: 220483 - DNA, 1000 bp, Homo Sapiens
tggtgagcttcagcagatgatggttgagtgctccaagtaccatggccagctgaccaaagaagcagcaatgggccagggctttgaccgacacttgtttgctctgcggcatctggcagcagccaaagggatcatcttgcctgagctctacctggaccctgcatacgggcagataaaccacaatgtcctgtccacgagcacactgagcagcccagcagtgaaccttgggggctttgcccctgtggtctctgatggctttggtgttgggtatgctgttcatgacaactggataggctgcaatgtctcttcctacccaggccgcaatgcccgggagtttctccaatgtgtggagaaggccttagaagacatgtttgatgccttagaaggcaaatccatcaaaagttaacttctgggcagatgaaaagctaccatcacttcctcatcatgaaaactgggaggccgggcatggtggctcatgcctgtaatcccagcattttgagaggctgaggcgggtggatcacttgaggtcaggagtttgagaccaacctggccaacatggtgaaaccttgtctctactaaaaatacaagaattagctgggtgtggtggcatgtgcctatatcccagctactgggaggttgaagcagaattgcttgaacccaggaggtggaggttgcagtgagctgagatcacaccactgcactccggcctgggcgacagagcgagactgtctcaaaaagacaaaaaagaaaaaaaactggggcctgtgtagccagtgggtgctattctgtgaaactaatcataagctgcctaggcagccagctacaggcttgagctttaaattcatggttttaaagctaaacgtaatttccacttgggactagatcacaactgaagataacaagagatttaagttttaagggcatttaatcaggaggaaaggtttggaaaactaactcaggtgtatttattgtttaagcagaaataaagtttaatttttgcttg

SEQ ID NO: 220484 - DNA, 1000 bp, Homo Sapiens
aaatactattgaaatacgttaaaggtaaatttttaaggtttaaaaaaaatttagtaacttacagggatggagaatttagatgtcagaggtggggagatttatttttataaggtaatttttatcctgataaggacttaaaaaaaagttttgcaactgaaattttaaagtaaacatgttaagtacagttaaaaagtaagcattgtagtaaatagtggattctctggtgtgtattttttatctcagtgttgaaaattggaaaagaatggactgaagtctaaaaactggaataatgaaggacactaaatgcctttattgtagatactatgtttgtaagtctatagctaagcaacttaagccaaaaaggtctttcaactgaagctttaatcaacttattttggagatgttctcttcccttatctcatgcgtcatccctaaaataataagatacatgggatcaaatagcccttgccttttcaacacaaatcagttggaaaattatggtttgagtcctgttgctgccatggcttctgtttctcagaaatgagtgtgtatgaacataccaatctatgtaataggctacctttttttgtcttctttggaactttgtacacaaaccaagacaatatcagggtgacaggtgaatgaacttaaattctcagtcttgtctattcaccaaaaaagtatactgcctgttttttctttaattattcaaggttgatgacttttaggaacatgttttatactgtattttttaattaaagcaagtgccttgatgtaattccatgtaaatcattgcttaaccctcttatgggatgaggatgagttattaatgtattgcagcctactggaaaggagggggagttggttaatagcagatacttttcttctagaagcttatgttttatgctgtttattatgtaagatcctgtatgtgtgttgagatttagaggtttcatttgttttgtctgctaataaattgttactctaataataaaaaaaa

SEQ ID NO: 220485 - DNA, 1000 bp, Homo Sapiens; identical to SEQ ID NO: 115083

SEQ ID NO: 220486 - DNA, 1000 bp, Homo Sapiens
cagagacgccaagtttgaaggaactcgaattccacacctggtgaagaaaaggcgttaccagaagcaagacagtgaaaacaagagtgaggccaaggaacagagcaatgacgattatgttttggaaaagcttttcaaaaaatcagttggcgtgcacagtgtcatgaagcacgatgccatcatggatggagccagcccagattatgtactggtggaggcagaagccaaccgagtggcccaggatgccctgaaagcactgaggctctctcgtcagcggtgtctgggagcagtgtctggtgttcccacctggactggccacagggggatttctggtgcaccagcaggaaaaaagagtagatttggtaagaaaaggaattctaacttctctgtgcagcatccttcatcaacatctccaacagagaagtgccaggatggcatcatgaaaaaggagggaaaagataatgtccctgagcattttagtggaagagcagaagatgcagactcttcatccgggcccctcgcttcctcctcactcttggctaaaatgagagctagaaaccacctgattctgccagagcgtttagaaagtgaaagcgggcacctgcaggaagcttctgccctgctgcccaccacagaacacgatgaccttctggtggagatgagaaacttcatcgctttccaggcccacactgatggccaggccagcaccagggagatactgcaggagtttgaatccaagttatctgcatcacagtcttgtgtcttccgagaactattgagaaatctgtgcactttccatagaacttctggtggtgaaggaatttggaaactcaagccagaatactgctaaacaacattgcttcctaaactttcaagtccctttttctaacgggcatttctgattattaatttattattaataatcatgtttgtcaatggaagttggctgcacttgatgtttgtttgcatgatgtctacctcagaattaaaactttaaggaagg

SEQ ID NO: 220487 - DNA, 1000 bp, Homo Sapiens
aggccactggcttagagtactccttcccctgcatgacactgattacaaatactttcctattcatactttccaattatgagatggactgtgggtactgggagtgatcactaacaccatagtaatgtctaatattcacaggcagatctgcttggggaagctagttatgtgaaaggcaaatagagtcatacagtagctcaaaaggcaaccataattctctttggtgcaggtcttgggagcgtgatctagattacactgcaccattcccaagttaatcccctgaaaacttactctcaactggagcaaatgaactttggtcccaaatatccatcttttcagtagcgttaattatgctctgtttccaactgcatttcctttccaattgaattaaagtgtggcctcgtttttagtcatttaaaattgttttctaagtaattgctgcctctattatggcacttcaattttgcactgtcttttgagattcaagaaaaatttctattcttttttttgcatccaattgtgcctgaacttttaaaatatgtaaatgctgccatgttccaaacccatcgtcagtgtgtgtgtttagagctgtgcaccctagaaacaacatattgtcccatgagcaggtgcctgagacacagacccctttgcattcacagagaggtcattggttatagagacttgaattaataagtgacattatgccagtttctgttctctcacaggtgataaacaatgctttttgtgcactacatactcttcagtgtagagctcttgttttatgggaaaaggctcaaatgccaaattgtgtttgatggattaatatgcccttttgccgatgcatactattactgatgtgactcggttttgtcgcagctttgctttgtttaatgaaacacacttgtaaacctcttttgcactttgaaaaagaatccagcgggatgctcgagcacctgtaaacaattttctcaacctatttgatgttcaaataaagaattaaact

SEQ ID NO: 220488 - DNA, 1000 bp, Homo Sapiens
ctgtcgtcgtcattgaaggagagagcaaggttatgagcagccgttttctgccctacgacaacatcatcacagacgccgtgctcagccttgacgaggacacggtgctttcaacaacagaggtggatttcgccttcacagtgtggcagagcttccctgagaggattgtggggtaccccgcgcgcagccacttctgggataactctaaggagcggtggggatacacatcaaagtggacgaacgactactccatggtgttgacaggagctgctatttaccacaaatattatcactacctatactcccattacctgccagccagcctgaagaacatggtggaccaattggccaattgtgaggacattctcatgaacttcctggtgtctgctgtgacaaaattgcctccaatcaaagtgacccagaagaagcagtataaggagacaatgatgggacagacttctcgggcttcccgttgggctgaccctgaccactttgcccagcgacagagctgcatgaatacgtttgccagctggtttggctacatgccgctgatccactctcagatgaggctcgaccccgtcctctttaaagaccaggtctctattttgaggaagaaataccgagacattgagcgactttgaggaatccggctgagtgggggaggggaagcaagaagggatgggggtcaagctgctctctcttcccagtgcagatccactcatcagcagagccagattgtgccaactatccaaaaacttagatgagcagaatgacaaaaaaaaaaaggccaatgagaactcaactcctggctcctgggactgcaccagactgctccaaactcacctcactggcttctgtgtcccaagactaggttgtgtacagtttaattatggaacattaaataattatttttgaaatgattgctatgcaggtttaaacttttttaatgatcaaaactattaaaaaccagagttctttgtttaatcaaaaaaaaaaaaaaaaa

SEQ ID NO: 220489 - DNA, 1000 bp, Homo Sapiens
attgttgaaagctttgaaataaaataacaatgtcttcttgaaatttgtgatggccaagaaagaaaatgatgatgacattaggcttctaaaggacatacatttaatatttctgtggaaatatgaggaaaatccatggttatctgagataggagatacaaactttgtaattctaataatgcactcagtttactctctccctctactaatttcctgctgaaaataacacaacaaaaatgtaacaggggaaattatataccgtgactgaaaactagagtcctacttacatagttgaaatatcaaggaggtcagaagaaaattggactggtgaaaacagaaaaaacactccagtctgccatatcaccacacaataggatcccccttcttgccctccacccccataagattgtgaagggtttactgctccttccatctgcctgaccccttcactatgactacacagaatctcctgatagtaaagggggctggaggcaaggataagttatagagcagttggaggaagcatccaaagattgcaacccagggcaaatggaaaacaggagatcctaatatgaaagaaaaatggatcccaatctgagaaaaggcaaaagaatggctacttttttctatgctggagtattttctaataatcctgcttgacccttatctgacctctttggaaactataacatagctgtcacagtatagtcacaatccacaaatgatgcaggtgcaaatggtttatagccctgtgaagttcttaaagtttagaggctaacttacagaaatgaataagttgttttgttttatagcccggtagaggagttaaccccaaaggtgatatggttttatttcctgttatgtttaacttgataatcttattttggcattcttttcccattgactatatacatctctatttctcaaatgttcatggaactagctcttttattttcctgctggtttcttcagtaatgagttaaataaaacattgacacataca

SEQ ID NO: 220490 - DNA, 1000 bp, Homo Sapiens
catggtggcagcagggaacccctagagagaggggccactgggaccaggcctcctgttgtggagggactcctgggacagtcctccaccctgtcctgtggtcctgtgtacagggttggcctcttcctcctcccctgccaggcctctgcccatgccccttccttccttctcctgggactggtgaagctaggcatctggaagacttcttcctagcctggaagccctgacctcggcccatctgcagaatctcccagttccttcacagctgccgagtcctctcacgggtgcggtggaggcggccttgccggtggtgctttctgggcagccaggggttcctgggtgggaggactgtccctctggggacgtggcactgaagtgcctgctggcttcatgtggccctttgccctttcccagcctgagagatgctcaaaggtggggagctgggggagccacccctcggccattccctccacctccaagacaggtggcggccgggcaggcactcttaagcccacctccccctcttgttgccttcgatttcggcaaagcctgggcaggtgccaccgggaaggaatggcatccgagatgctgggcggggacgcggcgtggccgagggggccttgacggcgttggcggggcctgggcacaggggcagccgcagggaggcagggatggcaaggcgtgaagccaccctggaaggaactggaccaaggtcttcagaggtgcgacagggtctggaatctgaccttactctagcaggagtttttgtagactctccctgatagtttagtttttgataaagcatgctggtaaaaccactaccctcagagagagccaaaaatacagaagaggcggagagcgcccctccaaccaggctgttattcccctggactccgtgacatctgtggaattttttagctctttaaaatctgtaatttgttgtctattttttcattctaaataaaacttcagtttgcacctaaaaaaaaaaaaaaaaaaaaaa

SEQ ID NO: 220491 - DNA, 1000 bp, Homo Sapiens
ggtagtgaagaaaagcaagctaagaaaaaattctgtttataaaagaaggaaaagatagtttatgtttttagcctaagtataagagtcctacagatggactgaaaaaaatcagtctgagagtattagtcacaattaatgaaataattacattttatgtattgaggatgccaagattaaaaggtgacaggtagatgttaatttccctagattgtgaaagtgatcacgacaatcacacaacaaataattaagtgacttggtatgctttatttaattgtagggcctgaggttttccattctcatttttctaaaatacaattttgtttctccaaatttgacagcagaataaaaaccctaccctttcactgtgtatcatgctaagctgcatctctactcttgatcatctgtaggtattaatcacatcacttccatggcatggatgttcacatacagactcttaaccctggtttaccaggacctctaggagtggatccaatctatatctttacagttgtatagtatatgatatctcttttatttcactcaatttatattttcatcattgactacatatttcttatacacaacacacaatttatgaattttttctcaagatcattctgagagttgccccaccctacctgccttttatagtatgcccacctcaggcagacacagagcacaatgctggggttctcttcacactatcactgccccaaattgtctttctaaatttcaacttcaatgtcatcttctccatgaagaccactgaatgaacaccttttcatccagccttaatttcttgctccataactactctatcccacgatgcagtattgtatcattaattattagtgtgcttgtgacctccttatgtattctcaattacctgtatttgtgcaataaattggaataatgtaacttgatttcttatctgtgtttgtgttggcatgcaagatttaggtacttatcaaagataatggggaattaaggcatcaataaa

SEQ ID NO: 220492 - DNA, 1000 bp, Homo Sapiens
ggactgattgttcccatcttccaagaaaggcttcttgctgttgggaaatggctgagcatcaatggggaggctatctatgcctccaaaccatggcgggtgcaatgggaaaagaacacaacatctgtatggtatacctcaaagggatcggctgtttatgccatttttctgcactggccagaaaatggagtcttaaaccttgaatcccccataactacctcaactacaaagataacaatgctgggaattcaaggagatctgaagtggtccacagatccagataaaggtctcttcatctctctaccccagttgccaccctctgctgtccccgcagagtttgcttggactataaagctgacaggagtgaagtaatcatttgagtgcaagaagaaagaggcgctgctcactgttttcctgcttcagtttttctcttatagtaccatcactataatcaacgaacttctcttctccacccagagatggcttttccaacacattttaattaaaggaactgagtacattaccctgatgtctaaatggaccaaagatctgagatccattgtgattatatctgtatcaggtcagcagaagaaggaactgagcagttgaactctgagttcatcaattctaatatttggaaattatctacaatggaatcttccctctgttctctgataacctacttgcttactcaatgcctttaagccaagtcaccctgttgcctatgggaggaggtggaaggatttggcaagctcaaccacatgctatttagttagcatcagttgtcaccaacagtctttctgcaaagggcaggagagctttgggggaaaggaaaaggcttaccaggctgctatggtcaactcttcagaaattttcagagcaatctaaaagcgccaaaattcgctatgtttacagtgatactattaagaaaatgaatgtgattctgctctgtctttttaagtatgatcaaataaaaaatttgtacatcacaatcatttctacc

SEQ ID NO: 220493 - DNA, 1000 bp, Homo Sapiens
cggataattttttttaatttttgtagagacgaggtcttgtgatattgcccaggctgttcttcaactcctgggctcaagcagtcctcccaccttggcctcccagaatgctgggtttatagatgtgagccagcacaccgggccaagtgaagaatctaatgaatgtgcaacctaattgtagcatctaatgaatgttccaccattgctggaaaaattgagatggaaaacaaaccatctctagttggccagcgtcttgctctgttcacagtctctggaaaagctggggtagttggtgagcagagcgggactctgtccaacaagccccacagcccctcaaagacttttttttgtttgttttgagcagacaggctaaaatgtgaacgtggggtgagggatcactgccaaaatggtacagcttctggagcagaactttccagggatccagggacacttttttttaaagctcataaactgccaagagctccatatattgggtgtgagttcaggttgcctctcacaatgaaggaagttggtctttgtctgcaggtgggctgctgagggtctgggatctgttttctggaagtgtgcaggtataaacacaccctctgtgcttgtgacaaactggcaggtaccgtgctcattgctaaccactgtctgtccctgaactcccagaaccactacatctggctttgggcaggtctgagataaaacgatctaaaggtaggcagaccctggacccagcctcagatccaggcaggagcacgaggtctggccaaggtggacggggttgtcgagatctcaggagccccttgctgttttttggagggtgaaagaagaaaccttaaacatagtcagctctgatcacatcccctgtctactcatccagaccccatgcctgtaggcttatcagggagttacagttacaattgttacagtactgttcccaactcagctgccacgggtgagagagcaggaggtatgaattaaaagtctacagcactaa

SEQ ID NO: 220494 - DNA, 1000 bp, Homo Sapiens; identical to SEQ ID NO: 115090

SEQ ID NO: 220495 - DNA, 1000 bp, Homo Sapiens
ttaatttcctcatttttatccgcattcttggcattctcctgtccaagctgaggacacggcaaatgcgctgccgggattaccggctgaggctggctcgctccacgctgacgctggtgcccctgctgggtgtccacgaggtggtgtttgctcccgtgacagaggaacaggcccggggcgccctgcgcttcgccaagctcggctttgagatcttcctcagctccttccagggcttcctggtcagcgtcctctactgcttcatcaacaaggaggtgcagtcggagatccgccgtggctggcaccactgccgcctgcgccgcagcctgggcgaggagcaacgccagctcccggagcgcgccttccgggccctgccctccggctccggcccgggcgaggtccccaccagccgcggcttgtcctcggggaccctcccagggcctgggaatgaggccagccgggagttggaaagttactgctagggggcgggatccccgtgtctgttcagttagcatggatttattgagtgccaactgcgtgccaggcccagtacggaggacgctggggaaatggtgaaggaaacagaaaaaaggtccctgcccttctggagatgacaactgagtggggaaaacagaccgtgaacacaaaacatcaagttccacacacgctatggaatggttatgaagggaagcgagaagggggcctagggtggtctgggaggcgtctccaaggaggtgacacttaagccatccccgaaagaggtgaaagagatcactttggggagagctggagaacaggattctaggcggaagcgatagcataggcaaaggcccttgggcaggaaggcgctcagccttggctggagtagaattaagtcagagccaacaggtggggagagacagagaagtgggcaggggcacccaagttgggatttcatttcaggtgcattggagattcttaggagtgtctcttgggggtaatattttattttttaaaaaatgaggat

SEQ ID NO: 220496 - DNA, 1000 bp, Homo Sapiens
cccctgccccaacacagtggactgcttcgtgtcccgccccaccgagaaaaccgtcttcaccgtcttcatgctagctgcctctggcatctgcatcatcctcaatgtggccgaggtggtgtacctcatcatccgggcctgtgcccgccgagcccagcgccgctccaatccaccttcccgcaagggctcgggcttcggccaccgcctctcacctgaatacaagcagaatgagatcaacaagctgctgagtgagcaggatggctccctgaaagacatactgcgccgcagccctggcaccggggctgggctggctgaaaagagcgaccgctgctcggcctgctgatgccacataccaggcaacctcccatcccacccccgaccctgccctgggcgagcccctccttctcccctgccggtgcacaggcctctgcctgctggggattactcgatcaaaaccttccttccctggctacttcccttcctcccggggccttccttttgaggagctggaggggtggggagctagaggccacctatgccagtgctcaaggttactgggagtgtgggctgcccttgttgcctgcacccttccctcttccctctccctctctctgggaccactgggtacaagagatgggatgctccgacagcgtctccaattatgaaactaatcttaaccctgtgctgtcagataccctgtttctggagtcacatcagtgaggagggatgtgggtaagaggagcagagggcaggggtgctgtggacatgtgggtggagaagggagggtggccagcactagtaaaggaggaatagtgcttgctggccacaaggaaaaggaggaggtgtctggggtgagggagttagggagagagaagcaggcagataagttggagcaggggttggtcaaggccacctctgcctctagtccccaaggcctctctctgcctgaaatgttacacattaaacaggattttacagccaaaaaaaaaaaaaaaaaaaaaaa

SEQ ID NO: 220497 - DNA, 1000 bp, Homo Sapiens; identical to SEQ ID NO: 115091

SEQ ID NO: 220498 - DNA, 1000 bp, Homo Sapiens
tgtggatgtggccaagagactccaggattatggatttcacgcccctaccatgtcctggcctgtggcagggaccctcatggtggagcccactgagtcggaggacaaggcagagctggacagattctgtgatgccatgatcagcattcggcaggaaattgctgacattgaggagggccgcatcgaccccagggtcaatccgctgaagatgtctccacactccctgacctgcgttacatcttcccactgggaccggccttattccagagaggtggcagcattcccactccccttcatgaaaccagagaacaaattctggccaacgattgcccggattgatgacatatatggagatcagcacctggtttgtacctgcccacccatggaagtttatgagtctccattttctgaacaaaagagggcgtcttcttagtcctctctccctaagtttaaaggactgatttgatgcctctccccagagcatttgataagcaagaaagatttcatctcccaccccagcctcaagtaggagttttatatactgtgtatatctctgtaatctctgtcaaggtaaatgtaaatacagtagctggagggagtcgaagctgatggttggaagacggatttgctttggtattctgcttccacatgtgccagttgcctggattgggagccattttgtgttttgcgtagaaagttttaggaactttaacttttaatgtggcaagtttgcagatgtcatagaggctatcctggagacttaatagacatttttttgttccaaaagagtccatgtggactgtgccatctgtgggaaatcccagggcaaatgtttacattttgtataccctgaagaactctttttcctctaatatgcctaatctgtaatcacatttctgagtgttttcctctttttctgtgtgaggttttttttttttttaatctgcatttattagtattctaataaaagcattttgatcggaaaaaaaaaaaaaaaaaaaaa

SEQ ID NO: 220499 - DNA, 1000 bp, Homo Sapiens
gatttgaattctgacatggatagtattttagcgagtctgaagctgcctcctaagtctgaagtctcatcagacgaagacatccagttccgcctggtgacaagatttgtgaatgaggcagtcatgtgcctgcaagaggggatcttggccacacctgcagagggagacatcggagccgtctttgggcttggcttcccgccttgtctgggagggcctttccgctttgtggatctgtatggcgcccagaagatagtggaccggctcaagaaatatgaagctgcctatggaaaacagttcaccccatgccagctgctagctgaccatgctaacagccctaacaagaagttctaccagtgagcaggcctcatgcctcgctcagtcagtgcactaaccccagctgccggcagtgctggttctccaacagagtggtgtctagatttatcagagtaacgagaagacaaactccggcactgggtttgctccctgattaaagtgccttcagccaagaccatctctccctcctggtgaagtgtgacttcgaattagtttgcacttcctattggaaggtagagcccactgctcattgtataagccccgaggcctagagtggcagccaagagccatctgaagccacctctctgcctgttcctcccaagaggccagggtggccaggggtggtgagggcagttctgcacccagccaaacacataacaataaaaaccaaactctgtgtcagcatctttgcccttctggtttaaacgcctccttcaaaaagcaatctggaagaaagccctgtgctttgggggagtaagaatgtgtgtgcagaattctaggcagcaccttagggagggactgggatgagagaaagtgggacctggtgggctcaaccacacacacctgtctgtgcagatgctttgcccaggcttctcaccacggtgtaccgggatattaaacctctttccccagcaaaaaaaaaaaaaaaaaaaaaaaaaaaaaaaaaaaa

SEQ ID NO: 220500 - DNA, 1000 bp, Homo Sapiens; identical to SEQ ID NO: 115096

SEQ ID NO: 220501 - DNA, 1000 bp, Homo Sapiens
gagaggaatgcggttcagcatagatgtctttgaggagaccaggggctacatcttggaggtctatggtgtccactttgagttacctgaccttggaccaattggggccaatggcttggccaatcctcgtgatttcttgatacccattgcctggtatgaggatcgccaagtaccaggtggttacacggtcattaataaataccagggcaagctgtttgctgccaaacaggatgtctccccgttcaatgttgtggcctggcacgggaattatacaccctacaagtacaacctgaagaatttcatggttatcaactcagtggcctttgaccatgcagacccatccattttcacagtattgactgctaagtctgtccgccctggagtggccattgctgattttgtcatcttcccacctcgatggggggttgctgataagaccttcaggcctccttattaccataggaactgcatgagtgagttcatgggactcatccgaggtcactatgaggcaaagcaaggtgggttcctgccagggggagggagtctacacagcacaatgaccccccatggacctgatgctgactgctttgagaaggccagcaaggtcaagctggcacctgagaggattgccgatggcaccatggcatttatgtttgaatcatctttaagtctggcggtcacaaagtggggactcaaggcctccaggtgtttggatgagaactaccacaagtgctgggagccactcaagagccacttcactcccaactccaggaacccagcagaacctaattgagactggaacattgctaccataattaagagtagatttgtgaagattcttcttcagaatctcatgctttctggtagtattggaggagggggttggttaaaatgaaaattcacttttcatagtcaagtaactcagaacttttatggaaacgcatttgcaaagttctatggctgtcaccttaattactcaataaacttgctggtgttctgtgga

SEQ ID NO: 220502 - DNA, 1000 bp, Homo Sapiens
aaagcactgaatagaaatagtgatagatccattcctatgactgtagattttatcagactgaagagctattgtaatgaccagtcaacaggggacataaaagtaattggtggagatgatctctcaactttaactggaaagaatgtcttgattgtggaagatataattgacactggcaaaacaatgcagactttgctttccttggtcaggcagtataatccaaagatggtcaaggtcgcaagcttgctggtgaaaaggaccccacgaagtgttggatataagccagactttgttggatttgaaattccagacaagtttgttgtaggatatgcccttgactataatgaatacttcagggatttgaatcatgtttgtgtcattagtgaaactggaaaagcaaaatacaaagcctaagatgagagttcaagttgagtttggaaacatctggagtcctattgacatcgccagtaaaattatcaatgttctagttctgtggccatctgcttagtagagctttttgcatgtatcttctaagaattttatctgttttgtactttagaaatgtcagttgctgcattcctaaactgtttatttgcactatgagcctatagactatcagttccctttgggcggattgttgtttaacttgtaaatgaaaaaattctcttaaaccacagcactattgagtgaaacattgaactcatatctgtaagaaataaagagaagatatattagttttttaattggtattttaatttttatatatgcaggaaagaatagaagtgattgaatattgttaattataccaccgtgtgttagaaaagtaagaagcagtcaattttcacatcaaagacagcatctaagaagttttgttctgtcctggaattattttagtagtgtttcagtaatgttgactgtattttccaacttgttcaaattattaccagtgaatctttgtcagcagttcccttttaaatgcaaatcaataaattcccaaaaattt

SEQ ID NO: 220503 - DNA, 1000 bp, Homo Sapiens
gaaaagcgcaagcaattgctgctggccaacctgcctcaagagctgctgcaggcctacggcaaggactacatcgagcacttgcatgggcagttcctgcactcgctacgcctggccatgtccgacctcaccccagttgtagatgccatcacagatgcgctgctggcagctcggccccgccgccgctattaccccggccagggcctggggctcatgtacttcatccactactacctgcctgaaggcctgcggcgccgcttcctgcaggccttcttcatcagtcactgtctgcctcgagcactgcagcctggccagcctggcactaccccaccacaggacgcagcccagggcccaaacctgagccccggcccttccccagcagtggctcggtgagccatgtgcacctatggcccagccactgcagcacaggaggctccgtgagcccttggttcctccccgaaaacccccagcattacgatcccccaagtgtcctggaccctggcctaaagaatcccacccccacttcatgcccactgccgatgcccaatccaggcccggtgaggccaaggtttcccagtgagcctctgcgcctctccactgtttcatgagcccaaacaccctcctggcacaacgctctaccctgcagcttggagaactccgctggatggggagtctcatgcaagacttcactgcagcctttcacaggactctgcagatagtgcctctgcaaactaaggagtgactaggtgggttggggaccccctcaggattgtttctcggcaccagtgcctcagtgctgcaattgagggctaaatcccaagtgtctcttgactggctcaagaattagggccccaactacacacccccaagccacagggaagcatgtactgtacttcccaattgccacattttaaataaagacaaatttttatttcttctaaaaaaaaaaaaaaaaaaaaaaaaaaaaaaaaaaaaaaaaaaaaaaaaaaaaaaaaaaaaaaaa

SEQ ID NO: 220504 - DNA, 1000 bp, Homo Sapiens
ggtctgctccctgtacggtggatggcaccggagtccctgaaggatggggtcttcaccacttcttctgacatgtggtcctttggcgtggtcctttgggaaatcaccagcttggcagaacagccttaccaaggcctgtctaatgaacaggtgttgaaatttgtcatggatggagggtatctggatcaacccgacaactgtccagagagagtcactgacctcatgcgcatgtgctggcaattcaaccccaagatgaggccaaccttcctggagattgtcaacctgctcaaggacgacctgcaccccagctttccagaggtgtcgttcttccacagcgaggagaacaaggctcccgagagtgaggagctggagatggagtttgaggacatggagaatgtgcccctggaccgttcctcgcactgtcagagggaggaggcggggggccgggatggagggtcctcgctgggtttcaagcggagctacgaggaacacatcccttacacacacatgaacggaggcaagaaaaacgggcggattctgaccttgcctcggtccaatccttcctaacagtgcctaccgtggcgggggcgggcaggggttcccattttcgctttcctctggtttgaaagcctctggaaaactcaggattctcacgactctaccatgtccagtggagttcagagatcgttcctatacatttctgttcatcttaaggtggactcgtttggttaccaatttaactagtcctgcagaggatttaactgtgaacctggagggcaaggggtttccacagttgctgctcctttggggcaacgacggtttcaaaccaggattttgtgttttttcgttccccccacccgcccccagcagatggaaagaaagcacctgtttttacaaattcttttttttttttttttttttttttttttgctggtgtctgagcttcagtataaaagacaaaacttcctgtttgtggaacaaaatttcgaaagaaaaaaccaaa

SEQ ID NO: 220505 - DNA, 1000 bp, Homo Sapiens
ccagaaaagcagtggctccattggtgttgacatacatccaacattaaaagccacccccaaatgcccaagaaaaaaagaaagacttatcaacatttgttccatgagcagaaaactggagctctggcctcagtgttacagctaaataatctttaattaaggcaagtcactttcttcttcttaaagctgttttctagtttgagaaatgatgggattttagcagccagtcttgaaggtctctttcagtatcaacattctaagatgctgggacttactgtgtcatcaaatgtgcggttaagattctctgggatattgatactgtttgtgtttttagttgggagatctgagagacctggctttggcaagagcagatgtcattccatatcacctttctcaatgaaagtctcattctatcctctctccaaacccgttttccaacatttgttaatagttacgtctctcctgatgtagcacttaagcttcatttagttattatttctttcttcactttgcacacatttgcatccacatattagggaagaggaatccataagtagctgaaatatctattctgtattattgtgttaacattgagaataagccttggaattagatatggggcaatgactgagccctgtctcacccatggattactccttactgtagggaatggcagtatggtagagggataaatagggggcggggagggatagtcatggatccaagaagtccttagaaatagtggcagggaacaggtgtggaagctcatgcctgtaattataaccttcagctactaagacaggtgtggtggctcacgcctgtgattataatcttcagttactaagacagagtccatgagagtgttaatgggacattttctttagataagatgttttatatgaagaaactgtatcaaagggggaagaaaatgtatttaacaggtgaatcaaatcaggaatcttgtctgagctactggaatgaagttcacaggtcttgaagacca

SEQ ID NO: 220506 - DNA, 1000 bp, Homo Sapiens; identical to SEQ ID NO: 115101

SEQ ID NO: 220507 - DNA, 1000 bp, Homo Sapiens
gcagatagagagggcctccgttctgccacctgccttgaaagggtctccagctgccatatgtagcattggagtcctctgcaatgcgacatcctgaaagctcagctgcctgggcattcctgaagagtatggaatatttaaatgaaacatatttttttaaaacctgcgcataagataaaagcagcccgtgtgcatcttgggccatcctcaaatggacagacttggtcttgtgaggttccagtccttgtttcacataataaacactggcatggctcagcccctgagttaccacagtccttgagatgagtggttctttgggttacaaagtcctctgaaagtctagtgagagctgtgatctttgccccacccgaataatgcatatggacaccacaccttgcctgccgtgtccaggattcatgaccagtagcagcccagctatgcctgccacgtctcatggcccctgtgtaagccagacccttcttaggcagttgcatattcccagactgaggcagggcaggtttgcagagagagacccagagtgcacgtgacccgcagtgtgatccctggcacgcactgactttgatattccaggcacacggactggctatttatcaccacttctttttccccactaagattcctgtgccttttaaggcagagggagatccctatggcgttagtcttcccaggccttaaagggcccttgtcttcactcacaaacctcttatctcttcttctccttcctctacattttaaagggggagagggaaaagtaaccgggagacaaattgagccacatattttcagacacttgttaccatattttaaaatctggcttcacatacacagagtctttgctatgcaccatgtactgttctaagcttcttaaaaatagaatctcaattattattttgcaggcaatactctatgcattcattagctaggacaacaatgcatttgcagtagtgagatttcgctaaaaaattaaagccatttactatga

SEQ ID NO: 220508 - DNA, 1000 bp, Homo Sapiens; identical to SEQ ID NO: 115103

SEQ ID NO: 220509 - DNA, 1000 bp, Homo Sapiens
gcctgaaggggctctttttgaacattcagtggagacaccccttgtcagagccgacccgtttcaagaccttagattagaatcccccactcggagtctaagcatggatgccccaaggggtgtgcatattcaagctcacgctgggaaaattgaggcgctttctcaaatggatattctttttcatagtagtgatggaatgcttgtgcttgatgctgaaactgtgtgcttacccaagctggtgcaggggacgtggggtccctctggcagctcacagagcctctacgaaatctgtgtgtgtccagatgggaagctgtacctgtctgtggccggtgtgagcaccacgtgccaggagcacagccacatctgcctctgagctgcctgcgtcctctcggtgagctgtgcagtgccggccccagatcctcacacccagggagcagctgcacatcgtgaaagactgaggcagcgtggatgggaagtaaacgcttccagaggaactcagaaaaaattatgtgccagtgaaagtgtttggacaaaaactacatgatctcaaaatgcacgtggatgtgagacacaaaagttgacaaaatggaaaagcaatgtgtttttccactggattaattttcaccggaacaattgcgaattctctctgcctcgcctccccctatcttgtccgtgtgggcacacactgagtgttgagttgccgtgtggagttaatgtatgacgctccactgtggatatctaatgccctgttgagagtagccttgctcagtactaaaatgccccaaagttctatacagcatttcctttatagcattcaaacctcacatcctcccttcagtttaatgcaagtaagtcaggtttcacaagaaaattttcaagttttgaagggaatttgaggttgatctggttttcaagatgtagttaaaggaataaatcactcaaaattaaactttctgtatatagtcaataagcaataaaaacctcatttttcagagttaaaaaa

SEQ ID NO: 220510 - DNA, 1000 bp, Homo Sapiens
acttatggcttttctaatttttaattaattaatttatttttttgagacagagtcttgttctgtcgccaggctggagtgcagtggcacaatctcggctctcggctcactgcaacctctgcctcccaggttcaagcgattctcctgcctcagcctcccgagtacctgggactacaggcatgtgccacagttcccggctaatttttgtatttttagtagagacggggtttcaccatgttggccaggatggtctcaatctcttgacctcgtgatctgcctgccttggcctcccaaagtgctgggattacaggtgtgagccaccacgcctggccggcttatttttatccacagtaaatcttcagcaactcattgtctccaccagatagtatttttctgtaaatgaaatgctgacttcgcctcttcctgctgtatgctcatccctgcactgagcacagatatgacaagcagtagccatgggggaggtgggtgacaaagataggaccccgggagggggcgcaggtacatgctagtttcaattaccacagtattctagagacgggttgcaatgacaaggggggcaaatgaaatcaatgcaagatttcttaataatgggcagacagaaaaatgtaaaaccacacaaaacggactgctgataatattttaaaatatacttatttgtcttctttttgcattgtgaaaaaaacaaaataaattttgtgtgataattttgatgatgaaaggtggaagttctacctagatttgaatgagtgtttttttaagggaatgagaatgtcatggtgctaaacctgacaaataagagatcattgaaatgctgaaaattttaacagtcttcttaaaagtattgagggggcaaaaattaccaattatggtatacaaaaataagcctataaatgtgtttcacattgctaacttgagtttcagttgattcagtttgtaataactagtaatgagcttctgtttacaataaaaattctgtaaattg

SEQ ID NO: 220511 - DNA, 1000 bp, Homo Sapiens
gatacaatcatagcattgtctatttttctcttcatatttatatgggggggagggcgctggatgcaaaagttgaagatcgtgatgctatgatgttagttttccttagctgattttgagggtttttaaaaataaagcaaggttgactaacctacggccacgggaacaggaccatggttaagcaaccatatagaaagctttgttgaaagaaagtatggcatcttgtaccactgccctgactgtcacaactcctaaccttgccattgcctgcctccccctccccttctccttaagagacaatttctgcaggtggcaggtgagcaagcccaggagaatgctgcaatcttgggggtggttttatttatttcttttttgccaaatagagtgtggattcatttcaggggctagctaagccaagaggcagtggtttgggcttgttgtttgtaacaagaaaatgatccacaccactcccccgattcccgggtgcagaattgtaactcggggttgggcctctatatggagtgaccaaaatgccaaaattgtccatctgcctctgagtagggcaatggaaataccaaaccttctgactttgccaaaaagcatacaagcaacctggtcatacataggatgacaaaattctttctggttgtttttaaacaataaagcaataagaacaaatacaatacataggaagttaaaagcacaaaggaatgaacttattaatatttttgaaaaatgcactgggaaaaagttgatgtcaataacagtataaaacagccctatttcttgataaaaaatgacaaatgactgtctcttgcggatgcttggtactgtaatgttaataatagtcacctgctgttggatgcagcaataatttctgtatggtccatagcactgtatattatggatcgatattaatgtatccaatgaaataatcgacttgttcttgatagcctcattaaagcatttggtttttcacataaaaaaaaaaaaaaaaaaaaaa

SEQ ID NO: 220512 - DNA, 1000 bp, Homo Sapiens
gttttgtgccatgtgagtcagcagaagtgtccattgtggactgcatcttagcccgagtaggggctggtgacagtcaattgaaaggagtctccacgttcatggctgaaatgttggaaactgcttctatcctcaggtctgcaaccaaagattcattaataatcatagatgaattgggaagaggaacttctacctacgatggatttgggttagcatgggctatatcagaatacattgcaacaaagattggtgctttttgcatgtttgcaacccattttcatgaacttactgccttggccaatcagataccaactgttaataatctacatgtcacagcactcaccactgaagagaccttaactatgctttatcaggtgaagaaaggtgtctgtgatcaaagttttgggattcatgttgcagagcttgctaatttccctaagcatgtaatagagtgtgctaaacagaaagccctggaacttgaggagtttcagtatattggagaatcgcaaggatatgatatcatggaaccagcagcaaagaagtgctatctggaaagagagcaaggtgaaaaaattattcaggagttcctgtccaaggtgaaacaaatgccctttactgaaatgtcagaagaaaacatcacaataaagttaaaacagctaaaagctgaagtaatagcaaagaataatagctttgtaaatgaaatcatttcacgaataaaagttactacgtgaaaaatcccagtaatggaatgaaggtaatattgataagctattgtctgtaatagttttatattgttttatattaaccctttttccatagtgttaactgtcagtgcccatgggctatcaacttaataagatatttagtaatattttactttgaggacattttcaaagatttttattttgaaaaatgagagctgtaactgaggactgtttgcaattgacataggcaataataagtgatgtgctgaattttataaataaaatcatgtagtttgtgg

SEQ ID NO: 220513 - DNA, 1000 bp, Homo Sapiens
cagatcaggtacaatgtcagtcaactggaagaatggctgcgtgacaagaatctgatgaatagtggggctaaagaaaccctggaacctctcattcaggctgctcaacttttgcaagtgaaaaagaaaacagatgatgatgcagaagccatttgttctatgtgcaatgctttaactactgcccagattgtgaaagtgttgaatttgtatactccagttaatgagtttgaagaaagagtctctgtgtcgttcattcgtactatacagatgcgtttacgagacaggaaagactctccccagctgctcatggatgctaaacacatctttcctgtcacctttcctttcaacccatcttccctcgcactagaaaccatccagattccagccagcctcggcctgggctttatttcacgggtctgaaagtgatgtccaggcaaaaattgacaatacatttcttgcccgaaataagaacccattatttccagtgagttactgaaaatacatttttaaagagaaagtactgattatctcccaaatgagaagtcattaactggaaatctccctagaatactttcatcactttggaaacaaagataggctctttcgtgctgtgttatctttatagcaacactcatccttaaccaactaggtaccgtgagtttacatacaggagaatgatggaaggaagggaggaaggaaaggaggagaaaaatgtgtcttcagctggcagcatttattttaaatccttagcactgagtttgaatggtataaaaagtataacttccatagatgagctgttgttaggaaggcaccaaagaacctcctctgcactaaacaggagaatggaaagaaaagtctccattgagtacatatcatgtcagtttagtaatcaattatgttgatattgttaaactggttcaaagaaataaactggcaatatgtaaagtaattcctcatttgtgtcactatgatatagagatattaaaggaatgttggtttgcta

SEQ ID NO: 220514 - DNA, 1000 bp, Homo Sapiens
tgtagaggcagttcgaccagccagggaaagactggcaagaaaagagttaaggcaaaaaaggatgcaacaattctcccgggactctgcatattctagtaataaagactctacatgcttgttgacagagagagatactctgggaacttctttgcagttcccatctcctttctctggtacaatttcttttggttcattttcagattcaggcattttcccccttggctctcaatgctgtttgggtttccaacaattcagcattagtgggaaaaagtgggccctcatacacaagcgtgtcaggctgtcagtgtttggtgcacgctggggaagaatttactttggaaagtagaaaagcccagcttttcctgggacatcttctgttattgttgatgtttttttttaccttgtcattttggtctaaggttgccattgctgctaaaggttaccgatttcaaagtccagataccaagcatgtggatatgtttagctacgtttactcacagccagcgaactgacattaaaataactaacaaacagattcttttatgtgatgctggaactcttgacagctataattattattcagaaatgactttttgaaagtaaaagcagcataaagaatttgtcacaggaaggctgtctcagataaattatggtaaaattttgtaagggagcagacttttaaagacttgcacaaatacggatcctgcactgactctggaaaaggcatatatgtactagtggcatggagaatgcaccatactcatgcatgcaaattagacaaccaagtatgaatctatttgtgggtgtgctatagctttagcgtgtcacgggcatcattctctaatatccacttgtccatgtgaaacatgttgccaaaatggtggcctggcttgtcttctgaacgtttggttcaaatgtgttttggtcctggaggctcaaattttgagttattcccacgttttgaaataaaaagagtatattcaaaaaaaaaaaaaaaaaa

SEQ ID NO: 220515 - DNA, 1000 bp, Homo Sapiens; identical to SEQ ID NO: 115110

SEQ ID NO: 220516 - DNA, 1000 bp, Homo Sapiens
tgctgagttctgggagcaaggtgacttggaaaggacagtcttggatcagcagcccattcctatgatggaccggaacaaggcggccgagctccccaagctgcaagtgggcttcatcgacttcgtgtgcacattcgtgtacaaggagttctctcgtttccacgaagagatcctgcccatgttcgaccgactgcagaacaataggaaagagtggaaggcgctggctgatgagtatgaggccaaagtgaaggctctggaggagaaggaggaggaggagagggtggcagccaagaaagtaggcacagaaatttgcaatggcggcccagcacccaagtcttcaacctgctgtatcctgtgagcactggtcccgtggggaccctatggctccctcaatcttcacccactaggatttgggttctgcctgtggctatttgctacaagaggttaggaagcccaagaaaatgactgaagatcattctggatattttaattttttttttttttttttttttgagatggagtcttgctctgtcacccaggctggagtgccgtggcacgatctcagctcactgcaacctccacctcccaggttcaagcgattctcgtgcctcagcctcctgagtagctgggactacaggcgcccaccaccacacatgctaatttttgtattttcagtacagatggggtttcaccatattgggcaggctggtctcgaactcctgacctcaggtgatcaccgcctcagcttcctgaagtgctgggattacaggcatgagccaccacgcccagcctgtttttataaactgaagccaactgtgaataaactgtagcctacattactcatccatttttggatagttaccactgggagacctttgaaaagggtccatgaactctgaaatcactgagaacatttgcagccacacatgtacatatgtgtacacaggtagacagatggacacaggccgtttctcatccagtttaggaaaacacacatgctcag

SEQ ID NO: 220517 - DNA, 1000 bp, Homo Sapiens; identical to SEQ ID NO: 115111

SEQ ID NO: 220518 - DNA, 1000 bp, Homo Sapiens
tactcccctgagaactgaaagggaatcatgtcttatcctcacaacaaaagtattgcgctgtaatgtcacagagctggtttcagcatggtattgagttgacacttctcagcctcaattcataactatatgaactttaaatgattatatggatttctttaaaaggatatgcccatttgatcctaaccttttagcctgctctctagaaccctacttacagttgaccaagctgcttaaagtagaaggatcaggactggcaggggatatgagggccagtgtagagattaaacagaataatgagtacacaagtttttgcctatccctttccttaaaatataagaaataaaggagctcttacgaaaaacccaggttagaccgcataaaaaataaagtgaacagtgaggtggtagcaagacttctttttagaaaagaaagcatttacctgcctgtctgtaaggtggaaatttcatcagtttgcaaacgataagaaatgcagacttgctcttgatagaaatgcttagaaacactctgggggggaaaaaagctccttccatatactgtgagacatttgttaagtgacatctattgtttatcagcttttaaggataaaaaaggtattttaaaagttggatatttaggatatttgaggatattcctttatgagctctccatatccttcttgagaaactggttaaaaaaggaataggggtagagtgttacagagagtagtctgaagattcctgtgtaaaagcaaagctaacaagcaatgaagacatgaagcaaaatactaatctaattgtgtaaagaaaggatattttaataagttctttctgcttgctgctaagagtttgctaaagtgtcatgaattattctggttattactaaagtttctatgaaacaagtagattttaagaataaatgtttctggaaaaggactatgttatgattttgtagaaatgtaaagattacttgaggtgtttaaaataaatttttcattcagact

SEQ ID NO: 220519 - DNA, 1000 bp, Homo Sapiens; identical to SEQ ID NO: 115113

SEQ ID NO: 220520 - DNA, 1000 bp, Homo Sapiens
tagttcctgtgcacagcccctaagtcaacttagcattttctgcatctccacttggcattagctaaaaccttccatgtcaagattcagctagtggccaagagatgcagtgccaggaacccttaaacagttgcacagcatctcagctcatcttcactgcaccctggatttgcatacattcttcaagatcccatttgaattttttagtgactaaaccattgtgcattctagagtgcatatatttatattttgcctgttaaaaagaaagtgagcagtgttagcttagttctcttttgatgtaggttattatgattagctttgtcactgtttcactactcagcatggaaacaagatgaaattccatttgtaggtagtgagacaaaattgatgatccattaagtaaacaataaaagtgtccattgaaaccgtgatttttttttttttcctgtcatactttgttaggaagggtgagaatagaatcttgaggaacggatcagatgtctatattgctgaatgcaagaagtggggcagcagcagtggagagatgggacaattagataaatgtccattctttatcaagggcctactttatggcagacattgtgctagtgcttttattctaacttttatttttatcagttacacatgatcataatttaaaaagtcaaggcttataacaaaaaagccccagcccattcctcccattcaagattcccactccccagaggtgaccactttcaactcttgagtttttcaggtatatacctccatgtttctaagtaatatgcttatattgttcacttcctttttttttattttttaaagaaatctatttcataccatggaggaaggctctgttccacatatatttccacttcttcattctctcggtatagttttgtcacaattatagattagatcaaaagtctacataactaatacagctgagctatgtagtatgctatgattaaatttacttatgtaaaaaaaaaaaaaaaaaaaa

SEQ ID NO: 220521 - DNA, 1000 bp, Homo Sapiens
tcctagatgacaatatgcagatccgactttcagatttcgggttctcctgccacttggaacctggcgagaagcttcgagagttgtgtgggaccccagggtatctagcgccagagatccttaaatgctccatggatgaaacccacccaggctatggcaaggaggtcgacctctgggcctgtggggtgatcttgttcacactcctggctggctcgccacccttctggcaccggcggcagatcctgatgttacgcatgatcatggagggccagtaccagttcagttcccccgagtgggatgaccgttccagcactgtcaaagacctgatctccaggctgctgcaggtggatcctgaggcacgcctgacagctgagcaggccctacagcaccccttctttgagcgttgtgaaggcagccaaccctggaacctcaccccccgccagcggttccgggtggcagtgtggacagtgctggctgctggacgagtggccctaagcacccatcgtgtacggccactgaccaagaatgcactgttgagggacccttatgcgctgcggtcagtgcggcacctcatcgacaactgtgccttccggctctacgggcactgggtaaagaaaggggagcagcagaaccgggcggctctctttcagcaccggccccctgggccttttcccatcatgggccctgaagaggagggagactctgctgctataactgaggatgaggccgtgcttgtgctgggctaggacctcaaccccagggattcccaggaagcagaactctccagaagaagggttttgatcattccagctcctctgggctctggcctcaggcccactaatgatcctgctaccctcttgaagaccagcccggtacctctctccccactggccaggactctgagatcagagctggggtggaagggagccattctgaacgccacgcctggcccggtcagtgctgcatgcactgcatatgaaataaaatctgctacacgccaggg

SEQ ID NO: 220522 - DNA, 1000 bp, Homo Sapiens; identical to SEQ ID NO: 115115

SEQ ID NO: 220523 - DNA, 1000 bp, Homo Sapiens; identical to SEQ ID NO: 115435

SEQ ID NO: 220524 - DNA, 1000 bp, Homo Sapiens
tggacagtctctgccgtggagtgtttgcaggcaacagccgtgagctcagcatcaggtcctgctttcccagtctcttccaagctgagcaaacccatcgttccatattactgggcctgctgctgggggcagggcggaccccacagccagactcagcactcattcgccaggccttggctgagcgctggagccagtggtcacttcgtggaggtctagagatgttgcctcaggcccttgaaacccacctgactagtaggggggtcagtgttctcagaggccagccggtctgtgggctcagcctccaggcagaagggcgctggaaggtatctctaagggacagcagtctggaggctgaccacgttattagtgccattccagcttcagtgctcagtgagctgctccctgctgaggctgcccctctggctcgtgccctgagtgccatcactgcagtgtctgtagctgtggtgaatctgcagtaccaaggagcccatctgcctgtccagggatttggacatttggtgccatcttcagaagatccaggagtcctgggaatcgtgtatgactcagttgctttccctgagcaggacgggagcccccctggcctcagagtgactgtgatgctgggaggttcctggttacagacactggaggctagtggctgtgtcttatctcaggagctgtttcaacagcgggcccaggaagcagctgctacacaattaggactgaaggagatgccgagccactgcttggtccatctacacaagaactgcattccccagtatacactaggtcactggcaaaaactagagtcagctaggcaattcctgactgctcacaggttgcccctgactctggctggagcctcctatgagggagttgctgttaatgactgtatagagagtgggcgccaggcagcagtcagtgtcctgggcacagaacctaacagctgatccccaactctcattcatgaaaataaaaattgctggagcttggcaaaaaaaaa

SEQ ID NO: 220525 - DNA, 1000 bp, Homo Sapiens
ggtcctttgtcaaggaaaaaaattctgttgtgatataaatcacagtaaagaaattcttacttctcttgctatctaagaatagtgaaaaataacaattttaaatttgaatttttttcctacaaatgacagtttcaatttttgtttgtaaaactaaattttaattttatcatcatgaactagtgtctaaatacctatgtttttttcagaaagcaaggaagtaaactcaaacaaaagtgcgtgtaattaaatactattaatcataggcagatactattttgtttatgtttttgtttttttcctgatgaaggcagaagagatggtggtctattaaatatgaattgaatggagggtcctaatgccttatttcaaaacaattcctcagggggaccagctttggcttcatctttctcttgtgtggcttcacatttaaaccagtatctttattgaattagaaaacaagtgggacatattttcctgagagcagcacaggaatcttcttcttggcagctgcagtctgtcaggatgagatatcagattaggttggataggtggggaaatctgaagtgggtacattttttaaattttgctgtgtgggtcacacaaggtctacattacaaaagacagaattcagggatggaaaggagaatgaacaaatgtgggagttcatagttttccttgaatccaacttttaattaccagagtaagttgccaaaatgtgattgttgaagtacaaaaggaactatgaaaaccagaacaaattttaacaaaaggacaaccacagagggatatagtgaatatcgtatcattgtaatcaaagaagtaaggaggtaagattgccacgtgcctgctggtactgtgatgcatttcaagtggcagttttatcacgtttgaatctaccattcatagccagatgtgtatcagatgtttcactgacagtttttaacaataaattcttttcactgtattttatatcacttataataaatcggtgtataatttt

SEQ ID NO: 220526 - DNA, 1000 bp, Homo Sapiens; identical to SEQ ID NO: 115117

SEQ ID NO: 220527 - DNA, 1000 bp, Homo Sapiens
gtcactgagtctggagtgaaccacgggttgaggaagtcaggctgttggcgtgtcccagcaccacaccatccctaaagtgccaggtgatctcctgtggctcatcggtggaagcagtggggtaggctgctgccctgctgtggaagaggagcaacaatcagacatgagtccaccctttggagaccaggcctcagctcttggtgggcccagggacacccacacaggtggccatcacagccccatggacaacactaattgtccacagcaaagggcaaggaatcctctgggagcttcttccgtttcttcccccaagatacccatcttgaaaaacactatttctggaatgcttctgcatcaaaggagattctttgagatagcccatcttcctgagctagcaaatacaggagttttcactttctttaggaaagagaagctttcaggggaaggagagaatgattttgctgacttcccaagccctggtgaccagaccaaggcagggcccagcataattcctccagttggatgaacattcaagagagctcgttcctacctggctggagaccgaggccagaaggcaaaaaccagaaagggaacagtccataacttacctctgcttctgaccgatggtgtttgggaataggttactttggactgagtttgggttctttgctgtcctaagaactttagtgtagagaaaataagacttctggtgctgctggggtatgttctgggcttaattcccccaagcagaagaccagatccaagatgtttggacaccctgtcagacgttggtcccaagtttaattagatttctgaatctcgttgaggccaaggaatgatccatactgaaaaaatgctgagccagccatctttggcaaaggtccctgagctcttgctatctctcaagagtgctgagaaccacggtgaaagtgctgctctaggcccacaagtgtaactatgctgttaacagctgtcaatagataattaaaattcatactgtatg

SEQ ID NO: 220528 - DNA, 1000 bp, Homo Sapiens
gacagcctgtccccagaggctgtccgctgcaccattgaagctggctaccctggtgtcctctctagtcgggacaagtatggccgagtggtcatgctcttcaacattgagaactggcaaagtcaagaaatcacctttgatgagatcttgcaggcatattgcttcatcctggagaagctgctggagaatgaggaaactcaaatcaatggcttctgcatcattgagaacttcaagggctttaccatgcagcaggctgctagtctccggacttcagatctcaggaagatggtggacatgctccaggattccttcccagcccggttcaaagccatccacttcatccaccagccatggtacttcaccacgacctacaatgtggtcaagcccttcttgaagagcaagctgcttgagagggtctttgtccacggggatgacctttctggtttctaccaggagatcgatgagaacatcctgccctctgacttcgggggcacgctgcccaagtatgatggcaaggccgttgctgagcagctctttggcccccaggcccaagctgagaacacagccttctgaaaacatctcctgccagctgaactgtagttagaatctctgggcctctcctcaactgtcctggacccaaggctaggaaagggctgcttgagatgactgtggtccccccttagactccctaagcccgagtgagctcaggtgtcaccctgttctcaagttgggggatgggtaataaaggagggggaattcccttgaacaagaagaactggggatagttatatttccacctgcccttgaagctttaagacagtgatttttgtgtaaggttgtatttcaaagactcgaattcattttctcagtcatttcctttgtaacagagttttacgacttagagtctgtgaaaacaggcaaggagcccgggttaaaatatccccctattcgcccccaaaatgcaataaaagaagataaaagagagaggataaaaaaaaaaaaa

SEQ ID NO: 220529 - DNA, 1000 bp, Homo Sapiens
tcgtcgccctcgggctagccctggctttgcctgggagtctggatgaggcgctggaggagggcctggtgactgccttggctcactacaaggacacagaggtgcctgggcactgtcaggccaaaaggctggtggatgagctgcaactgaggtaccactgctgcgggcgccacgggtacaaggattggtttggggtccagtgggtcagcagccgttacctggatcccggtgaccgggatgtggctgaccggatccagagcaatgtagaaggcctatacctgactgatggggtccctttctcctgttgcaacccccactcaccccggccttgcctgcaaaaccgtctttcagactcctacgcccaccccctgttcgatccccgacaacccaaccaaaacctctgggcccaagggtgccatgaggtgctgctggagcacttgcaggacttggcaggcacactgggtagcatgctggctgtcaccttcctactgcaggctctggtgctccttggcctgcggtacctgcaaacagcactggaggggcttggaggggtcattgatgcgggaggagagacccagggctatctctttcccagtgggctgaaagatatgctgaaaacagcatggctacagggaggggttgcctgcaggccagcacctgaggaggccccaccaggagaagcacctcccaaggaggatctatctgaggcctagaggcctggagcttggggtgaggaagagggagggatggacaagtctgaaaacctcacaactccttaccaaggctccaggttggggggatcgtaggattagaggggctaaggatagtcagcgagctggactggggtaagaaagaaaaccagatgtcctagggcctagcccttgtagtcagaaccaccagggaacagcaaagaacagagtgatgggaaagtgacatgagaaggcctggaggctgattctgatatagactcaataaagtttttggatggaaaaaaaaaaaaaaa

SEQ ID NO: 220530 - DNA, 1000 bp, Homo Sapiens
gtgagtactcataaaggacactggatcaagttcagccaccgaattgcttttatcagtgttaaagtggtctgaactgcttgctaccaatctgtgagaagtttttgtttttgttttgttttttaacttgcagtatatcacagagccactcttcaagtagattggctgggcaaaagaatgttttggcaagagcgttactgtagacctttctccctccttccttttactaccatttttttttaacactgtcatctgtaggtcactctccagcagttaggcaccttaactggagaccagaaaccttccagagaacacagggctgcatcccgagcaaccctctgaagaagggaattaggctttagattttgatagcaatgttccaggaatgaaatatagatgttagcccaagacaccatgacaaaatagcccagccttttgagagtaatttgggaaaagaagctgtcagaagtttctaacttacaaactggtttgaaatttttgatgcccagacagcaagtataaatcattttggaggcttacttttcatgatacaaaagcaattctgtgtgatttttttttttaagaagaaagaaaatgcaagctagttttgagaaaggaaggccaaattgggtcgggggagggtgggagtgaggaagttaaaatcactatagggagaaaaaacttttttcaagatttccaaagagatgaaattttcttaatccttttaagttttcatagtaaacagtatggcagattgggttggttgtcctacctggtctatttttaaaagtcaccttttaaagtgacattattagatacacttaaatgtttccaaggcactctctacattacccttgtttttctctttggatactgtcctgggactaagtgtagatttctgcttcaagcacttctggcattgtgtgtttttgtatgcactccccttcatgccacttcagatgtttatttggatgtggttggggacgagagcagacaccaagga

SEQ ID NO: 220531 - DNA, 1000 bp, Homo Sapiens; identical to SEQ ID NO: 115118

SEQ ID NO: 220532 - DNA, 1000 bp, Homo Sapiens
acattagctaaggtcagcttaataacacaaatatgaggccgacttctttgcgagaagagaaaagaaaacatctgcttgatttaaaatccaccccacatgcctagagttgtctaatagtccctcactttccaatggcttcacatcctacttctacatttggggttttttggtgaaatcagagatagctcaggatttcataaaacgagaaactccaaactggtctattaggttccatgggaacacttgtagccaaaggattgtctgagggcaggaagacgacacttgtcaacaaggaagacagtgtttctttagttcccatattcatctaattcatggggttctaacattttggggggccatagattcttttgacaatctgagccaatctatgaaacttctccccaaaaagaaccaccccacaaaatcttgcaaaacgtaagagattttcctggatctgaagctacccgaagacatgggaagagttgtattctattattcaattttaagaatatttattaatattcactgagctattgctagccactgtgctaaacattttacatacattctcctatttcatcctcaaaacaatcctttgagttgggttttaatatagttccaatattcggatgtgaaaactgaggcttatagtggctaagaaacttgcccaaagccactacctagaaaatggcagagctggaatgtaggtttaactcctgaccactatgctataaagtcaccacatgtcaaactaattttcaagttgttgggacatgtcccctactaggttttaaactagatcttccttggtagatgaagctatagaacttctattttccctgctttctgtagtctctcacagtgacagcatctatactaaagtatagatacctaaggggaaaatatagaaagcctgcctgaataatagaatctagaacaacaacaaaaatattaattttttctgtgtatgcttaggtcaagcttaaaaaaaaaaaaaaaa

SEQ ID NO: 220533 - DNA, 1000 bp, Homo Sapiens
aagaaaaactggaggaaagctcccttgacagagattgagaactacgtgggaatcatacatgatgcatttgattttgagattggcgtggttatagtcagaatcagccaaggatttgacatctctcaggttcttcaggtgcaagaggaattagagagattagaacaggagagactagcattggaagcgactatcaaagataatgagtgtgaagaggaaagtggaggcatccgaggcttgtttaaaaaagctggcaagttgaacattactaagacaacgcctaaaaaagatggcagcattaacacaagccagtcgatgcatgtgggagagttcaaccagaaactggtggaagccagcactcaatttaaaaagaaacaagaaaaaggcacaattgatgtttggtggttgtttgatgatggagggttaacacttcttatcccctatatcttaactctcagaaaaaaatggaaagactgtaaattaagaatctatgtgggagggaagatcaaccgcattgaagaagaaaaaattgcaatggcttcccttctgagcaaatttaggataaaatttgcagacatccatatcatcggtgacatcaacattaggccaaacaaagagagctggaaagtctttgaagagatgattgaaccatatcgtctccatgaaagctgcaaagatttaacaactgctgagaaattaaaaagagaaactccgtggaaaattacagatgcagaactggaagcagtcaaggaaaagagttaccgccaagttcgactgaatgaactcttacaggagcactccagagctgctaatctcattgtcctgagccttcccgtggcaagaaagggatccatatcggatttgttgtatatggcttggttggaaatcctcacaaagaacctcccacctgtcttactagttagaggaaatcacaaaaatgtcttgacattttactcttaaaacatgaaagattggaatacattttaacttaatgtaatgcata

SEQ ID NO: 220534 - DNA, 1000 bp, Homo Sapiens
ctattgctttcataggcaccagtcagaataaagaatcataattcacacaaacatcagtctttgttttaatattgtactgttaaaaaaatctatgcagctgggtgcagtggctcacgcctgtaatcccagcattttgggaggctgaggtaggcggatcacaaggtcaggagatcgagaccatcctggccaacatggtgaaaccccgtctctactaaaatacaaaaaattagctgggtgtggtggcgcaaacctgtagtcgtagctacttgggaggctgaggcaggggaatcacttgaaccccggaggcggaggttgtagtgggccgagattgtgccactgcgctccagcgtgggcgacagagtgagactccatctcaaaaaaaaaaaaaaaaaaatctatgctagtagattacaacttcacactagaggagttctggacaaagcttttaattagtcaaactaaattaaggctcattaaaaggaaaggaactactgggaaattatgcaattcaataatttagactctgttaccaggatctttcataaaaatttaatttccataatcataacctaaatgagttcttaaagaattctataagcaatagctgattaatgggccctggaagatgaagattataactgtttatttacctaattaaaaggaaaggcagtgccaaatatgagaggataaacaatattagttaacatttctgttatttatgatgccaattagtagtaagataattccacagctgtcaactttgtttggggctggcaacttctctgcttaaacaggctaaaagtttagtattctgggagaagtggctggaagaaggggtaatatggtgaaagcaaattccctttcccaggagtcaagagaatttatgtgaggtggctcccgcctgtaatctcagcactttgggaggccaaggcaggcaatcacctgagggcaggagaccagcctgactaacatggagaaaccccatctctactaaaaatac

SEQ ID NO: 220535 - DNA, 1000 bp, Homo Sapiens
caaaccccgaaacagtaagaaattggagtgagaagggcatggtattgggactaggatcggctctcattcgatcgagctattctcttaaaatgacaaaaagtgtccataaagaggctgctggagagtgcgtggccatagggagccgacatgcccgggaggaaaggtgttgattacatggatacttctaaaagctaaagccttgttgccttctctttaatgcctagagaatgggatgtgtgatgcaaatgctcaaaacctcttaaatcatagctgtctgacctctacggacctcacatccatctgaggcttcatggacaaagattctccacttggccaaactttagccaagctcctcaaccttctcccaggcccaatctgggcacttccttgtaaaatctagttttggcaagaagtctattaggtcagtttagcaagaacacctaacccccccatatctgttcaacctcagtatctgatcaggctcctcagcctccaccatcccccaggtgatgtctggtcaactggcctgccttcagctagaatcctgttaggtcggtttagatgaatgctccctgatatttcctcttggtaatcttccatccactgcccctgaccctgttccctgtctataaatccccagttttccatggtgtattcagagctgagtccagtctctctcccctactacaagtccccattgctgtggtccccgtacctgtcatgatggtcctaaataaagtcttactgtgctttaataggtagcattgaaaaatttttttctttgacatcattcatgacaacatgaaacctattgggacagcatgactgtgcagggtctttagagctcagctttctgaggccctgagcattcttggttttccgacatcgtgaacctgttctgtgttgcaagatatcactcaagccagtgttgcttaataccatctctttgtgtaatagatctgaataaagtaattgtaatacaccaaaaaaaaaaaaaaaa

SEQ ID NO: 220536 - DNA, 1000 bp, Homo Sapiens; identical to SEQ ID NO: 115120

SEQ ID NO: 220537 - DNA, 1000 bp, Homo Sapiens
caaagggaaagttgtgggtctaattcaagacctcaagccaaacaccactatggtcttagtgaactatattcactttaaagcccagtgggcaaatccttttgatccatccaagacagaagacagttccagcttcttaatagacaagaccaccactgttcaagtgcccatgatgcaccagatggaacaatactatcacctagtggatatggaattgaactgcacagttctgcaaatggactacagcaagaatgctctggcactctttgttcttcccaaggagggacagatggagtcagtggaagctgccatgtcatctaaaacactgaagaagtggaaccgcttactacagaagggatgggttgacttgtttgttccaaagttttccatttctgccacatatgaccttggagccacacttttgaagatgggcattcagcatgcctattctgaaaatgctgatttttctggactcacagaggacaatggtctgaaactttccaatgctgcccataaggctgtgctgcacattggtgaaaagggaactgaagctgcagctgtccctgaagttgaactttcggatcagcctgaaaacactttcctacaccctattatccaaattgatagatctttcatgttgttgattttggagagaagcacaaggagtattctctttctagggaaagttgtgaacccaacggaagcgtagttgggaaaaaggccattggctaattgcacgtgtgtattgcaatgggaaataaataaataatatagcctggtgtgattgatgtgagcttggacttgcattcccttatgatgggatgaagattgaaccctggctgaactttgttggctgtggaagaggccaatcctatggcagagcattcagaatgtcaatgagtaattcattattatccaaagcataggaaggctctatgtttgtatatttctctttgtcagaatacccctcaactcatttgctctaataaatttgactgggttg

SEQ ID NO: 220538 - DNA, 1000 bp, Homo Sapiens; identical to SEQ ID NO: 115338

SEQ ID NO: 220539 - DNA, 1000 bp, Homo Sapiens
tataagcacccagaaggctcagacgcagagcggaaggcagtagagacagcagcagcccacggcagcaaacccaatgtgtatgccaaccggggctcagcggaggatgtggccatgcaggtggaggcacaggacgcggtgatggggcaggatctgatggtctctgtgatgctgatcaatcacagcagcagccgccgcacagtgaaactgcacctctacctctcagtcactttctatactggtgtcagtggtaccatcttcaaggagaccaagaaggaagtggagctggcaccaggggcctcggaccgtgtgaccatgccagtggcctacaaggaataccggccccatcttgtggaccagggggccatgctgctcaatgtctcaggccacgtcaaggagagcgggcaggtgctggccaagcagcacaccttccgtctgcgcaccccagacctctccctcacgttactgggagcagcagtggttggccaggagtgtgaagtacagattgtcttcaagaacccccttcccgtcaccctcaccaatgtcgtcttccggctcgaaggctctgggttacagaggcccaagatcctcaacgttggggacattggaggcaatgaaacagtgacactgcgccagtcgtttgtgcctgtgcgaccaggcccccgccagctcattgccagcttggacagcccacagctctcccaggtgcacggtgtcatccaggtggatgtggccccagcccctggggatgggggcttcttctcagacgctggaggtgacagtcacttaggagagaccatccctatggcatctcgaggtggagcttagccctgtgccaggagcaatgggactggagtcagatgagcaaggacattgccccaagataggggcacactacagagcagctccccaggagctcaggtggggagtccagggctcccggagagggagtcagtcttcacttgcactgggggaacagatgctaataaactgttttttaatg

SEQ ID NO: 220540 - DNA, 1000 bp, Homo Sapiens
gacgtctcccgcttcctgaaggagcgcacgggcttccagctgcggcctgtggccggcctgctgtccgcccgggacttcctggccagcctggccttccgcgtgttccagtgcacccagtatatccgccacgcgtcctcgcccatgcactcccctgagccggactgctgccacgagctgctggggcacgtgcccatgctggccgaccgcaccttcgcgcagttctcgcaggacattggcctggcgtccctgggggcctcggatgaggaaattgagaagctgtccacgctgtcatggttcacggtggagttcgggctgtgtaagcagaacggggaggtgaaggcctatggtgccgggctgctgtcctcctacggggagctcctgcactgcctgtctgaggagcctgagattcgggccttcgaccctgaggctgcggccgtgcagccctaccaagaccagacgtaccagtcagtctacttcgtgtctgagagcttcagtgacgccaaggacaagctcaggagctatgcctcacgcatccagcgccccttctccgtgaagttcgacccgtacacgctggccatcgacgtgctggacagcccccaggccgtgcggcgctccctggagggtgtccaggatgagctggacacccttgcccatgcgctgagtgccattggctaggtgcacggcgtccctgagggcccttcccaacctcccctggtcctgcactgtcccggagctcaggccctggtgaggggctgggtcccgggtgccccccatgccctccctgctgccaggctcccactgcccctgcacctgcttctcagcgcaacagctgtgtgtgcccgtggtgaggttgtgctgcctgtggtgaggtcctgtcctggctcccagggtcctgggggctgctgcactgccctccgcccttccctgacactgtctgctgccccaatcaccgtcacaataaaagaaactgtggtctctaaaaaaaaaaaaaaaaaaaaaa

SEQ ID NO: 220541 - DNA, 1000 bp, Homo Sapiens
gactacactagagcagcggttagaatggctgaggagcactctgaatttgttgttggttttatttctggctcccgagtaagcatgaaaccagaatttcttcacttgactccaggagttcagttggaagcaggaggagataatcttggccaacagtacaatagcccacaagaagttattggcaaacgaggttccgatatcatcattgtaggtcgtggcataatctcagcagctgatcgtctggaagcagcagagatgtacagaaaagctgcttgggaagcgtatttgagtagacttggtgtttgagtgcttcagatacatttttcagatacaatgtgaagacattgaagatatgtggtcctcctgaaagtcactggctggaaataatccaattattcctgcttggattcttccacagggcctgtgtaagaatgggttctggagttctcatggtctttaggaaatattgagtaatttgtaatcaccgcattgatactataataagttcattcttaagcttgctttttttgagactggtgtttgttagacagccacagtcctgtctgggttagggtcttccacatttgaggatccttcctatctctccatgggactagactgctttgttattctatttattttttaatttttttcgagacaggatctcactctgttgcccaggatggagtgcagtggtgagatcacggctcattgcagcctcgacctcccaggtgatcctcccacctcagcttccagattagctggtgctataggcatgcaccaccacgtccatctaaatttctttattatttgtagagatgaggtcttgccatgttacccaggctggtctcaactcctgggctcaagcgatcctcctgcctcagtctctcaaagtgctgggattacaggtgtgagccactgtgcccagcctaattgcagtaagacaaaaattctagggcaccaagaggctaaagtcagcacagcttttcttgtgtcctgtatt

SEQ ID NO: 220542 - DNA, 1000 bp, Homo Sapiens
ttgacgtgaacaacctcgacccagatctgcggagtctgttctccagggcaggaatcagcgaggcccagctcaccgacgccgagacctctaaacttatctacgacttcattgaggaccagggtgggctggaggctgtgcggcaggagatgaggcgccaggagccacttccgccgcccccaccgccatctcgaggagggaaccagctcccccggccccctattgtggggggtaacaagggtcgttctggtccactgccccctgtacctttggggattgccccacccccaccaacaccccggggacccccacccccaggccgagggggccctccaccaccaccccctccagctactggacgttctggaccactgccccctccaccccctggagctggtgggccacccatgccaccaccaccgccaccaccgccaccgccgcccagctccgggaatggaccagcccctcccccactccctcctgctctggtgcctgccgggggcctggcccctggtgggggtcggggagcgcttttggatcaaatccggcagggaattcagctgaacaagacccctggggccccagagagctcagcgctgcagccaccacctcagagctcagagggactggtgggggccctgatgcacgtgatgcagaagagaagcagagccatccactcctccgacgaaggggaggaccaggctggcgatgaagatgaagatgatgaatgggatgactgagtggctgagttacttgctgccctgtgctcctccccgcaggacatggctccccctccacctgctctgtgcccaccctccactctcctcttccagggcccccaaccccccatttcttccccaccaacccctccaatgctgttatccctgcctggtcctcacactcacccaacaatcccaaggccctttttatacaaaaattctcagttctcttcactcaaggatttttaaagaaaaataaaagaattgtctttctgtctctctat

SEQ ID NO: 220543 - DNA, 1000 bp, Homo Sapiens
ctgggtcacagctgcctacatggacacagtgagcttgtctgccactgggttttatagaacacccaatctgggctacagctttgagactaactcagggaaccgcttccactacttcagctatggggtggcttgctctgaagtagaaatcgactgcctaacaggagatcataagaacctccgcacagatattgtcatggatgttggctccagtctaaaccctgccattgatattggacaggtggaaggggcatttgtccagggccttggcctcttcaccctagaggagctacactattcccccgaggggagcctgcacacccgtggccctagcacctacaagatcccggcatttggcagcatccccattgagttcagggtgtccctgctccgcgactgccccaacaagaaggccatctatgcatcgaaggctgttggagagccgcccctcttcctggctgcttctatcttctttgccatcaaagatgccatccgtgcagctcgagctcagcacacaggtaataacgtgaaggaactcttccgcctagacagccctgccaccccggagaagatccgcaatgcctgcgtggacaagttcaccaccctgtgtgtcactggtgtcccagaaaactgcaaaccctggtctgtgagggtctaaagagagagtcctcagcagagtcttcttgtgctgcctttgggcttccatggagcaggaggaacataccacagaacatggatctattaaagtcacagaatgacagacctgtgatttgtcaagatgggatttggaagacaagtgaatgcaatggaagattttgatcaaaaatgtaatttgtaaacacaatgataagcaaattcaaaactgttatgcctaaatggtgaatatgcaattaggatcattttctgtctgttttaatcatgtatctggaatagggtcgggaagggtttgtgctattccccacttactggacagcctgtataacctcaaaaaaaaaaaaaaaaa

SEQ ID NO: 220544 - DNA, 1000 bp, Homo Sapiens
ttgtgataactgcagagatgctgatgataaacacaagcttataaccaaaacagaggcaaaacaagaatatcttctgaaagactgtgatttagaaaaaagagagccacctcttaaatttattgtgaagaagaatccacatcattcacaatggggtgatatgaaactctacttaaagttacagattgtgaagaggtctcttgaagtttggggtagtcaagaagcattagaagaagcaaaggaagtccgacaggaaaaccgagaaaaaatgaaacagaagaaatttgataaaaaagtaaaagaattgcggcgagcagtaagaagcagcgtgtggaaaagggagacgattgttcatcaacatgagtatggaccagaagaaaacctagaagatgacatgtaccgtaagacttgtactatgtgtggccatgaactgacatatgaaaaaatgtgattttttagttcagtgacctgttttatagaattttatatttaaataaaggaaatttagattggtccttttcaaaattcaaaaaaaaaagcaacatcttcatagatgaatgaaacccttgtataagtaatacttcagtaataattatgtatgttatggcttaaaagcaagtttcagtgaaggtcacctggcctggttgtgtgcacaatgtcatgtctgtgattgccttcttacaacagagatgggagctgagtgctagagtaggtgcagaagtggtaggtcagctacaaatttgaggacaagataccaaggcaaaccctagattggggtagagggaaaagggttcaacaaaggctgaactggattcttaaccaagaaacaaataatagcaatggtggtgcaccactgtaccccaggttctagtcatgtgttttttaggacgatttctgtctccacgatggtggaaacagtggggaactactgctggaaaaagccctaatagcagaaataaacattgagttgtacgagtctgaaaaaaaaaaaaaaaaaaaaaaa

SEQ ID NO: 220545 - DNA, 1000 bp, Homo Sapiens; identical to SEQ ID NO: 115126

SEQ ID NO: 220546 - DNA, 1000 bp, Homo Sapiens
gtctcgattccagactgcacctcctgggaaatatcctaatggtttcagagatgtgctgagggagctgatccgggatgaaggagtcacatccttgtacaaagggttcaatgcagtgatgatccgagccttcccagccaatgcggcctgtttccttggctttgaagttgccatgaagttccttaattgggccacccccaacttgtgaggctgaaggctgctcaagttcacttctggatgctggaagctgtcgttgaggagaaggagtagtaagcagaactaagcagtcttggagggcaaggggaggggaatggtgagatccgagccctgtgcatggacttggtgagactgttgccttaatgacatcctgcaccgtgtataacttagtgtgtcattttgaaacttgaattcattcttatcaatttaagggatcttaaaaggatttggaaatggaacaagtagcttccagaccagatactacctgtggcaagaatgctgcctaccagttaactgctggtcctaccacagtcaaagtattcctcattaaagagagaatctcaggttctcactggaggcactgtgcatattttcaaccagatcaccaggagctgagatcttcttcagtccctagccaggaatacccatttgatttccagggtgccatctaatcctgggctgtacatgtggatatggacttgaggcccacctctgtgtccaagtggattgagcatatatgcctaggaggagatagactgttaatcgttggattttgattttttttttttatgcctgcaaataatcaaaagtaaaactggagtagcctaattttctgggagcaggtggagaactttccctcctacacagtgaggacagtcccagtctgctgggataagtgagaaagcccagggtgtaggaaggccctttttacatactcttttctcatgagagctcactattttaacaataaacaataaacgttgtttctaaaaaaaaaaaaaaaaaa

SEQ ID NO: 220547 - DNA, 1000 bp, Homo Sapiens; identical to SEQ ID NO: 115128

SEQ ID NO: 220548 - DNA, 1000 bp, Homo Sapiens
gcaaaagggagagagaggggaagggggtctcatattggtcattccctgccccagatttcttaaagtttgatatgtatagaatataattgaaggaggtatacacatactgatgttgttttgattatctatggtattgaatcttttaaaatctggtcacaaattttgatgctgagggggattattcaagggactaggatgaactaaataagaactcagttgttctttgtcatactactattcctttcgtctcccagaatcctcagggcactgagggtaggtctgacaaataaggcctgctgtgcgaatatagcctttctgaaatgtaccaggatggtttctgcttagagacacttaggtccagcctgttcacactgcacctcaggtatcaattcatctattcaacagatatttattgtgttattactatgagtcaggctctgtttattgtttcaattctttacaccaaagtatgaactggagagggtacctcagttataaggagtctgagaatattggccctttctaacctatgtgcataattaaaaccagcttcatttgttgctccgagagtgtttctccaaggttttctatcttcaaaaccaactaagttatgaaagtagagagatctgccctgtgttatccagttatgagataaaaaatgaatataagagtgcttgtcattataaaagtttcctttttatctctcaagccaccagctgccagccaccacgagccagctgccagcctagctttttttttttttttttttttagcacttagtatttagcatttattaacaggtactctaagaatgatgaagcattgtttttaatcttaagactatgaaggtttttcttagttcttctgcttttgcaattgtgtttgtgaaatttgaatacttgcaggctttgtatgtgaataattctagcgggggacctgggagataattctacggggaattcttaaaactgtgctcaactattaaaatgaatgagctttc

SEQ ID NO: 220549 - DNA, 1000 bp, Homo Sapiens
tggccatcaaacccgtatttgagcgtttccagtctgtcatcatcacatctgggacactgtccccgctggacatctaccccaagatcctggacttccaccccgtcaccatggcaaccttcaccatgacgctggcacgggtctgcctctgccctatgatcatcggccgtggcaatgaccaggtggccatcagctccaaatttgagacccgggaggatattgctgtgatccggaactatgggaacctcctgctggagatgtccgctgtggtccctgatggcatcgtggccttcttcaccagctaccagtacatggagagcaccgtggcctcctggtatgagcaggggatccttgagaacatccagaggaacaagctgctctttattgagacccaggatggtgccgaaaccagtgtcgccctggagaagtaccaggaggcctgcgagaatggccgcggggccatcctgctgtcagtggcccggggcaaagtgtccgagggaatcgactttgtgcaccactacgggcgggccgtcatcatgtttggcgtcccctacgtctacacacagagccgcattctcaaggcgcggctggaatacctgcgggaccagttccagattcgtgagaatgactttcttaccttcgatgccatgcgccacgcggcccagtgtgtgggtcgggccatcaggggcaagacggactacggcctcatggtctttgccgacaagcggtttgcccgtggggacaagcgggggaagctgccccgctggatccaggagcacctcacagatgccaacctcaacctgaccgtggacgagggtgtccaggtggccaagtacttcctgcggcagatggcacagcccttccaccgggaggatcagctgggcctgtccctgctcagcctggagcagctagaatcagaggagacgctgaagaggatagagcagattgctcagcagctctgagtggggcgggtggggccataaacggttcctggtgactcctg

SEQ ID NO: 220550 - DNA, 1000 bp, Homo Sapiens; identical to SEQ ID NO: 115131

SEQ ID NO: 220551 - DNA, 1000 bp, Homo Sapiens
aacactggagtagcccttgttttagaggctgtgcattgagtatcgaccgtattttgtaaaaggcaagatatcctcccttccaggctggtaacgggtttcaaggggactcttgaggaagtgccccctaaaatagaacacagcaataactgggcttcctgtccccacccccaccccagcagtgctctctggcactgggaactctgctagggagtggtggaagtaggaaggatttgtgtgcaaaggaaaatcgtggttgagtttcactgcagcaggctgacgttgcctgatgtgagagcaagtggccgactggggtgcgggtgcacaggtcgggggagcacaggccacagagcgcagcctctgggggtcccccaaggcacagcatatacagcatggtcgccccttgccctggagtctgggaacaaagagaggagccagcctccccgcactgcttcagatggaaaagggaggcagggtgggcttccgttctccagatctgtttgctcttaacaggcagaacatgggagaatccttattcctggttaatcactatgcatatttgaaataaaagaaagcgtaagcctctgcaattttaacttctcaaaggatgtctctgaaaagaatcactttaaaccaatgcctataaaaagcaagtctaccaaaataaactaagactttctatgtggtttgggctccctcttatttttacaagtttcatttttaaaagtaggcaactactttgggttacagtatttttattcatatttaaacatttttacaaaataaataaagtgttttacatagtaaggaatatgtacgtatttccaagtattaagaagccaagtgtttttttttttgacgtattattgacaaatgtattcagcgccatacacaagagaaatattattactccaaagaacgaaagttaacaaaactccaaagcaaaaacccttttaatggaggtgagaaataaatttaatgtaacaacaaaaaaaaaaaaaaa

SEQ ID NO: 220552 - DNA, 1000 bp, Homo Sapiens
ccctatatgtagtataaagaaaagtaggtttacattcatctcattccaacttcccagttcaggagtcccaaggaaagccccagcactaacgtaaatacacaacacacacactctaccctatacaactggacattgtctgcgtggttcctttctcagccgcttctgactgctgattctcccgttcacgttgcctaataaacatccttcaagaactctgggctgctacccagaaatcattttacccttggctcaatcctctaagctaacccccttctactgagccttcagtcttgaatttctaaaaaacagaggccatggcagaataatctttgggtaacttcaaaacggggcagccaaacccatgaggcaatgtcaggaacagaaggatgaatgaggtcccaggcagagaatcatacttagcaaagttttacctgtgcgttactaattggcctctttaagagttagtttctttgggattgctatgaatgataccctgaatttggcctgcactaatttgatgtttacaggtggacacacaaggtgcaaatcaatgcgtacgtttcctgagaagtgtctaaaaacaccaaaaagggatccgtacattcaatgtttatgcaaggaaggaaagaaagaaggaagtgaagagggagaagggatggaggtcacactggtagaacgtaaccacggaaaagagcgcatcaggcctggcacggtggctcaggcctataaccccagctccctaggagaccaaggcgggagcatctcttgaggccaggagtttgagaccagcctgggcagcatagcaagacacatccctacaaaaaattagaaattggctggatgtggtggcatacgcctgtagtcctagccactcaggaggctgaggcaggaggattgcttgagcccaggagttcgaggctgcagtcagtcatgatggcaccactgcactccagcctgggcaacagagcaagatcctgtctttaaggaaaaaaagacaagg

SEQ ID NO: 220553 - DNA, 1000 bp, Homo Sapiens
tgctggacgtgccggtccgggcagaggcccaagtggagctgcgagggaactcctttccagcctccctggtggtggcagcagaagaaggtgagagggagcagaacagcttggacagctggggacccaaagtggagcacacctatgagctccacaacaatggccctgggactgtgaatggtcttcacctcagcatccaccttccgggacagtcccagccctccgacctgctctacatcctggatatacagccccaggggggccttcagtgcttcccacagcctcctgtcaaccctctcaaggtggactgggggctgcccatccccagcccctcccccattcacccggcccatcacaagcgggatcgcagacagatcttcctgccagagcccgagcagccctcgaggcttcaggatccagttctcgtaagctgcgactcggcgccctgtactgtggtgcagtgtgacctgcaggagatggcgcgcgggcagcgggccatggtcacggtgctggccttcctgtggctgcccagcctctaccagaggcctctggatcagtttgtgctgcagtcgcacgcatggttcaacgtgtcctccctcccctatgcggtgcccccgctcagcctgccccgaggggaagctcaggtgtggacacagctgctccgggccttggaggagagggccattccaatctggtgggtgctggtgggtgtgctgggtggcctgctgctgctcaccatcctggtcctggccatgtggaaggtcggcttcttcaagcggaaccggccacccctggaagaagatgatgaagagggggagtgatggtgcagcctacactattctagcaggagggttgggcgtgctacctgcaccgccccttctccaacaagttgcctccaagctttgggttggagctgttccattgggtcctcttggtgtcgtttccctcccaacagagctgggctaccccccctcctgctgcctaataaagagactgagccctg

SEQ ID NO: 220554 - DNA, 1000 bp, Homo Sapiens
tacagtcccaactggccttgaaacaatccctggaagcctccttggcagaaacagaaggtcgctactgtgtgcagctctcacagattcaggcccagatatccgctctggaagaacagttgcaacagattcgagctgaaaccgagtgccagaatactgaataccaacaactcctggatattaagatccgactggagaatgaaattcaaacctaccgcagcctgctagaaggagagggaagttccggaggcggcggacgcggcggcggaagtttcggcggcggctacggcggcggaagctccggcggcggaagctccggcggcggctacggcggcggccacggcggcagttccggcggcggctacggaggcggaagctccggcggcggaagctccggcggcggctacgggggcggaagctccagcggcggccacggcggcagttccagcggcggctacggtggtggcagttccggcggcggcggcggcggctacgggggcggcagctccggcggcggcagcagctccggcggcggatacggcggcggcagctccagcggaggccacaagtcctcctcttccgggtccgtgggcgagtcttcatctaagggaccaagatactaacaaaaccagagtaatcaagacaattattgaagaggtggcgcccgacggtagagttctttcatctatggttgaatcagaaaccaagaaacactactattaaactgcatcaagaggaaagagtctcccttcacacagaccattatttacagatgcatggaaaacaaagtctccaagaaaacacttctgtcttgatggtctatggaaatagaccttgaaaataaggtgtctacaaggtgttttgtggtttctgtatttcttcttttcactttaccagaaagtgttctttaatggaaagaaaaacaactttctgttctcatttactaatgaatttcaataaactttcttactgatgcaaactaaaaaaaaaaaaaaaaaaaaaa

SEQ ID NO: 220555 - DNA, 1000 bp, Homo Sapiens
caacagaaccatcagtcccaaaaaagccgacatcctggatgtcgtgggaatgctgtatgttggtgggttacccatcaactacactacccgaagaattggtccagtgacctatagcattgatggctgcgtcaggaatctccacatggcagaggcccctgccgatctggaacaacccacctccagcttccatgttgggacatgttttgcaaatgctcagaggggaacatattttgacggaaccggttttgccaaagcagttggtggattcaaagtgggattggaccttcttgtagaatttgaattccgcacaactacaacgactggagttcttctggggatcagtagtcaaaaaatggatggaatgggtattgaaatgattgatgaaaagttgatgtttcatgtggacaatggtgcgggcagattcactgctgtctatgatgctggggttccagggcatttgtgtgatggacaatggcataaagtcactgccaacaagatcaaacaccgcattgagctcacagtcgatgggaaccaggtggaagcccaaagcccaaacccagcatctacatcagctgacacaaatgaccctgtgtttgttggaggcttcccagatgacctcaagcagtttggcctaacaaccagtattccgttccgaggttgcatcagatccctgaagctcaccaaaggcacaggcaagccactggaggttaattttgccaaggccctggaactgaggggcgttcaacctgtatcatgcccagccaactaataaaaataagtgtaaccccaggaagagtctgtcaaaacaagtatatcaagtaaaacaaacaaatatattttacctatatatgttaattaaactaatttgtgcatgtacatagaattctttctgtattcagatggtgctaattcagactccagactgaattttaattcaagttctttctcaagtctataaatattaaactgattatttcattctaaaaaaaaaaaaaaaaaa

SEQ ID NO: 220556 - DNA, 1000 bp, Homo Sapiens; identical to SEQ ID NO: 115138

SEQ ID NO: 220557 - DNA, 1000 bp, Homo Sapiens; identical to SEQ ID NO: 115139

SEQ ID NO: 220558 - DNA, 1000 bp, Homo Sapiens
aaaacagcccagtattcctttgtatcctcaagggtccttgagaatacttctgttattgagaccctgtgggctacttgtactgtacctcctctcaagccaagaagggctgtgggataatttaccatgaatccttagtagcaatgacagcagagttaaaaaataaaaggtgttttactttcaggctcttgttttggttcagaggagattttaaatattgaatgacacttctacagaacaacggtttttcttctgccaaggctacttcctttaacgaagtgcctttaattcagccttatccaactagggaaaataatgttggacaagtctaggatttgaagagtcagtgaacttttagtgtcagggaataaacatggtgggtagattaggtttgaaaaaaacttccttagaggtatttattctcaatacctgacaggggcccatgggaatgacttcagaagcatcccggataatagatgggtaaaaagtctaggcaccctgaagaacaggtgagacagctggcctctggacagaggtaggcatagtacagtacgatatatcattcctctggtcctaaatatacaaacttattcatgtttttaggtgatgatggtcattgaaactcacttcttttcaggtgtagctacaattgtgtaatgtacaatattagagaaaggacaggctttttatgagtaacacacaccatatataaaacagcctttctggctgaccacatggttaaatgcataccttcccagtactggggggaaaaaatgacccttcttagaatgtgcaagttccatgagagtaatatattgatatgattttgaaaagaattgttgatagttacatcttcaaacttatcattccagtatgcatctttaagataatgtgattctaagtagatgactttatattcttgattaaagagtgctatacatgttaagaaatgcattaaggaatacaataaatattctaaagtgatgtaaaaaaaaaaaaaaaa

SEQ ID NO: 220559 - DNA, 1000 bp, Homo Sapiens
tgcatttaccaaaatttgtgcacactcaagtcctgcagtcacccctgcctaaagatagaatggcttctctgtttttcttctgaaatacaaccagaaacaatgtgtctatttctgaaagaataggattaatgatcatacaaatgggttaatcctgaattctggttgtaaatctggttacagcataactaggattataatgctgcctcattttcacagcactacttgcttatattgacaacaaatcatctcgctaaagagtgaatgtaggccaggcgcggtggctcatgcctgtaatcccagcactttgggaggccgaggcgggtggatcacgaggtcaggagatcgagaccatcctggctaacatggtaaaaccccgtctctactaaaaatagaaaaaaagaaattagcctagcgtggtggctggcgggcgcctgtagtcccagctatttgggaggctaaggcaggagaatggcgtgaacccgggaggcggagcttgcagtgagccgaggtcgtgccactgcactccagcctgggcgacagagcaagactccgtctcaaaaaaaaaaaaaaaaaaaaaaaaagagtgaatgtaatagtcttgcagaaaatgaatgaatacctttgttcaataaaggaaatatgcactgctcacttttttgaaggaaatgccaaagttacgttttacaacaaggctagagtttgtaaattctgggttcatttgtgatgacataagtcagcaaactgcgggaatactgtctcttctatgtattttgtgaatagtaagcataattttagttttgtattatcaatgaaaatttcacttgaaattaaagctgccttttgttatatttttaacctataggataagattccagtattgtatatgagttttaacaaattaaaaaatcaaatcatgtacatttgaaaatatttgcacacatttaaaaataaatgtaaagttgtcttttaaactactcggatgtgtcctttctgaacaaaa

SEQ ID NO: 220560 - DNA, 1000 bp, Homo Sapiens
aatggacatatgcgcttcagagatgttattctggtgttttctgcaattgtatttggtgcagtggctctaggacatgccagttcatttgctccagactatgctaaagctaagctgtctgcagcccacttattcatgctgtttgaaagacaacctctgattgacagctacagtgaagaggggctgaagcctgataaatttgaaggaaatataacatttaatgaagtcgtgttcaactatcccacccgagcaaacgtgccagtgcttcaggggctgagcctggaggtgaagaaaggccagacactagccctggtgggcagcagtggctgtgggaagagcacggtggtccagctcctggagcggttctacgaccccttggcggggacagtgcttctcgatggtcaagaagcaaagaaactcaatgtccagtggctcagagctcaactcggaatcgtgtctcaggagcctatcctatttgactgcagcattgccgagaatattgcctatggagacaacagccgggttgtatcacaggatgaaattgtgagtgcagccaaagctgccaacatacatcctttcatcgagacgttaccccacaaatatgaaacaagagtgggagataaggggactcagctctcaggaggtcaaaaacagaggattgctattgcccgagccctcatcagacaacctcaaatcctcctgttggatgaagctacatcagctctggatactgaaagtgaaaaggttgtccaagaagccctggacaaagccagagaaggccgcacctgcattgtgattgctcaccgcctgtccaccatccagaatgcagacttaatagtggtgtttcagaatgggagagtcaaggagcatggcacgcatcagcagctgctggcacagaaaggcatctatttttcaatggtcagtgtccaggctgggacacagaacttatgaacttttgctacagtatattttaaaaataaattcaaattattctacccatttt

SEQ ID NO: 220561 - DNA, 1000 bp, Homo Sapiens; identical to SEQ ID NO: 115144

SEQ ID NO: 220562 - DNA, 1000 bp, Homo Sapiens
tgctatgccaaagtgttcgatgaatttaaacctcttgtggaagagcctcagaatttaatcaaacaaaattgtgagctttttgagcagcttggagagtacaaattccagaatgcgctattagttcgttacaccaagaaagtaccccaagtgtcaactccaactcttgtagaggtctcaagaaacctaggaaaagtgggcagcaaatgttgtaaacatcctgaagcaaaaagaatgccctgtgcagaagactatctatccgtggtcctgaaccagttatgtgtgttgcatgagaaaacgccagtaagtgacagagtcaccaaatgctgcacagaatccttggtgaacaggcgaccatgcttttcagctctggaagtcgatgaaacatacgttcccaaagagtttaatgctgaaacattcaccttccatgcagatatatgcacactttctgagaaggagagacaaatcaagaaacaaactgcacttgttgagctcgtgaaacacaagcccaaggcaacaaaagagcaactgaaagctgttatggatgatttcgcagcttttgtagagaagtgctgcaaggctgacgataaggagacctgctttgccgaggagggtaaaaaacttgttgctgcaagtcaagctgccttaggcttataacatctacatttaaaagcatctcagcctaccatgagaataagagaaagaaaatgaagatcaaaagcttattcatctgttttctttttcgttggtgtaaagccaacaccctgtctaaaaaacataaatttctttaatcattttgcctcttttctctgtgcttcaattaataaaaaatggaaagaatctaatagagtggtacagcactgttatttttcaaagatgtgttgctatcctgaaaattctgtaggttctgtggaagttccagtgttctctcttattccacttcggtagaggatttctagtttctgtgggctaattaaataaatcactaatactcttctaagtt

SEQ ID NO: 220563 - DNA, 1000 bp, Homo Sapiens
gacaccgtgcccttcccgccgcccaggccatccgcggaactcgaggagtcgccacccagcgcagaccccttcctggagacgctcacgcgcctggtgcgggcgctgcgggtccccccggcccgggcctccgcgccgcgcctggccctggatccggacgcgctggccggcttcccgcagggcctagtcaacctgtcggaccccgcggcgctggagcgcctactcgacggcgaggagccgctgctgctgctgctgaggcccactgcggccaccaccggggatcctgcgcccctgcacgaccccacgtcggcgccgtgggccacggccctggcgcgccgcgtggctgctgaactgcaagcggcggctgccgagctgcgaagcctcccgggtctgcctccggccacagccccgctgctggcgcgcctgctcgcgctctgcccaggaggccccggcggcctcggcgatcccctgcgagcgctgctgctcctgaaggcgctgcagggcctgcgcgtggagtggcgcgggcgggatccgcgcgggccgggtcgggcacagcgcagcgcgggggccaccgccgccgacgggccgtgcgcgctgcgcgagctcagcgtagacctccgcgccgagcgctccgtactcatccccgagacctaccaggccaacaattgccagggcgtgtgcggctggcctcagtccgaccgcaacccgcgctacggcaaccacgtggtgctgctgctgaagatgcaggcccgtggggccgccctggcgcgcccaccctgctgcgtgcccaccgcctacgcgggcaagctgctcatcagcctgtcggaggaacgcatcagcgcgcaccacgtgcccaacatggtggccaccgagtgtggctgccggtgacccctgcgccgcgcggactcctgccccgagggtccggacgcgccccagctcgcgccccttcccatatttattcggaccccaagcatcgccccaataaagaccagcaagcaaccgg

SEQ ID NO: 220564 - DNA, 1000 bp, Homo Sapiens
gggagggaagggagtgagtgatgctcaggggctgtcaaagtgactgcgttcatcagttttacactggggctgctacataatattttcatttgaacgaagaacttcaaaaagcacaggactagatgatctctgttccttttggctctaatatgctacaactgtaggccaattatcactttaccaattaagagttaggccagataagtgaaatttaacttaagggcacacagctaataagtaataggcctaaactggatttccttattccaaatcctgtcttttccccactattccattagaccccacaaatgttagttgtgtgtgtgtgtgtgtgtgtttttaatcactgtaaccggatgcatttttttaaggcaaaatttctcccttatctactatgatgacttcagaagatacaatggtcccaggggccaagtagaaagcatttttaaagattaatctgaattaagctttatcagtgtactctttatctgtgttactagtgcctggtatgtagtaggtgctcaataaatgcatattgaataactaagtgaatttcttttggcaactttttaaggacatgtgctcttagtacttaagaggctgctcaaggaccttcctatctatttctgtggtcaaattcagactacaggaggtctttttgaatcattatagttagaagaagaatccagtttctgcctgtgaacttatttgactttagattgtctcatcttgtgactttataatgcctgtcccctccactggtcaattcagcatatggaagtataaatgcagtctttttactaggcagatatatatgctatcttacagctaattatgaaattgaatgaaaatccattgttatcttagggattagttttgaaaagcccccgtttatatacatttgccctaacataggaagtattgtgtagtttctcattgtcattttatctgtatcaagtatctttttttaaattgttaaataaagtcagctaggactgtg

SEQ ID NO: 220565 - DNA, 1000 bp, Homo Sapiens
tgcgggcacacagtcccatcctgaacatggagggtaccaagattggtactgtgactagtggctgcccctccccctctctgaagaagaatgtggcgatgggttatgtgccctgcgagtacagtcgtccagggacaatgctgctggtagaggtgcggcggaagcagcagatggctgtagtcagcaagatgccctttgtgcccacaaactactataccctcaagtgaagctggctcagggtggggctgtcccttccaggagttttgcccctacaaggggttagtcaagaagctgaggcagaactcactgggggtgggcagttaaggtggaggctgattctaattgtctggttgaggggccacaccacctattccccccacctaactcatgccattccagcttccttcaggaccctgcttctgagtgacggaccagctcacacaatgtcttgtttcagtccatgatcccactgacctactcttgcctgctggagggtaatgagaagctttggttctgccatctctcccactctgccaggtgctggctgtggagcaaaggctcacctttgtggagaggataaaacctgcccaacctacctcaccatggtttttcacattgcaaagggtaataacatgggcagtgcggacttaggctaccccctccagtttgctttccgtaaatgcaaattgtccttactgcaagtcaggaatgattgctgactcacagtagggctgctatgcctgtgtgtaaacttggggatggctgagggaacatagactcactcttccacattcccaagttggtctagtgtgctgcccagtagcaaaccatggcagactcaccacctattctgagttccagggctgctgtagggcagggtgggcttcctcccagacttgccttaccctgggctgatctttgcccctggtatgcattaatggactccactgaatcctgaaaaaaaaattaaacttccttcttacttgccaaaaaaaaaaaaaaa

SEQ ID NO: 220566 - DNA, 1000 bp, Homo Sapiens
atgggctaaccatgaagcatgcctgctgtgagcacttccaaatgcagctgcgctcttaggtgcttgagagccctgaggcctagactctgtctacctggtctggttgggcagccagaccagcaggctggcctatgtggtctaagattcagcctgaaactcatagacactgatctggctgcagttttgctatctgggctgtgggcaagcctaagggatcctgcctgcccctaccctggacttgcctctgcacaccctccagagacaacaggtaaaacagggccacatagatgctgatggagccttcccaagttgtgcttgagccaggaggcctgctagggttaggaggtccttaggcctctgagaagctctgaagaactctctggaagcccctgggcccagtacctagctggctctgtgagggtgctgactggcttcagcaagttagaactagccaaaccaggaccctgtccaatctttgacaattgggagctgccaagagtgaagggaagagacagcccaggatactggcacagaggtagtctcactgcttgaactaggctgagcaatctgaccctatgggtctaggacacagttcctgggaacatcacattcctctgcccttcctgcaggcaggaacaaacagggctgccttctggccttgtaagacccttattgctgtcctggaggggctggggacttgtgtctgcggggatccagagcgcacagggagtgcacatatccaggcaccaggactagggctggagtgaggggggggtatttcaattaccttctattggtctcccttctctacactcttgtaataaaatgtctatttttaatgtttgtacacaacaatccttctattctagcctgcattgagcttgcatgcttgcataagagcttaagaaccattgatttaatgtaatagggaaaattctaacccaggtatccaaaaatgtgtaagaacaactacctgagctaaataaagatattgttcaga

SEQ ID NO: 220567 - DNA, 1000 bp, Homo Sapiens
tcccgggtcccctacaaggaccgtgcacggctgcccttgctcaatgccaccatcgccgaggtgctgcgcctgcggcccgttgtgcccttagccttgccccaccgcaccacacggcccagcagcatctccggctacgacatccctgagggcacagtcatcattccgaacctccaaggcgcccacctggatgagacggtctgggagaggccacatgagttctggcctgatcgcttcctggagccaggcaagaactccagagctctggccttcggctgcggtgcccgcgtgtgcctgggcgagccgctggcgcgcctggagctcttcgtggtgctgacccgactgctgcaggccttcacgctgctgccctccggggacgccctgccctccctgcagcccctgccccactgcagtgtcatcctcaagatgcagcctttccaagtgcggctgcagccccgggggatgggggcccacagcccgggccagagccagtgatggggcaggaccgatgccagccgggtacctcagtttctcctttattgctcccgtacgaacccctcccctcccccctgtaaacacagtgctgcgagatcgctggcagagaaggcttcctccagcggctgggtggtgaaggaccctggctcttctctcggggcgacccctcagtgctcggcagtcatactggggtgcgagagaggtgggcagcagctcagcctccccccgctggggagcgaaagtttcttggtctcagcttcatttccgtgaagggcaccgagaactcgaagcccttccagtggtaccagctcactccctgggaaaggggttgtcaagagagagtcaaagccggatgtcccatctgctcttcccgttccccttaaggaggtagctcccagcactcaaccaacctccccgcagagctcccttcctgaccctccgctgcagaggattgaggcttaattctgagctggccctttccagccaataaatcaactccagctccctc

SEQ ID NO: 220568 - DNA, 1000 bp, Homo Sapiens; identical to SEQ ID NO: 115148

SEQ ID NO: 220569 - DNA, 1000 bp, Homo Sapiens
tgttgtcaagaccaaaagcatggatgtcaagtgtcagtaaggattttgttttctaaaattttttcctgcatcagttcttctgagggccttgatgaaataacacagcagtttcttaaacaatttgaaacaaaatgagctctcctaccacctcactttttcatttccacactaatgtattatatgtaactacttggaaaaaataattattcaaatgcttcttcccacaaagaatatagatgatagtagatatattttattaataaaatggttcatgaatcggagactaacaaagttttcatgtgctcagaattattaattatcgtgtctgcattttctttcgataaaggaagacacacgatgctaatccggaaatcagcaaactttgcattactccctatgtgcgtattttctctttcttcctgtcaccctgaggaaggttcattgccattgtcatcaccatggaaacaacgttcctctccacctgcattatgtactacatgacaggcatcaatctggggaaataataaaattatcacctttgtcagaccataagagtttctccaaaagtggtcagtttggctgggcaatattttctctcatctaacaaacacaatccattgtcatgaaattacccttaggatgagtcttctttaatcaatcatatattgggcggaaaaaacaccagctttgacccgaagtagttgaagagctacttcattcttttctgaagttgtgtgttgctgctagaaatagtcatttgtgaattatccaaattgtttaaattcacaattgaattagttttttcttcctttttgcttgaagcaaacagttgacaatttttaaccttttcattttatgtttttgtactctgcagactgaaaagacaaagtttatcttggccttactgtataaaggtgtgctgtgtccaccgttgtgtacagaatttttcttcattaattttgtgtttaagttaataaaatttatttgtgatgtactgtaa

SEQ ID NO: 220570 - DNA, 1000 bp, Homo Sapiens
cagtcccagaccccgggagccttgccggcgaagcgggagcagccgccttccctgaccaggaacggcccactgagctgcgggcagcggctccgcaagagtctgtcttcgatgacccgcgtcgttggcgggctggtggcgctacgcggggcgcacccctacatcgccgcgctgtactggggccacagtttctgcgccggcagcctcatcgccccctgctgggtgctgacggccgctcactgcctgcaggaccggcccgcacccgaggatctgacggtggtgctcggccaggaacgccgtaaccacagctgtgagccgtgccagacgttggccgtgcgctcctaccgcttgcacgaggccttctcgcccgtcagctaccagcacgacctggctctgttgcgccttcaggaggatgcggacggcagctgcgcgctcctgtcgccttacgttcagccggtgtgcctgccaagcggcgccgcgcgaccctccgagaccacgctctgccaggtggccggctggggccaccagttcgagggggcggaggaatatgccagcttcctgcaggaggcgcaggtaccgttcctctccctggagcgctgctcagccccggacgtgcacggatcctccatcctccccggcatgctctgcgcagggttcctcgagggcggcaccgatgcgtgccagggtgattccggaggcccgctggtgtgtgaggaccaagctgcagagcgccggctcaccctgcaaggcatcatcagctggggatcgggctgtggtgaccgcaacaagccaggcgtctacaccgatgtggcctactacctggcctggatccgggagcacaccgtttcctgattgctcagggactcatctttccctccttggtgattccgcagtgagagagtggctggggcatggaaggcaagattgtgtcccattcccccagtgcggccagctccgcgccaggatggcgaggaactcaataaagtgctttgaaaatgctgag

SEQ ID NO: 220571 - DNA, 1000 bp, Homo Sapiens
ataggctgaagaagtgggaatgggagcactctgtcttctttgctagagaagtggagagaaaatacaaaaggtaaagcagttgagattctctacaacctaaaaaattcctaggtgctattttcttatcctttgtactgtagctaaatgtacctgagacatattagtctttgaaaaataaagttatgtaaggttttttttatctttaaatagctctgtgggttttaacatttttataaagatataccaagggccattcagtacatcaggaaagtggcagacagaagcttctctctgcaaccttgaagactattggtttgagaacttctcttcccataccacccaaaatcataatgccattggaaagcaaaaagttgttttatccatttgatttgaattgttttaagccaatattttaaggtaaaactcactgaatctaaccatagctgacctttgtagtagaatttacaacttataattacaatgcacaatttataattacaatatgtatttatgtcttttgctatggagcaaatccaggaaggcaagagaaacattctttcctaaatataaatgaaaatctatcctttaaactcttccactagacgttgtaatgcacacttatttttttcccaaggagtaaccaatttctttctaaaacacatttaaaattttaaaactatttatgaatattaaaaaaagacataattcacacattaataaacaatctcccaagtattgatttaacttcatttttctaataatcataaactatattctgtgacatgctaattattattaaatgtaagtcgttagttcgaaagcctctcactaagtatgatctatgctatattcaaaattcaacccatttactttggtcaatatttgatctaagttgcatctttaatcctggtggtcttgccttctgatttttaatttgtatccttttctattaagatatatttgtcattttctcttgaatatgtattaaaatatcccaagc

SEQ ID NO: 220572 - DNA, 1000 bp, Homo Sapiens; identical to SEQ ID NO: 115150

SEQ ID NO: 220573 - DNA, 1000 bp, Homo Sapiens
gtgatcgttacattttaggacactgcgttagatggtaataatctggaagttggttacaaacgcaagaggccattgtaaacatctgcttgtccttcttaggtcgccattccctttgcatgttaagcgtctgctcaggtaaatcttagtgaaattcctaccgttgttgtacgttctgcaaaacattttatgtatagatttagaggggaaacgagaaggtactgaaataatgatcttggaatatttgctgtgaagggagaaagggagagaaaactcttctgaggatcatttgtcttggtagtatagtaaaaccaaccagctgaacctttcaggctacaagagaacccgggtcggtaatgtctttttaagaataatttttaattgcttataacaagcatattttgtggcatttgaactatatttactgctccaatatccgttattttccaaaggattttgtatctttttgaaaatgtttacatcatcagatgatccacagaattcactttatgtgagatctcccgagagtttccatcccaacataatggactttggtttgaacacaattcgttttttcatttgaattggcatttcccaatatttgctaaacatttgctggagaaatcatttttcttttttcttttttagaaaactcagaatgaaaattcattcccctgaaatatttaggtgtctatattctatattttgatctattaagggattagtatttttccatgtttattgtgttatcagagtgcattagaaagattagtgattcatcttcacagcacatttttaatcaagcagttatttcaaccagcacattcgttttgttcatattcactatagaatgatatcttgtaaataaagacattcagcacactgtgaaaatgtatttgtgcacctgctttttaaatatttctactaaaaatgaaaaaaaaaaacccttagacctgtagatagtgatatcgtaatattaattgttaataaaatagtcactgcc

SEQ ID NO: 220574 - DNA, 1000 bp, Homo Sapiens
cttttgccacatcggcctcgtgcagtgagggctctgtgggctggggctgctgcccctgcctacctcctgcctgtccccagaggctgaggagagggggtactgtgcccaccacacatgattaggcctcagacccaactctggtcctggctccacaacagtggctgccactcactttgtccagaaggtggcttgggggtggatatctttgggttgctggaaaaggtgtgggaaggttcaggatggtgggagggactgaggtccctgaggtgaagaggcccttggtcctgacgggtttgacccgtgcctggacccttggagcagtgttgtgtgaacttgcctagaactctgccttctccgttgtcaataaagcctccccctcatgacctaaactctgggcttttcttgctggggaggcagcaagcatgctggtgggaagggaggcagggactggcagctgccacccccttcaagaggcgccatagaccctagcggggagggcaggggagggacggaaggctggcacctcttccaccagttcagggggactttcccctctcctgtctcaggtggcccagccctgtcagcctgtctggccaactcagcctttgggcactcaccaggctttgcagccctgggctctgtctctactcccagggacctgctggaaggctggagtgcccagggagaggtatagaggtgtcataggcattagtgtagtaattggagcactaactctcgagccaactgcctgggttcgaatcctggctctagctgtatgacttttgtcaagtaacttagcctctctgtgtctcagttgcctcttctataacatggatgctaatagtacctacctcatagaattgttttggaagtaaatgaaaaatatgtaaaatgctgaagtgcctggtctacagtaagtgctcaataaatgttaactattgtgattgctgctgaatcagctacatgctgaggaaacggccaaacaagtgttaaaaaaaaa

SEQ ID NO: 220575 - DNA, 1000 bp, Homo Sapiens; identical to SEQ ID NO: 115152

SEQ ID NO: 220576 - DNA, 1000 bp, Homo Sapiens
tcaggtgtggcccacagagcttttgaaaatgatgttgatgccttgtgtaatctccgggatttcttcaactacctgcccctgagcagtcaggacccggcttccgtccgtgagtgccacgatcccagtgaccgtctggttcctgagcttgacacaattgtccctttggaatcaaccaaagcctacaacatggtggacatcatacactctgttgttgatgagcgtgaattttttgagatcatgcccaattatgccaagaacatcattgttggttttgcaagaatgaatgggaggactgttggaattgttggcaaccaacctaaggtggcctcaggatgcttggatattaattcatctgtgaaaggggctcgttttgtcagattctgtgatgcattcaatattccactcatcacttttgttgatgtccctggctttctacctggcacagcacaggaatacgggggcatcatccggcatggtgccaagcttctctacgcatttgctgaggcaactgtacccaaagtcacagtcatcaccaggaaggcctatggaggtgcctatgatgtcatgagctctaagcacctttgtggtgataccaactatgcctggcccaccgcagagattgcagtcatgggagcaaagggcgctgtggagatcatcttcaaagggcatgagaatgtggaagctgctcaggcagagtacatcgagaagtttgccaaccctttccctgcagcagtgcgagggtttgtggatgacatcatccaaccttcttccacacgtgcccgaatctgctgtgacctggatgtcttggccagcaagaaggtacaacgtccttggagaaaacatgcaaatattccattgtaaacaaatcaaaggaaaagaaaccaagaactgaattactgtctgcccattcacatcccattcctgccttttgcaatcatgatacctggcaatccaaataggttggataagcttataataactgagtttattaaattctaga

SEQ ID NO: 220577 - DNA, 1000 bp, Homo Sapiens
aaaattatttttcttatacttattttttattaaacaaaatgaaaaagatccttttcaaaaaggtgatcctgaaaataaaactaacactccagtattttgtcattgtttttcgcaattgagctatctgaaaactgttattcctaagtaatgttcaaaaatgataagtaatctggatacctttttcttatactttctcctaggaaaactttaaaactttaaaaaggcaaacctaccaataggaataacaaattaaatgtcaagagagtatatccaatattaggatataaatgtatgtgtctcaagtttaactctacaaaaatttgttacttgttttttaaactctatatataaagttcgacttaatcatggctgttctaagaagtacttatggagagcaagaacatttttgttcatttcttaatgtgtgtgtttttacttgcatatctgttcaaaacacttttaacaaaattaattcattaaagtccagttgttgacctttgagttagctgatttctttattctgttctttagtttattcttactagatgcagaggaattcatctactgtctgttattaactgttagtttattctcatacttacgatgttgagagtttttttgaagcttaagttaccctttatggtggaaaacattagcttatgcttctttagatggaataatgggaaaggagggaaatgggaaatggatggaaatgggaaaggagggaaaataatagcccagtgagagctgaatgaaaagggactgaatttaaatatttgtaagaactttgtgatgatgagtaattgtcagacgtgggatagataactgagaggctcagaatctttaccaaggatattttttaggataaggtagctgcctgttcatgaatttggataagaatagtaggacaatattcaacacaatttaatttttgtctgccacattagacatttttttaccttataaaatgatcaataaagcaataaggtttattttgggt

SEQ ID NO: 220578 - DNA, 1000 bp, Homo Sapiens; identical to SEQ ID NO: 115158

SEQ ID NO: 220579 - DNA, 1000 bp, Homo Sapiens
taatgagattaaggcccgctctggccaggacgataagaccgtgtatgagtacctgttcagccagcggcgaaaacggcgggccccactggccactcgccagggcaagcgacccagcaagaaccttaaggctcgctgcagtcggaaggcactgcatgtcaacttcaaggacatgggctgggacgactggatcatcgcaccccttgagtacgaggctttccactgcgaggggctgtgcgagttcccattgcgctcccacctggagcccacgaatcatgcagtcatccagaccctgatgaactccatggaccccgagtccacaccacccacctgctgtgtgcccacgcggctgagtcccatcagcatcctcttcattgactctgccaacaacgtggtgtataagcagtatgaggacatggtcgtggagtcgtgtggctgcaggtagcagcactggccctctgtcttcctgggtggcacatcccaagagccccttcctgcactcctggaatcacagaggggtcaggaagctgtggcaggagcatctacacagcttgggtgaaaggggattccaataagcttgctcgctctctgagtgtgacttgggctaaaggcccccttttatccacaagttcccctggctgaggattgctgcccgtctgctgatgtgaccagtggcaggcacaggtccagggagacagactctgaatgggactgagtcccaggaaacagtgctttccgatgagactcagcccaccatttctcctcacctgggccttctcagcctctggactctcctaagcacctctcaggagagccacaggtgccactgcctcctcaaatcacatttgtgcctggtgacttcctgtccctgggacagttgagaagctgactgggcaagagtgggagagaagaggagagggcttggatagagttgaggagtgtgaggctgttagactgttagatttaaatgtatattgatgagataaaaagcaaaactgtgcct

SEQ ID NO: 220580 - DNA, 1000 bp, Homo Sapiens
tctcgggtgcgaggtggcagttctggctggagcggtggcttggcacagaacaggagcaccattacataccgttcctgggggaggtcattaaagtataatcctgttgttatcgattttgagatgcagcctatccacgaggtgctgcggcacacaagcctggggcctctggaggccaagcgccagaacctgcgccgcgccttggaccagtatctgatggaattcaatgcctgccgatgtgggccttgcttcaacaatggggtgcccatcctcgagggcaccagctgcaggtgccagtgccgcctgggtagcttgggtgctgcctgtgagcaaacacagacagaaggagccaaagcagatgggagctggagttgctggagctcctggtctgtatgcagagcaggcatccaggaaaggagaagagagtgtgacaatccagcacctcagaatggaggggcctcgtgtccagggcggaaagtacagacgcaggcttgctgagggcctctggacacaggctggaccagatgctgtggatgtcgacccctgcactgactattggataaagacttctttcaactaagagaagatgcaaatcagcacacttttttctttgttctgccagcttccaggcctaagactaggttttgctgtctacagccaactattctattagttacaaaactcaatcattttattcagcaactggatgttgactgttaactagaagctctgtcctacttacagcactttggatcatcaaaaaaataaagtaaaatagaaaactgagaaaactcaatccatgaccagggagaacttacaggatgttagagacaaaacaagcagacacctgaaacaatcaacgcccaataaaacaaagtaggatgaaaattctcttagttctttgataacaatttgttcactcatagaaacattattaattggtagggtaagcagacactctgaaacaatgagaaaaatactaaaaattgacttgagttatttc

SEQ ID NO: 220581 - DNA, 1000 bp, Homo Sapiens; identical to SEQ ID NO: 115161

SEQ ID NO: 220582 - DNA, 1000 bp, Homo Sapiens
caacctcctctctgccatcaagagcccctgccagagggagaccccagagggggctgaggccaagccctggtatgagcccatctatctgggaggggtcttccagctggagaagggtgaccgactcagcgctgagatcaatcggcccgactatctcgactttgccgagtctgggcaggtctactttgggatcattgccctgtgaggaggacgaacatccaaccttcccaaacgcctcccctgccccaatccctttattaccccctccttcagacaccctcaacctcttctggctcaaaaagagaattgggggcttagggtcggaacccaagcttagaactttaagcaacaagaccaccacttcgaaacctgggattcaggaatgtgtggcctgcacagtgaagtgctggcaaccactaagaattcaaactggggcctccagaactcactggggcctacagctttgatccctgacatctggaatctggagaccagggagcctttggttctggccagaatgctgcaggacttgagaagacctcacctagaaattgacacaagtggaccttaggccttcctctctccagatgtttccagacttccttgagacacggagcccagccctccccatggagccagctccctctatttatgtttgcacttgtgattatttattatttatttattatttatttatttacagatgaatgtatttatttgggagaccggggtatcctgggggacccaatgtaggagctgccttggctcagacatgttttccgtgaaaacggagctgaacaataggctgttcccatgtagccccctggcctctgtgccttcttttgattatgttttttaaaatatttatctgattaagttgtctaaacaatgctgatttggtgaccaactgtcactcattgctgagcctctgctccccaggggagttgtgtctgtaatcgccctactattcagtggcgagaaataaagtttgcttagaaaagaa

SEQ ID NO: 220583 - DNA, 1000 bp, Homo Sapiens
acggaccgtgccttcctccaggatggtttctccttgagcaacaattctctcctggtccccaccagtggcatctacttcgtctactcccaggtggtcttctctgggaaagcctactctcccaaggccacctcctccccactctacctggcccatgaggtccagctcttctcctcccagtaccccttccatgtgcctctcctcagctcccagaagatggtgtatccagggctgcaggaaccctggctgcactcgatgtaccacggggctgcgttccagctcacccagggagaccagctatccacccacacagatggcatcccccacctagtcctcagccctagtactgtcttctttggagccttcgctctgtagaacttggaaaaatccagaaagaaaaaataattgatttcaagaccttctccccattctgcctccattctgaccatttcaggggtcgtcaccacctctcctttggccattccaacagctcaagtcttccctgatcaagtcaccggagctttcaaagaaggaattctaggcatcccaggggaccacacctccctgaaccatccctgatgtctgtctggctgaggatttcaagcctgcctaggaattcccagcccaaagctgttggtctgtcccaccagctaggtggggcctagatccacacacagaggaagagcaggcacatggaggagcttgggggatgactagaggcagggaggggactatttatgaaggcaaaaaaattaaattatttatttatggaggatggagagaggggaataatagaagaacatccaaggagaaacagagacaggcccaagagatgaagagtgagagggcatgcgcacaaggctgaccaagagagaaagaagtaggcatgagggatcacagggccccagaaggcagggaaaggctctgaaagccagctgccgaccagagccccacacggaggcatctgcaccctcgatgaagcccaataaacctcttttctctg

SEQ ID NO: 220584 - DNA, 1000 bp, Homo Sapiens
actctcctggcctggccatctccctccccagaaacagtgtgcatgggttattttggagtgtaggtgacttgtttactcattgaagcagatttctgcttccttttatttttataggaatagaggaagaaatgtcagatgcgtgcccagctcttcaccccccaatctcttggtggggaggggtgtacctaaatatttatcatatccttgcccttgagtgcttgttagagagaaagagaactactaaggaaaataatattatttaaactcgctcctagtgtttctttgtggtctgtgtcaccgtatctcaggaagtccagccacttgactggcacacacccctccggacatccagcgtgacggagcccacactgccaccttgtggccgcctgagaccctcgcgccccccgcgccccccgcgcccctctttttccccttgatggaaattgaccatacaatttcatcctccttcaggggatcaaaaggacggagtggggggacagagactcagatgaggacagagtggtttccaatgtgttcaatagatttaggagcagaaatgcaaggggctgcatgacctaccaggacagaactttccccaattacagggtgactcacagccgcattggtgactcacttcaatgtgtcatttccggctgctgtgtgtgagcagtggacacgtgaggggggggtgggtgagagagacaggcagctcggattcaactaccttagataatatttctgaaaacctaccagccagagggtagggcacaaagatggatgtaatgcactttgggaggccaaggcgggaggattgcttgagcccaggagttcaagaccagcctgggcaacataccaagacccccgtctctttaaaaatatatatattttaaatatacttaaatatatatttctaatatctttaaatatatatatatattttaaagaccaatttatgggagaattgcacacagatgtgaaatgaatgtaatctaatagaagc

SEQ ID NO: 220585 - DNA, 1000 bp, Homo Sapiens
tcagcgcggcctccgagttcaagacgcagccagtccaaggggaacccagtgcacctaagctcgaagggcagatgggagaggatggaaactctattaaagtgaacctgatcaagcaggatgacggcggctcccccatcagacactatctggtcaggtaccgagcgctctcctccgagtggaaaccagagatcaggctcccgtctggcagtgaccacgtcatgctgaagtccctggactggaatgctgagtatgaggtctacgtggtggctgagaaccagcaaggaaaatccaaggcggctcattttgtgttcaggacctcggcccagcccacagccatcccagccaacggcagccccacctcaggcctgagcaccggggccatcgtgggcatcctcatcgtcatcttcgtcctgctcctggtggttgtggacatcacctgctacttcctgaacaagtgtggcctgttcatgtgcattgcggtcaacctgtgtggaaaagccgggcccggggccaagggcaaggacatggaggagggcaaggccgccttctcgaaagatgagtccaaggagcccatcgtggaggttcgaacggaggaggagaggaccccaaaccatgatggagggaaacacacagagcccaacgagaccacgccactgacggagcccgagaagggccccgtagaagcaaagccagagtgccaggagacagaaacgaagccagcgccagccgaagtcaagacggtccccaatgacgccacacagacaaaggagaacgagagcaaagcatgatgggtgaagagaaccgagcaaagatcaaaataaaaagtgacacagcagcttcaccagagcatttccaacaccacagacacacacacgcacacacacacacaattctaggctagtttctggtcttatcattgagttacagcttagtgatgattttaagacaaaacaaacaaacaaaaaaaaaaaaaaaccatggtacccggatcctcgaattc

SEQ ID NO: 220586 - DNA, 1000 bp, Homo Sapiens
ccttctctcctcattcttcaactatctttgatggggtctttcaaggggaaaaaaatccaagcttttttaaagtaaaaaaaaaaaaagagaggacacaaaaccaaatgttactgctcaactgaaatatgagttaagatggagacagagtttctcctaataaccggagctgaattacctttcactttcaaaaacatgaccttccacaatccttagaatctgcctttttttatattactgaggcctaaaagtaaacattactcattttattttgcccaaaatgcactgatgtaaagtaggaaaaataaaaacagagctctaaaatccctttcaagccacccattgaccccactcaccaactcatagcaaagtcacttctgttaatcccttaatctgattttgtttggatatttatcttgtacccgctgctaaacacactgcaggagggactctgaaacctcaagctgtctacttacatcttttatctgtgtctgtgtatcatgaaaatgtctattcaaaatatcaaaacctttcaaatatcacgcagcttatattcagtttacataaaggccccaaataccatgtcagatctttttggtaaaagagttaatgaactatgagaattgggattacatcatgtattttgcctcatgtatttttatcacacttataggccaagtgtgataaataaacttacagacactgaattaatttcccctgctactttgaaaccagaaaataatgactggccattcgttacatctgtcttagttgaaaagcatattttttattaaattaattctgattgtatttgaaattattattcaattcacttatggcagaggaatatcaatcctaatgacttctaaaaatgtaactaattgaatcattatcttacatttactgtttaataagcatattttgaaaatgtatggctagagtgtcataataaaatggtatatctttctttagtaattacaaaaaaaaaaaaaaaaaaaaaaaa

SEQ ID NO: 220587 - DNA, 1000 bp, Homo Sapiens
gggctagaacctggagagccagaacctggagggctagaacctggaagggctagaacctgtagagctagaacatggagagctagaacccggcaggctagaacctggcaagctagaacctggagggaatgaacctggagggctagaacctggagaatgagaaaaatttacatggcaaagagcccataaatcctgaccaatccaactctgaattttaaagcaaaagcgtcaaaaaaaagattccctccttacccccaacccactcttttttcccaccacccactctcctctgcctcagtaagtatctggaggaagaaaacaggtgaaagaagaagtaaaaaccatttagtattagtattagaatgaagtcaaactgtgccacacatggtgaatgaaaaaaaaaaaaagaggctgtgttttgtcacacagggcagtcattcagcaccagagcacgtgatggtctgagactctcttaggagcagagctctgccgcaatggccatgtggggatccacacctggtctgaggggcaactgagtctgcgggagaagagcggccctatgcatggtgtagatgccctgataaagaacatctgtcctgtgaaagactcaatgagctgttatgttgtaaacaggaagcatttcacatccaaacgagaaaatcatgtaaacatgtgtcttttctgtagagcataataaatggatgaggtttttgcatagctctagcatttgttacaactcccgaaacccccgagtttggtccctggggtaccgccttgcacactcagaagcctttgggaaggggtgctattcatttctgctcaatctgttaacaggcttctggcatgtagatcagtggtctccaagcttttgtgattgtatattcctataggaaaaaaagaattgattatgcatacccagtatgtatacttattaatctgtatgaagatgtacattctaaaatataatcaaccagtagaaatttaagaaagaagatgtaaaaaa

SEQ ID NO: 220588 - DNA, 1000 bp, Homo Sapiens
gcgtgcatgtgcactcgcacgcccatgtgtgagtgtgtgcaagtatgtgagtgtgtccagtgtgtgtgcgtgtgtccatgtgtgtgcagtgtgtgcatgtgtgcgagtgtgtgcatgtgtgtgctcaggggctgtggctcacgtgtgtgactcagagtgtctctggcgtgtgggtaggtgacggcagcgtagcctctccggcagaagggaactgcctgggctcccttgtgcgtgggtaagccgctgctgggttttcctccgggagaggggacggtcaatcctgtgggtgaagagagagggaaacacagcagcatctctccactgaaagaagtgggacttcccgtcgcctgcgagcctgcggcctgctggagcctgcgcagcttggatggatactccatgagaaaagccgtgggtggaaccaggagcctcctccacaccagcgctgatgcccaataaagatgcccactgaggaatcatgaagcttcctttctggattcatttattatttcaatgtgactttaattttttggatggataagcctgtctatggtacaaaaatcacaaggcattcaagtgtacagtgaaaagtctccctttccagatattcaagtcacctccttaaaggtagtcaagattgtgttttgaggtttccttcagacagattccaggcgatgtgcaagtgtatgcacgtgtgcacacaccacacacatacacacacacaagcttttttacacaaatggtagcatactttatattggtctgtatcttgctttttttcaccaatatttctcagacatcggttcatattaagacataaattactttttcattcttttataccgctgcatagtattccattgtgtgagtgtaccataatgtatttaaccagtcttcttttgatatactattttcatctcttgttattgcatctgctgagttaataaatcaaatatatgtcaaaaaaaaaaaaaaaaaaaaaaaaaaaaaaaaaaaaaaaaat

SEQ ID NO: 220589 - DNA, 1000 bp, Homo Sapiens
gaagctgtgtcctcatgagggctggatgctctcgttgaccctcacaggagcatctcctcaactctgagtgttaagcgttgagccaccaagctggtggctctgtgtgctctgatccgagctcaggggggtggttttcccatctcaggtgtgttgcagtgtctgctggagacattgaggcaggcactgccaaaacatcaacctgccagctggccttgtgaggagctggaaacacatgttccccttgggggtggtggatgaacaaagagaaagagggtttggaagccagatctatgccacaagaaccccctttacccccatgaccaacatcgcagacacatgtgctggccacctgctgagccccaagtggaacgagacaagcagcccttagcccttcccctctgcagcttccaggctggcgtgcagcatcagcatccctagaaagccatgtgcagccaccagtccattgggcaggcagatgttcctaataaagcttctgttccgtgcttgtccctgtggaagtatcttggttgtgacagagtcaagggtgtgtgcagcattgttggctgttcctgcagtagaatgggggcagcacctcctaagaaggcacctctctgggttgaagggcagtgttccctggggctttaactcctgctagaacagtctcttgaggcacagaaactcctgttcatgcccatacccctggccaaggaagatccctttgtccacaagtaaaaggaaatgctcctccagggagtctcagcttcaccctgaggtgagcatcatcttctgggttaggccttgcctaggcatagccctgcctcaagctatgtgagctcaccagtccctccccaaatgctttccatgagttgcagttttttcctagtctgttttccctccttggagacagggccctgtcggtttattcactgtatgtccttggtgcctggagcctactaaatgctcaataaataatgatcacaggaaaaaaaaaaaaaaaaaa

SEQ ID NO: 220590 - DNA, 1000 bp, Homo Sapiens
taccagtgctgatcatttatatgtcaacgtatctgagctctctctggtcaattttgaggaatctcagacgtttttcggcttatataagctctaagagaagcactttgggattctttccattatgattctttgttacaggcaccgagaatgttgtattcagtgagggtcttcttacatgcatttgaggtcaagtaagaagacatgaaccaagtggaccttgagaccacagggttcaaaatgtctgtagctcctcaactcacctaatgtttatgagccagacaaatggaggaatatgacggaagaacatagaactctgggctgccatgtgaagagggagaagcatgaaaaagcagctaccaggtgttctacactcatcttagtgcctgagagtatttaggcagattgaaaaggacaccttttaactcacctctcaaggtgggccttgctacctcaagggggactgtctttcagatacatggttgtgacctgaggatttaagggatggaaaaggaagactagaggcttgcataataagctaaagaggctgaaagaggccaatgccccactggcagcatcttcacttctaaatgcatatcctgagccatcggtgaaactaacagataagcaagagagatgttttggggactcatttcattcctaacacagcatgtgtatttccagtgcaattgtaggggtgtgtgtgtgtgtgtgtgtgtgtgtgtgtgtatgactaaagagagaatgtagatattgtgaagtacatattaggaaaatatgggttgcatttggtcaagattttgaatgcttcctgacaatcaactctaatagtgcttaaaaatcattgattgtcagctactaatgatgttttcctataatataataaatatttatgtagatgtgcatttttgtgaaatgaaaacatgtaataaaaagtatatgttaggatacaaaaaaaaaaaaaaaaaaaaaaaaaaaaaaaaaaaaaaaaaaaaaaaaaaaa

SEQ ID NO: 220591 - DNA, 1000 bp, Homo Sapiens
cattactaagaatctacattacaaagatgggtttgatcttaacaagggcattgaagcgaagatacacacgcttttaccatggcaatgcacaaatggatcagaagttcaaagttcctgggcagaaactacttattggatatcaccacaaggaattccagaaactaaagttcaggatatggattgcgtatattacaattggcaatatttactctgttcttggaaacctggcataggtgtacttcttgataccaattacaacttgttttactggtatgagggcttggatcatgcattacagtgtgttgattacatcaaggctgatggacaaaatataggatgcagatttccctatttggaggcatcagactataaagatttctatatttgtgttaatggatcatcagagaacaagcctatcagatccagttatttcacttttcagcttcaaaatatagttaaacctttgccgccagtctatcttacttttactcgggagagttcatgtgaaattaagctgaaatggagcatacctttgggacctattccagcaaggtgttttgattatgaaattgagatcagagaagatgatactaccttggtgactgctacagttgaaaatgaaacatacaccttgaaaacaacaaatgaaacccgacaattatgctttgtagtaagaagcaaagtgaatatttattgctcagatgacggaatttggagtgagtggagtgataaacaatgctgggaaggtgaagacctatcgaagaaaactttgctacgtttctggctaccatttggtttcatcttaatattagttatatttgtaaccggtctgcttttgcgtaagccaaacacctacccaaaaatgattccagaatttttctgtgatacatgaagactttccatatcaagagacatggtattgactcaacagtttccagtcatggccaaatgttcaatatgagtctcaataaactgaatttttcttgcgaatgttgaaaaa

SEQ ID NO: 220592 - DNA, 1000 bp, Homo Sapiens
ccctggggtaaaagctagggtaaggtaaaggatagactcacatttacaagtagtgaaggtccaagagttctaaatacaggaaatttcttaggaactcaaataaaatgccccacattttactacagtaaatggcagtgtttttatgacttttatactatttctttatggtcgatatacaattgattttttaaaataatagcagatttcttgcttcatatgacaaagcctcaattactaattgtaaaaactgaactattcccagaatcatgttcaaaaaatctgtaatttttgctgatgaaagtgcttcattgactaaacagtattagtttgtggctataaatgattatttagatgatgactgaaaatgtgtataaagtaattaaaagtaatatggtggctttaagtgtagagatgggatggcaaatgctgtgaatgcagaatgtaaaattggtaactaagaaatggcacaaacaccttaagcaatatattttcctagtagatatatatatacacatacatatatacacatatacaaatgtatatttttgcaaaattgttttcaatctagaacttttctattaactaccatgtcttaaaatcaagtctataatcctagcattagtttaatattttgaatatgtaaagacctgtgttaatgctttgttaatgcttttcccactctcatttgttaatgctttcccactctcaggggaaggatttgcattttgagctttatctctaaatgtgacatgcaaagattattcctggtaaaggaggtagctgtctccaaaaatgctattgttgcaatatctacattctatttcatattatgaaagaccttagacataaagtaaaatagtttatcatttactgtgtgatcttcagtaagtctctcaggctctctgagcttgttcatcctttgttttgaaaaaattactcaaccaatccattacagcttaaccaagattaaatgggatgatgttaatgaaagagcttcgcc

SEQ ID NO: 220593 - DNA, 1000 bp, Homo Sapiens
ggagagactggccagaggcagctaaggggcaggaatcaaggagcctccgttcccacctctgaggactctggaccccaggccataccaggtgctagggtgcctgctctccttgccctgggccagcccaggattgtacgtgggagaggcagaaagggtaggttcagtaatcatttctgatgatttgctggagtgctggctccacgccctggggagtgagcttggtgcggtaggtgctggcctcaaacagccacgaggtggtagctctgagccctccttcttgccctgagctttccggggaggagcctggagtgtaattacctgtcatctgggccaccagctccactggcccccgttgccgggcctggactgtcctaggtgaccccatctctgctgcttctgggcctgatggagaggagaacactagacatgccaactcgggagcattctgcctgcctgggaacggggtggacgagggagtgtctgtaaggactcagtgttgactgtaggcgcccctggggtgggtttagcaggctgcagcaggcagaggaggagtacccccctgagagcatgtgggggaaggccttgctgtcatgtgaatccctcaatacccctagtatctggctgggttttcaggggctttggaagctctgttgcaggtgtccgggggtctaggactttagggatctgggatctggggaaggaccaacccatgccctgccaagcctggagcccctgtgttggggggcaaggtgggggagcctggagcccctgtgtgggagggcgaggcgggggagcctggagcccctgtgtgggagggcgaggcgggggatcctggagcccctgtgtcggggggcgagggaggggaggtggccgtcggttgaccttctgaacatgagtgtcaactccaggacttgcttccaagcccttccctctgttggaaattgggtgtgccctggctcccaagggaggcccatgtgactaataaaaaactgtgaaccct

SEQ ID NO: 220594 - DNA, 1000 bp, Homo Sapiens; identical to SEQ ID NO: 115171

SEQ ID NO: 220595 - DNA, 1000 bp, Homo Sapiens
tcaatttctttgggtgtgttctgcccccactgcttataatgctggtgatctacattaagatcttcctggtggcctgcaggcagcttcagcgcactgagctgatggaccactcgaggaccaccctccagcgggagatccatgcagccaagtcactggccatgattgtggggatttttgccctgtgctggttacctgtgcatgctgttaactgtgtcactcttttccagccagctcagggtaaaaataagcccaagtgggcaatgaatatggccattcttctgtcacatgccaattcagttgtcaatcccattgtctatgcttaccggaaccgagacttccgctacacttttcacaaaattatctccaggtatcttctctgccaagcagatgtcaagagtgggaatggtcaggctggggtacagcctgctctcggtgtgggcctatgatctaggctctcgcctcttccaggagaagatacaaatccacaagaaacaaagaggacacggctggttttcattgtgaaagatagctacacctcacaaggaaatggactgcctctcttgagcacttccctggagctaccacgtatctagctaatatgtatgtgtcagtagtaggctccaaggattgacaaatatatttatgatctattcagctgcttttactgtgtggattatgccaacagcttgaatggattctaacagactcttttgtttttaaaagtctgccttgtttatggtggaaaattactgaaactattttactgtgaaacagtgtgaactattataatgcaaatactttttaacttagaggcaatggaaaaataaaagttgactgtactaaaaatgtatacttgttgccaggaaggtgacctcaaaaattaaaagtataattattcggccgggcatggtggctcacacctgtaattccagcactttgggaggccaaggcaggcggatcacgaggtcaggagttcaaaaccagcctgtccaatatagtg

SEQ ID NO: 220596 - DNA, 1000 bp, Homo Sapiens
gctctgctggttccctttcttctttgtcctgccgctcggctccttgttcccgcagctgaagccatcggagggcgtcttcaaggtcatcttctggctcggctacttcaacagctgcgtgaacccgctcatctacccctgttccagccgcgagttcaagcgcgccttcctccgtctcctgcgctgccagtgccgtcgtcgccggcgccgccgccctctctggcgtgtctacggccaccactggcgggcctccaccagcggcctgcgccaggactgcgccccgagttcgggcgacgcgccccccggagcgccgctggccctcaccgcgctccccgaccccgaccccgaacccccaggcacgcccgagatgcaggctccggtcgccagccgtcgaaagccacccagcgccttccgcgagtggaggctgctggggccgttccggagacccacgacccagctgcgcgccaaagtctccagcctgtcgcacaagatccgcgccgggggcgcgcagcgcgcagaggcagcgtgcgcccagcgctcagaggtggaggctgtgtccctaggcgtcccacacgaggtggccgagggcgccacctgccaggcctacgaattggccgactacagcaacctacgggagaccgatatttaaggaccccagagctaggccgcggagtgtgctgggcttgggggtaagggggaccagagaggcgggctggtgttctaagagcccccgtgcaaatcggagacccggaaactgatcagggcagctgctctgtgacatccctgaggaactgggcagagcttgaggctggagcccttgaaaggtgaaaagtagtggggccccctgctggactcaggtgcccagaactcttttcttagaagggagaggctgcgggctccgtggggccttttgctcccaatccctatttgagaaacactgccccatcctccatgccctgaaccctgagtagacagccccaagcatggccaggaaggcctgccc

SEQ ID NO: 220597 - DNA, 1000 bp, Homo Sapiens
tttttgaagaaaaatgctaagggcagccctgcctgccctccccatcccccgctgtaaatatacactatttttgatagcacacatggggcccccatatctcttggccttggttttgatgttgaaatcctggccttgggagagatgccttccaggcagacacagctgtctggttcaggccaagcccctttgcaatgcaagccctttctggtgttatgaagtccctctatgtcgtcgttttcaccagcaactggtgactgtcccttcgacacggacctgctttgagatttcctgacagggaaaagatttctgtccatttttttcctgtgcctaacagcataattgccttttcctatgtaaatattatgatggtggatcaagacataagtaaatgagcctttctgcctcacatcagccctgtgtataaagccattattctctgatgcactgtttgccccagtaactcactttaaaacctctctttccagtgttccctctctccctccagggccactgcttgaagaagaatatgtatgtttctatcttgtatgtctgtgtgcccctcctgccccgaaagtgctgactatggggaaatcttttagctgctgtttttagactccaaggagtggaaattatgtggaagaagcaaacctgatacaatttgcccaaggtaaacagtttgaaaagacaaatgggcctgccaaactgtacagtttcttccccaagagctgttaggtatcaaaatgttgtcctttcccccctccgtgcttttctggttgagatcatgtcattgatgaactgccaaagtcaggggaggagggcagagactttgtgtttacatctgcatttctacatgttttagacagagacaatttaaggcctgcactcttatttcactaaagaaaaactaatgtcagcacatgttgctaatgacagtggatttttttttaaataaaaaagtttacagatcaaatgtgaaataaatatgaatggagtggtcaaa

SEQ ID NO: 220598 - DNA, 1000 bp, Homo Sapiens
ttgacctcattgagagtgggaagaaagaaggggccaaactggaatgtggaggaggcccgtgggggaataaaggctactttgtccagcccacagtgttctctaatgttacagatgagatgcgcattgccaaagaggagatttttggaccagtgcagcaaatcatgaagtttaaatctttagatgacgtgatcaaaagagcaaacaatactttctatggcttatcagcaggagtgtttaccaaagacattgataaagccataacaatctcctctgctctgcaggcaggaacagtgtgggtgaattgctatggcgtggtaagtgcccagtgcccctttggtggattcaagatgtctggaaatggaagagaactgggagagtacggtttccatgaatatacagaggtcaaaacagtcacagtgaaaatctctcagaagaactcataaagaaaatacaagagtggagagaagctcttcaatagctaagcatctccttacagtcactaatatagtagattttaaagacaaaatttttcttttcttgatttttttaaacataagctaaatcatattagtattaatactacccatagaaaacttgacatgtagcttcttctgaaagaattatttgccttctgaaatgtgacccccaagtcctatcctaaataaaaaaagacaaattcggatgtatgatctctctagctttgtcatagttatgtgattttcctttgtagctacttttgcaggataataattttatagaaaaggaacagttgcatttagcttctttcccttagtgactcttgaagtacttaacatacacgttaactgcagagtaaattgctctgttcccagtagttataaagtccttggactgttttgaaaagtttcctaggatgtcatgtctgcttgtcaaaagaaataatccctgtaatatttagctgtaaactgaatataaagcttaataaaaacaaccttgcatgaaaaaaaaaaaaaaaaaaaaa

SEQ ID NO: 220599 - DNA, 1000 bp, Homo Sapiens
agcttggaaagtgttaggggttttgaactaggtggatactaaatctcggccccactcttcattggcttaacctaaaaaccagaggtgcttttccttgtctgtgtgccagttgctggctgttttagttgcttgcccttcattttgctactgattttccttaatttgtgggaaggagtaggcaaagaatatgcttacatgattacacctgtaaagtaagcccaaacatcccaaatgtccgtcaactgatgagtggattaataaaatgtttccatggaatattccttggattactcagccataaaaaggaatgaagtactgacacatgctgtgacatcagtgaaccctgaaaacatccttctcagtgaaacaagccagagagatgtacaaggctacagactgtatgattccatttatatgaaatatacatactaggcaaatccatggagatggaacatagattagtggttgccaggggatagaggagtaattgttagtgggcatgggatttgtttttgggaggttttgaaaatgttctggagttgaacaatagtaatggttgcatgatttggtaaaaatactaaaaactatggaattgtttaattatggtatatgaattaatttctttctttttttcttttttttttttttttttgacacggagtctcactctgtcgcccaggctggagtgcagtggtgtgatctcgtctcactgcaacctccgcctcccagattcaagcgattctcctgtctcagcctcctgagtagctgggattataggtacatgccatcacacctggctaatttttgtatttttagtagagatgaggtttcaccattttggccaggctgatcttgaactcctgacctcaggtgatccacccgcctcagcctcccaaagtgctgggattacaggtgggagccacaacacccggccatgaattaactccgttaaaaaataaacgtatacattctgtgagcaaaaaaaaaaaaaaaaaaaaaa

SEQ ID NO: 220600 - DNA, 1000 bp, Homo Sapiens
agacatctactacgagggcgaccaggtggtggaggaggacccggagctgcaggacttcgtgaacgatgtctacgtgtacggcatgcggggccgcaagtcctcaggcttccccaagtcggtcaagagccgggagcagctgtcggagtacctgaccgtggtgatcttcaccgcctccgcccagcacgccgcggtcaacttcggccagtacgactggtgctcctggatccccaatgcgcccccaaccatgcgagccccgccaccgactgccaagggcgtggtgaccattgagcagatcgtggacacgctgcccgaccgcggccgctcctgctggcatctgggtgcagtgtgggcgctgagccagttccaggaaaacgagctgttcctgggcatgtacccagaagagcattttatcgagaagcctgtgaaggaagccatggcccgattccgcaagaacctcgaggccattgtcagcgtgattgctgagcgcaacaagaagaagcagctgccatattactacttgtccccagaccggattccgaacagtgtggccatctgagcacactgccagtctcactgtgggaaggccagctgccccagccagatggactccagcctgcctggcaggctgtctggccaggcctcttggcagtcacatctcttcctccgaggccagtacctttccatttattctttgatcttcagggaactgcatagattgatcaaagtgtaaacaccatagggacccattctacacagagcaggactgcacagcgtcctgtccacacccagctcagcatttccacaccaagcagcaacagcaaatcacgaccactgatagatgtctattcttgttggagacatgggatgattattttctgttctatttgtgcttagtccaattccttgcacatagtaggtacccaattcaattactattgaatgaattaagaattggttgccataaaaataaatcagttcatttaaaaaaaaaaaaaaaaaa

SEQ ID NO: 220601 - DNA, 1000 bp, Homo Sapiens
accccataccaaggatgtgaggcgttatgttgccctgaaccaaagctaaataatggtgaaatcactcaacacaggaaaagtcgtcctgccaatcactgtgtttatttctatggagatgagatttcattttcatgtcatgagaccagtaggttttcagctatatgccaaggagatggcacgtggagtccccgaacaccatcatgtggagacatttgcaattttcctcctaaaattgcccatgggcattataaacaatctagttcatacagctttttcaaagaagagattatatatgaatgtgataaaggctacattctggtcggacaggcgaaactctcctgcagttattcacactggtcagctccagcccctcaatgtaaagctctgtgtcggaaaccagaattagtgaatggaaggttgtctgtggataaggatcagtatgttgagcctgaaaatgtcaccatccaatgtgattctggctatggtgtggttggtccccaaagtatcacttgctctgggaacagaacctggtacccagaggtgcccaagtgtgagtgggagacccccgaaggctgtgaacaagtgctcacaggcaaaagactcatgcagtgtctcccaaacccagaggatgtgaaaatggccctggaggtatataagctgtctctggaaattgaacaactggaactacagagagacagcgcaagacaatccactttggataaagaactataatttttctcaaaagaaggaggaaaaggtgtcttgctggcttgcctcttgcaattcaatacagatcagtttagcaaatctactgtcaatttggcagtgatattcatcataataaatatctagaaatgataatttgctaaagtttagtgctttgagattgtgaaattattaatcatcctctgtgtggctcatgtttttgcttttcaacacacaaagcacaaattttttttcgattaaaaatgtatgtataaaaaactaaaaaaaaaaaaaa

SEQ ID NO: 220602 - DNA, 1000 bp, Homo Sapiens
agtcacactggtgctacgaggttcaagccgagtcctccaactacccctgcttggtgccagtcaagtggggtggaaactgccagaaggaccgccagtcccccatcaacatcgtcaccaccaaggcaaaggtggacaaaaaactgggacgcttcttcttctctggctacgataagaagcaaacgtggactgtccaaaataacgggcactcagtgatgatgttgctggagaacaaggccagcatttctggaggaggactgcctgccccataccaggccaaacagttgcacctgcactggtccgacttgccatataagggctcggagcacagcctcgatggggagcactttgccatggagatgcacatagtacatgagaaagagaaggggacatcgaggaatgtgaaagaggcccaggaccctgaagacgaaattgcggtgctggcctttctggtggaggctggaacccaggtgaacgagggcttccagccactggtggaggcactgtctaatatccccaaacctgagatgagcactacgatggcagagagcagcctgttggacctgctccccaaggaggagaaactgaggcactacttccgctacctgggctcactcaccacaccgacctgcgatgagaaggtcgtctggactgtgttccgggagcccattcagcttcacagagaacagatcctggcattctctcagaagctgtactacgacaaggaacagacagtgagcatgaaggacaatgtcaggcccctgcagcagctggggcagcgcacggtgataaagtccggggccccgggtcggccgctgccctgggccctgcctgccctgctgggccccatgctggcctgcctgctggccggcttcctgcgatgatggctcacttctgcacgcagcctctctgttgcctcagctctccaagttccaggcttccggtccttagccttcccaggtgggactttaggcatgattaaaatatggacatatttttggag

SEQ ID NO: 220603 - DNA, 1000 bp, Homo Sapiens; identical to SEQ ID NO: 115179

SEQ ID NO: 220604 - DNA, 1000 bp, Homo Sapiens
aaatgttttattttgctttcccagcgggaggggaggaagaagagtgtttacaaagtcctgtagccccctcacctttctgttttcacttttgccaatgtacatcgggtttggttttcttgtattatttaaacggttgtggtttcctttttccacggaggttcaatagaagccgctgcaggagagttttaccaaccattgtgtatgcccaataatttgttatcatttccttaggtagtaacctatttttgttctggtttggttcggttatctaatggaaaggtaactggcaatgcacttgatgtggtcttgcacatgtgggtgatagagttgggttcctttttatgctgggtgtacaggtgggtttgggagagaggagcatgcgcgagagagtctccgagtgtgtgcgacgcgtgtgtgtgtggtgggttgtctgtgtgcatatgtcctgcccgtgtatatgcacccacaccatgtgcccgtgcacaccagtgactacgcagtcccccctttctggtttagctgtgggaagatctgaatctggggccgtttgaaagcaaaaacaaaccactgtctctgcttctgaaacgggaatcagtaactctttgcattttctgtcccacaagatatgcaaaaacaatgcaataatattcatttaaaaatacaattgtgagttgtgttggcattaaaactgtattttaaaaaaagacagaaatttaagggaaaaacacaagaaggcattttgcttcaatatattccgtgtaatgttttattgcattgataatgtttctgttgaagaaaccgttatacttgaattcaggtcagtttcagtatttttcaaatatttttttaaaactgaattgcaattgtgccaagcgaatataatgaattgaattaagttggttttcggattcacttcttgtatattttgctgcatgtaaagtaaatcattttgtatttggagtgtgacaagctttaaaaaaaaaaaaaaaaaaaaaaaaaa

SEQ ID NO: 220605 - DNA, 1000 bp, Homo Sapiens
tcagaggccctggaccaggtgaacggcagcctgccgtccctgcaccgcagctcctggtacacagacgagcccgacatctcctaccggactttcacaccagccagcctgactgtccccagcagcttccggaacaaaaacagcgacaagcagaggagtgcggacagcttggtggaggcagtcctgatatccgaaggcttgggacgctatgcaagggacccaaaatttgtgtcagcaacaaaacacgaaatcgctgatgcctgtgacctcaccatcgacgagatggagagtgcagccagcaccctgcttaatgggaacgtgcgtccccgagccaacggggatgtgggccccctctcacaccggcaggactatgagctacaggactttggtcctggctacagcgacgaagagccagaccctgggagggatgaggaggacctggcggatgaaatgatatgcatcaccaccttgtagcccccagcgaggggcagactggctctggcctcaggtggggcgcaggagagccaggggaaaagtgcctcatagttaggaaagtttaggcactagttgggagtaatattcaattaattagacttttgtataagagatgtcatgcctcaagaaagccataaacctggtaggaacaggtcccaagcggttgagcctggcagagtaccatgcgctcggccccagctgcaggaaacagcaggccccgccctctcacagaggatgggtgaggaggccagacctgccctgccccattgtccagatgggcactgctgtggagtctgcttctcccatgtaccagggcaccaggcccacccaactgaaggcatggcggcggggtgcaggggaaagttaaaggtgatgacgatcatcacacctcgtgtcgttacctcagccatcggtctagcatatcagtcactgggcccaacatatccatttttaaaccctttcccccaaatacactgcgtcctggttcctgtttagctgttctgaaata

SEQ ID NO: 220606 - DNA, 1000 bp, Homo Sapiens
gcaggcatctgatttgcatattcattcatggaccactgtttcttgcttgtacctctggctgactaaatttggggacagattcagtcttgccttacacaaaggggatcataaagttagaatctattttctatgtactagtactgtgtactgtatagacagtttgtaaatgttatttctgcaaacaaacacctccttattatatataatatatatatatatatcagtttgatcacactattttagagtcttaatgccaagtcagcagatttgctttatgaattacagggactagaaatgcccacattcaggaaatttgtaataacattgtctagacacctatcctcattctagtagaaagtgtgtacatactgtaaatatgtgtgattgcttgacttgaaaaggtttgaattctgaatgttataccatccttgtaagtaagtttgtaatttccaccataaattatggtaaatataaaactccagaggttgttctactccatacagttcacactgattgtgacacattcttagtagctagtgtctgttctagtcactgcactggagtctacgagccggaactcgctatatgcacgtgtgtgtgtccgtatgtaagaaagtgtgcaccgagtgactgaatggttgagatgaattggaatgctgaagactaacgaagaaactagagactgatatcgagcattctgcccacctcgctctgtatttaattaattgtgctatatgttgctttaacaacccattgagcagtcagggaatgtgagtaagcttgctgccaaaggtaactaggaaagcattcatctgctgcctccttgtttttgctcctagagagtgaaaatacaggcaattttactgtgagtgtttcactggaaatgtacaatctttgtgtgttagagtatttgttttagtaagaaatgtttacacagcttgtggaattatttcgtgggaaaataaatttttataacttctcccaaaaaaaaaaaaaaaaa

SEQ ID NO: 220607 - DNA, 1000 bp, Homo Sapiens
tggttattatgtctgctaccccagaggaagcaaaccagaagatgcgaacttttatctctacctgagggcaagagtgtgtgagaactgcatggagatggatgtgatgtcggtggccacaattgtcatagtggacatctgcatcactgggggcttgctgctgctggtttactactggagcaagaatagaaaggccaaggccaagcctgtgacacgaggagcgggtgctggcggcaggcaaaggggacaaaacaaggagaggccaccacctgttcccaacccagactatgagcccatccggaaaggccagcgggacctgtattctggcctgaatcagagacgcatctgaccctctggagaacactgcctcccgctggcccaggtctcctctccagtccccctgcgactccctgtttcctgggctagtcttggaccccacgagagagaatcgttcctcagcctcatggtgaactcgcgccctccagcctgatcccccgctccctcctccctgccttctctgctggtacccagtcctaaaatattgctgcttcctcttcctttgaagcatcatcagtagtcacaccctcacagctggcctgccctcttgccaggatatttatttgtgctattcactcccttccctttggatgtaacttctccgttcagttccctccttttcttgcatgtaagttgtcccccatcccaaagtattccatctacttttctatcgccgtccccttttgcagccctctctggggatggactgggtaaatgttgacagaggccctgccccgttcacagatcctggccctgagccagccctgtgctcctccctcccccaacactccctaccaaccccctaatcccctactccctccaccccccctccactgtaggccactggatggtcatttgcatctccgtaaatgtgctctgctcctcagctgagagagaaaaaaataaactgtatttggctgcaagaaaaaaaaaaaaaaaaaaaaaa

SEQ ID NO: 220608 - DNA, 1000 bp, Homo Sapiens
cgggagctcggcaggcgccgcagcaccctcagcccttggatttcttccagccgccgccgcagtccgagcagccccagcagccgcaggctcggccggtcctgctccgcatgggagaggagtacttcctccgcctggggaacctcaacaagagcccggccgctcccctttcgcccgcctcctcgctcctcgccggaggcagcggcagccgcccttcgccggaacaggcgaccgccaactttttccgcgtgttgctgcagcagctgctgctgcctcggcgctcgctcgacagccccgcggctctcgcggagcgcggcgctaggaatgccctcggcggccaccaggaggcaccggagagagaaaggcggtccgaggagcctcccatctccctggatctcaccttccacctcctccgggaagtcttggaaatggccagggccgagcagttagcacagcaagctcacagcaacaggaaactcatggagattattgggaaataaaacggtgcgtttggccaaaaagaatctgcatttagcacaaaaaaaatttaaaaaaatacagtattctgtaccatagcgctgctcttatgccatttgtttatttttatatagcttgaaacatagagggagagagggagagagcctataccccttacttagcatgcacaaagtgtattcacgtgcagcagcaacacaatgttattcgttttgtctacgtttagtttccgtttccaggtgtttatagtggtgttttaaagagaatgtagacctgtgagaaaacgttttgtttgaaaaagcagacagaagtcactcaattgtttttgttgtggtctgagccaaagagaatgccattctcttgggtgggtaagactaaatctgtaagctctttgaaacaactttctcttgtaaacgtttcagtaataaaacatctttccagtccttggtcagtttggttgtgtaagagaatgttgaatacttatatttttaataaaagttgcaaaggt

SEQ ID NO: 220609 - DNA, 1000 bp, Homo Sapiens
ccaacagtacagtcctcaccctgatgaccttgaccccagaggggtcggagctacacatcatcctgggcctgttcggcctcctgctgttgctcacctgcctctgtggaactgcctggctctgttgcagccccaacaggaagaatcccctctggccaagtgtcccagacccagctcacagcagcctgggctcctgggtgcccacaatcatggaggaggatgccttccagctgcccggccttggcacgccacccatcaccaagctcacagtgctggaggaggatgaaaagaagccggtgccctgggagtcccataacagctcagagacctgtggcctccccactctggtccagacctatgtgctccagggggacccaagagcagtttccacccagccccaatcccagtctggcaccagcgatcaggtcctttatgggcagctgctgggcagccccacaagcccagggccagggcactatctccgctgtgactccactcagcccctcttggcgggcctcacccccagccccaagtcctatgagaacctctggttccaggccagccccttggggaccctggtaaccccagccccaagccaggaggacgactgtgtctttgggccactgctcaacttccccctcctgcaggggatccgggtccatgggatggaggcgctggggagcttctagggcttcctggggttcccttcttgggcctgcctcttaaaggcctgagctagctggagaagaggggagggtccataagcccatgactaaaaactaccccagcccaggctctcaccatctccagtcaccagcatctccctctcctcccaatctccataggctgggcctcccaggcgatctgcatactttaaggaccagatcatgctccatccagccccacccaatggccttttgtgcttgtttcctataacttcagtattgtaaactagtttttggtttgcagtttttgttgttgtttatagacactcttgggtgta

SEQ ID NO: 220610 - DNA, 1000 bp, Homo Sapiens
tccatttactgtagctctgcttaatgtactacttaggaaaatgtccctgcttaataatgtaagccaagctaaatgatggttaaagttatcaggcctcccatgaaattgcgttcttcctgcattgaaataaaaacattattgggaaactagagaacacctctatttttaaaaggactttaacgaagtcaaacaacttataagactagtgattcactggggcattattttgttagaggaccttaaaattgtttattttttaaatgtgattcctttatggcattagggtaaagatgaagcaataatttttaaattgtgtatgtgcatatgaagcacagacatgcatgtgtgtgtgtgtctgtgtgtgtgtgtccgtgtatgtgtgtgtgggttctaatggtaatttgcctcagtcatttttttaatatttgcagtacttgatttaggatctgtggtgcagggcaatgtttcaaagtttagtcacagcttaaaaacattcagtgtgactttaatattataaaatgatttcccatgccataatttttctgtctattaaatgggacaagtgtaaagcatgcaaaagttagagatctgttatataacatttgttttgtgatttgaactcctaggaaaaatatgatttcataaatgtaaaatgcacagaaatgcatgcaatacttataagacttaaaaattgtgtttacagatggtttatttgtgcatatttttactactgcttttcctaaatgcatactgtatataattctgtgtatttgataaatatttcttcctacattatatttttagaatatttcagaaatatacatttatgtctttatattgtaataaatatgtacatatctaggtatatgctttctctctgctgtgaaattatttttagaattataaattcacgtcttgtcagatttcatctgtataccttcaaattctctgaaagtaaaaataaaagtttttaaatattaaaaaaaaaaaaaaaaaaaaa

SEQ ID NO: 220611 - DNA, 1000 bp, Homo Sapiens
gcaagcgcagctgtatggggagacgcctggcagagcttgaattgcaaatggctttggcccagatcctaacacattttgaggtgcagcctgagccaggtgcggccccagttagacccaagacccggactgtcctggtacctgaaaggagcatcaacctacagtttttggacagatagtcccatggaaagagactgtcatcatcaccctttcattcatcatagggataagattttttgtaggcacaagaccaaggtatacatcttcccctaatgcctatctgaccaaactggatagaaccaccatagtgaagtgtgaggcggccctgaccaatgtgtgaagtatgcacttggcctgactcaggaagccaggtgagaaaaccatggtctctctgcttgcttggcccttctgatcatgtatgcatcccccaaggatgaaatcagattttaactaataatgctggatggcctgaggaaagattcaactgcctctctttttgggctttcatagtgttcattgatgctgctggctaagcatttatcaaagcataagctcagtaactgtgcatctggtctgtacctggttggtccttcgtctttgcatgtaagctctttgagaggaagggtgaagccttatttgttttttatgtcccctgccagggcctgtctctgactaggtgtcaccatacacattcttagattgaatctgaaccatgtggcagaagggataagcagcttacttagtaggctctgtctacccccttccttctttgtcttgcccctaggaaggtgaatctgccctagcctggtttacggtttcttataactctcctttgctctctggccactattaagtgggtttgccccatcacttagttctcaggcagagacatctttgggcctgtccctgcccaggcctctggctttttatattgaaaatttttaaatattcacaaattttagaataaatcaaatattccattcttgaaaaaaaaaaaaaaaaa

SEQ ID NO: 220612 - DNA, 1000 bp, Homo Sapiens
atgatgatactcagaaatggagatattataggaaaaagaaatcctttggaattttaactaaaatcactgcatatgggaaattaagagatccaggaccatatttgataagagttcctaaaaataatgtaattattaatgctaaagactgctcatgtatcttgatctaattactaaataaattacatatttatttacctgataaatatgtatctagttctacaaggtcacatttatgtggaagtccaaagtcaagtccttaggggataattttgttttgggctcagttgttccctgcttccttttttttttttttttttttttgagatggagtctcgctctgttgcccaggctggagtgcagtggtgcgatctcagctcactgcatcctctgcctcccgggttcaagcaattctctgcctcagcctcccaagtagttgggattacaggcacctgccaccatgcctggctaattttttgtatttttagtagagacgggggtttcactatgttggctaggctggtcttgaactcctgagcctcgtgagtccacccgccttggcctcccaaagtgctgggattacaggcatgagccaccgcacctggccttccctgcttcctctctagaatccaattagggatgtttgttactactcatattgattaaaacagttaacaaacttttttctttttaaaatgtgagatcagtgaactctggttttaagataatctgaaacaaggtccttgggagtaataaaattggtcacattctgtaaagcacattctgtttaggaatcaacttatctcaaattgtaactcggggcctaactatatgagatggctgaaaaaataccacatcgtctgttttcactaggtgatgccaaaatattttgctttatgtatattacagttctttttaaaacactggaagactcatgttaaactctaattgtgaaggcagaatctctgctaatttttcagattaaaattctctttgaaaaaat

SEQ ID NO: 220613 - DNA, 1000 bp, Homo Sapiens
ttttagggaagctgttggagaaaatactccagcaaaatgaaggagtacacaaaccagagaatgacatgaatccagcaaataggatccaacacaggcaatattccagctatggagctagctttaaaaaggaacagtaaaaatattaatcggttagctgggtggaatggcccatgcctgtagtcccagctactcaggaggctcagcagcaggacgacttgagcccaagagttccagaccagcctggccaccttagtgagatcccttctcttaaaaataataacttattgccagatttggggcatttggaaagaagttcattgaagataaagcaaaagtaaaaaaaaaaaaaaaaaaaacaaggggaaagggttggttaggcaatcattctagggcagaaagaagtacaggataggaagagcataatacactgtttttctcaacaaggagcagtatgtacacagtcataatgatgtgactgcttagcccctaaatatggtaactactctgggacaatatgggaggaaaagtgaagattgtgatggtgtaagagctaaatcctcatctgtcatatccagaaatcactatataatatataataatgaaatgactaagttatgtgaggaaaaaaacagaagacattgctaaaagagttaaaagtcattgctctggagaattaggagggatggggcaggggactgttaggatgcattataaactgaaaagcctttttaaaattttatgtattaatatatgcattcacttgaaaaactaaaaaaaaacaataatttggaaaaacccatgaaggtaactaacggaaggaaaaactaagagaatgaaaagtatttgcctctggaaagaacaactggcaggactgttgttttcattgtaagacttttggagccatttaattgtacttaaccattttcatctatttctttaataagaacaattccatcttaataaagagttacacttgttaataagtaaaaaaaaaaaaaaa

SEQ ID NO: 220614 - DNA, 1000 bp, Homo Sapiens
tccctagctgaatcactagctcagatttttctgatctaagcaaacaactcccagctgaggaatgcaggccacagcacccaatcaagacaaattgttattatcagaaaatgaagcaacacttgagctgttcaggccagttccctgttgaagaaacagttccctgttgaagaaagtagagcctgacactgctcccactttggagaccacattccctgcacacggtctttgagagagcagttgcactctacaggcacacttctgaggtacggtatctctctccagccactctgataccaagtaattcaagctggcattccttctattagggaaattcattttacccaatttgcatttatggaattgatcatttaagacactaaattagtttttagaaccaattatgggaagaattccagttgttaggaagagatgaggagttggaagaggagggattagaaacaggaggaggcagtcatcctctccttgccaaaagatttaaacctgtccacattggtggtgatgatgggtgagtttccatggtaacacatccctaattttaccagggaagaggagagtactcactttaccatctttgaatatatttcatagaaatctagctctctgtaccctgaaatcttccactagcctcacttttcaacagagtcatctagaagggagggttggcttcccaaaagcataaccttgaccaaaccaaacaataggcaccagcaatgctgtcattcagttatgcagaagctcatttgtgaaattctgtttctctgatttcttcgcaagtctcttaatggtcatttgtgttagattacatcaaactgatggatagccattggtattcatctattttaactctgtgtctttacatatttgtttatgatggccacagcctaaagtacacacggctgtgacttgattcaaaagaaaatgttataagatgcagtaaactaataacagaattattaaaatatatcaggctaaaaaaaaa

SEQ ID NO: 220615 - DNA, 1000 bp, Homo Sapiens
tatcagagctgggaaattcatgtggatctggggactgagtgtgggagtgcagagaaagaaagggaaactggctgaggggataccataaaaagaggatgatttcagaaggagaaggaaaaagaaagtaatgccacacattgtgcttggcccctggtaagcagaggctttggggtcctagcccagtgcttctccaacactgaagtgcttgcagatcatctggggacctggtttgaatggagattctgattcagtgggttgggggcagagtttctgcagttccatcaggtcccccccaggtgcaggtgctgacaatactgctgccttacccgccatacattaaggagcagggtcctggtcctaaagagttattcaaatgaaggtggttcgacgccccgaacctcacctgacctcaactaacccttaaaaatgcacacctcatgagtctacctgagcattcaggcagcactgacaatagttatgcctgtactaaggagcatgattttaagaggctttggccaatgcctataaaatgcccatttcgaagatatacaaaaacatacttcaaaaatgttaaacccttaccaacagcttttcccaggagaccatttgtattaccattacttgtataaatacacttcctgcttaaacttgacccaggtggctagcaaattagaaacaccattcatctctaacatatgatactgatgccatgtaaaggcctttaataagtcattgaaatttactgtgagactgtatgttttaattgcatttaaaaatatatagcttgaaagcagttaaactgattagtattcaggcactgagaatgatagtaataggatacaatgtataagctactcacttatctgatacttatttacctataaaatgagatttttgttttccactgtgctattacaaattttcttttgaaagtaggaactcttaagcaatggtaattgtgaataaaaattgatgagagtgttaaaaaaaaaaaaaaaaa

SEQ ID NO: 220616 - DNA, 1000 bp, Homo Sapiens
tttaaaatgagtcacttacttcatatcctctcgttcagtttagtaagcaaaggcttcttggcttctctggtgatggggtttgttttcatcgggcatacgttttctgcaatggtttagtggctggggtgagccactggcagtgtgcttacctgttgtctgaaacatagatagatcccacgttgatgtctgaacgaccgtcttttgaaaactcatcgggagtgaatggcatctcgttgtaagtactctaatatacagtgtgtagtttgtttctgttgttcacttggagtggatccagcttcactgtcatgtgcgaacacagtgacacgtttggccagtgacatttcaatcactgaaaatgtgctctacatctcgtatggatttctaggcctgatatccaacagaaagcatagacgtctcaggttattcgttactctaaggtaaaaccatctaggatgattttcccccttgcagttatgttatcattcttataacattgtatgttaatagaaaatatatttgcataatatgcatatatatgtatatttaccaagattttgtttcttacgcttgctatcatggcagcatgcgatgtcatattttcctttatgtgatgtaactactttctgttatctagaaattaagattgaagctaaaacacttctactgttcaatttcagaaactaagaatcatcctcatgcctttatttctgtatctgacatatttcataagcacatccaactactcctagactgactaggattctgcaggaacatgacccgtacacaccacgcgtcacccaacgacccatgaccgttctctgaggcaaaggagggcaacctgacagcaaacacagtcactgttggttccttctgatccacagcctcatcagtatttggactttttaaagctcgtagaaacaagacaaggtgcaccggtttcatagacgcaaccttaacttactatttagatgagatctttctaaagaaaaaaaaaaaaaaa

SEQ ID NO: 220617 - DNA, 1000 bp, Homo Sapiens
gacgatgaccacgctcatggtcagtgcccgctcctccctgccacgggcatcagccatcaaggcactggacgtctacttctggatctgctatgtcttcgtgtttgccgccctggtggagtacgcctttgctcatttcaacgccgactacaggaagaagcagaaggccaaggtcaaggtctccaggccgagggcagagatggacgtgaggaacgccattgtcctcttctccctctctgctgccggcgtcacgcaggagctggccatctcccgccggcagcgccgcgtcccggggaacctgatgggctcctacaggtcggtgggggtggagacaggggagacgaagaaggagggggcagcccgctcaggaggccaggggggcatccgtgcccggctcaggcccatcgacgcagacaccattgacatttacgcccgcgctgtgttccctgcggcgtttgcggccgtcaatgtcatctactgggcggcatacgccatgtgagcacaggactcaggccaccctcgcttgtcctggcgcccggcggcagctgcccagaaacttcctgggagaaagagccctcgggctgccttcccctctgcgtgtttcgaagtgggatgacagtcggccacggaaaacaagaggaagcctcggcctccctgagctctgaccccagcctcacccgaaaggccagcctggggctctccggcaggcagcccgagacctgcacagatgaaggagcagaggttctgaccgagaggctgagccaggccggggtctgggcccttcagggagccgcggatttttatgttcagaaagtgatcctggtttctaggtctttgctctgcaggatcgggatcagagcgtgggaggaggtgggggtggacgtccatccggtgaacagtgaaggcgtttgtgaggtctttctggtcccagcatgaaataaagccttggcctgggggccgcttcattcaaaaaaaaaaaaaaaaaaaaaaaaaaaaaaaaaaa

SEQ ID NO: 220618 - DNA, 1000 bp, Homo Sapiens
tcaaacacggattcttcacattctaatcctcctgagtcaaatcctgatcctgtccactcagagttctgaagggggccagatgttgggtgcagatgtagaagcagccagtcacagacccattctatgcaatggacatttatttgaaaaaaattctcaaaagttttttttttttttttgggggggcggggttctaaagctgtttttaactccgagattacaacttagaggaaccaaggaaataaagcaaataagatttaacaacccaagattaagaggccaggaagaggttagacgcaatgtgaaactgtcctcctaggataaggtttaaagtggctttttgggggctgggtgccgtggctcacgcctgtaatcccagcattttgggaggctgaggtgggcagatcacttgaggccaggagttcgagaccagcctggccaacatggcaaaaccccttctctactaaaaatacaaaaattagccagacgtggtggtgggtgcctgtaatccaactacccaggaggctgaggcatgagaatcgcttgggcccaggaggtggaggttgcagtgagccgagatcgagccactgcactcctgggcaacagagcaagacttcgtctcaaaataaataaataaagtggctcttggggaaaagcaatttaatgtaccacgatgaatagctaactgttcccaagtgtttgctatgtgcaacacaccgcgtgagcagtgttacctgcattattacattaggctgagaggtaaaataatttgcccgaagacatacagctagtgacgaatggactgatggtttgaacttaacgtctatttgacttaaggtcctgcaccctgccacttgtaattttcagaatcactgataatctgaaataatgcagcttaaaacatgttttcttaattaaaagtataaaaaaaaaaaaaaaaaaaaaaaaaaaaaaaaaaaaaaaaaaaaaaaaaaaaaaaaaaaaaaaaaaaaaaaaaaaaaaa

SEQ ID NO: 220619 - DNA, 1000 bp, Homo Sapiens
aactgacttccacaagagggcttttccacactcggtgtgtgcatacagtttctgcctgtgatcatttctttatgttattattttattttttcgagatagggtcttgctcaatttcttaggctggagtgcagtggcacgatcatagctcactgaagtttcgacctgggctcaagcaatcctcccgcttcagcctcctgagtagctggtgcgcacgaccatacccagctaatgttttattttttgtagagacgaggtctcactatgttgcccaggctggtctcgaacttctgagctcgagcgatcctcctgcctccacctcccaaagtgttcggattacaaacgtgagccatcgcacctagcctctttgatcatttctgtggtgttcagtgggggttgacagctccctaaagattttcctgtttttttgcatgcatgggtttgaattctttgaggtccaatttatttggacccctgaataaagttttgtgggttttcttctatgtgtggaattatataggcattcttccagtgtggtttctcttatgtcgagtgagagctgacctgcaccgaagtttgtcccatttgttgcccttgaattatctgtatgaattatatgttccagtgaaaatggagttctgggttggaggcttattccatgtttacacaattaaaattgcagtgttcctctctgggatgagagctctaaagcagagtaagattacgttctgatgtaagctttaaccacctatttataaggtctcacctgtggtccactgtgttgagacttctacagaagagcttctgtatagtaaccattttcttaggctgtctcacttgtgtgaatcttctgacacatttattatagctttgtcccatttcttatcctttttgctctttagaaatttccctttaatttattacattcattgcttactgtaaagagtccaggtaactgactttaattcaagttacttcctgttcaataaatttaacttttccc

SEQ ID NO: 220620 - DNA, 1000 bp, Homo Sapiens
cagtatcctcttgatggtcacttgtactgtttatgccaataaaacgagaggtgtcccagagactttcaatgaagccaaacctattggatttaccatgtataccacctgcatcatttggttagctttcatccccatcttttttggtacagcccagtcagcagaaaagatgtacatccagacaacaacacttactgtctccatgagtttaagtgcttcagtatctctgggcatgctctatatgcccaaggtttatattataatttttcatccagaacagaatgttcaaaaacgcaagaggagcttcaaggctgtggtgacagctgccaccatgcaaagcaaactgatccaaaaaggaaatgacagaccaaatggcgaggtgaaaagtgaactctgtgagagtcttgaaaccaacacttcctctaccaagacaacatatatcagttacagcaatcattcaatctgaaacagggaaatggcacaatctgaagagacgtggtatatgatcttaaatgatgaacatgagaccgcaaaaattcactcctggagatctccgtagactacaatcaatcaaatcaatagtcagtcttgtaaggaacaaaaattagccatgagccaaaagtatcaataaacggggagtgaagaaacccgttttatacaataaaaccaatgagtgtcaagctaaagtattgcttattcatgagcagttaaaacaaatcacaaaaggaaaactaatgttagctcgtgaaaaaaatgctgttgaaataaataatgtctgatgttattcttgtatttttctgtgattgtgagaactcccgttcctgtcccacattgtttaacttgtataagacaatgagtctgtttcttgtaatggctgaccagattgaagccctgggttgtgctaaaaataaatgcaatgattgatgcatgcaattttttatacaaataatttatttctaataataaaggaatgttttgcaaaaaaaaaaaaaaaaaactcgag

SEQ ID NO: 220621 - DNA, 1000 bp, Homo Sapiens; identical to SEQ ID NO: 115189

SEQ ID NO: 220622 - DNA, 1000 bp, Homo Sapiens
gtctggagctctacctggacctgctgtcccagccctgccgcgctgtttacatctttgccaagaagaacgacattcccttcgagctgcgcatcgtggatctgattaaaggtcagcacttaagcgatgcctttgcccaggtgaaccccctcaagaaggtgccggccttgaaggacggggacttcaccttgacggagagtgtggccatcctgctctacctgacgcgcaaatataaggtccctgactactggtaccctcaggacctgcaggcccgtgcccgtgtggatgagtacctggcatggcagcacacgactctgcggagaagctgcctccgggccttgtggcataaggtgatgttccctgtgttcctgggtgggccagtatctccccagacactggcagccaccctggcagagttggatgtgaccctgcagttgctcgaggacaagttcctccagaacaaggccttccttactggtcctcacatctccttagctgacctcgtagccatcacggagctgatgcatcccgtgggtgctggctgccaagtcttcgaaggccgacccaagctggccacatggcggcagcgcgtggaggcagcagtgggggaggacctcttccaggaggcccatgaggtcattctgaaggccaaggacttcccacctgcagaccccaccataaagcagaagctgatgccctgggtgctggccatgatccggtgagctgggaaacctcacccttgcaccgtcctcagcagtccacaaagcattttcatttctaatggcccatgggagccaggcccagaaagcaggaatggcttgcttaagacttgcccaagtcccagagcacctcacctcccgaagccaccatccccaccctgtcttccacagccgcctgaaagccacaatgagaatgatgcacactgaggccttgtgtcctttaatcactgcatttcattttgattttggataataaacctggctcagcctgagcctctgcttct

SEQ ID NO: 220623 - DNA, 1000 bp, Homo Sapiens; identical to SEQ ID NO: 115190

SEQ ID NO: 220624 - DNA, 1000 bp, Homo Sapiens
aaatgcaaatgtaatatttttttcaaattacttctttattgacttgtccaaatttcaaaagtgcctacccttcaataaaacttttttattctgatctccataaattacttagtcttctatgtatagctatcaaggaaataaaaccaattttgccacagccacaactgtaaatgtttttgtacccatgctgaaactcataacaacacagacataaaaatagctgtgaggttttgctttttttgttgtcagctatcttaagaatcattaaatacacctgctttgggtaaaactctttgcaagcagtaattaacactagtaacagtgaaagcacaagatttccaaatcagtcgttttctcaaaaaaatatcgtataagtgactcatcctgtctgctaactccagacctcccagcttgaagccaaatctttccatgtgagattgatatggatttcctagaagtactggaatgttgtcatatcttgccctattttaattctgctatagaaaacaattgccttcacttttaaggagtaatttgaatattaataactctggtctagattttcatataatgtattaaagacaaagtagtgaacatcaatgaacatctgatagagataaactgtaatcaggcataagcttgtttgtatgttctggcagtgactaatcagtaaatgatgtcggtttgcccagtatcacttatcttctgtatttttcctctgtcgtgtaaatagtataaccttttcatttatggacaattttttggactagtagccttcaatatacattctgctttgaattaattttttcaaatcaataaattatgtagacatttaaaatcaaatatcaagtagaattgaaaaatgtgagttacataagttaaaaacttactttaaatcttaccttctataggtagctctaaataaattcatatggttatatggcaaaaaaaaaaaaaaaaaaaaaaaaaaaaaaaaaaaaaaaaaaaaaaaaaaaaaaaa

SEQ ID NO: 220625 - DNA, 1000 bp, Homo Sapiens
gggaggccgaggcacgagaatcgcttgaacccgggaggtggaggttgccgtgagccaagatcacgccactgcactccagcctgggcaacagagcaagactctgtctcaaaaaaaaaaatacaatattttaacaatgtgccctcttaagtgtgcacagatacacatacacggtattcccaagagtggtggcagctcaaaatgatatgtttgagtagacgaacagctgacatggagttcccgtgcacctacggaaggggacgctttgaaggaaccaagtgcatttttatctgtgagttctgttgtgtttgtcaaaaagtcattgtaatctttcatagccatacctggtaagcaaaaactagtaaagacataggaacatgtagttttacttggtgtttatgttgcaatctggttgtgatttatattttaaagcttggtgctaaaccacaatatgtatagcacatggagtgcctgtacaagctgatgttttgtattttgtgttcctctttgcatgatctgtcaaagtgagatatttttacctgcctaaaatatgatgtttaaaagcatactctatgtgatttatttatttctacctttctgagtctcttggactaagaagatgttttgaaatgtaccatcaaatgttaacagagtttgatatgggctttctctttggtttctcatcacatttgtaaatgtcttttcaaaaggatttactttttgtaaaaagcttcattctcactctgctttgcatcccccaaacttcttgttcaaaacggggggagtttaggagactttaatcccggtttcagaagctgcagctggtctgtttccaggtcagaaaccattgttcagaagacctccctgtgagagagttgctcctcagggtccctcaggaccaaagaacactcgaaaagagcacttcacacagacaagtggctaagtgtccattatttaccttgaacaatcaaggcaactagtggagagaactgattgtgagctc

SEQ ID NO: 220626 - DNA, 1000 bp, Homo Sapiens; identical to SEQ ID NO: 115191

SEQ ID NO: 220627 - DNA, 1000 bp, Homo Sapiens
gtcccgtgcccattaggtctggcatgccccctcctgcaaggggctcaaccccctaccccgacccctccacgtatctttcctaggcagatcacgttgcaatggctcaaacaacattccaccccagcaggacagtgaccccagtcccagctaactctgacctgggagccctcaggcacctgcacttacaggccttgctcacagctgattgggcacctgaccacacgcccccacaggctctgaccagcagcctatgagggggtttggcaccaagctctgtccaatcaggtaggctgggcctgaactagccaatcagatcaactctgtcttgggcgtttgaactcagggagggaggcccttgggagcaggtgcttgtggacaaggctccacaagcgttgagccttggaaaggtagacaagcgttgagccactaagcagaggaccttgggttcccaatacaaaaatacctactgctgagagggctgctgaccatttggtcaggattcctgttgcctttatatccaaaataaactcccctttcttgaggttgtctgagtcttgggtctatgccttgaaaaaagctgaattattggacagtctcacctcctgccatagggtcctgaatgtttcagaccacaaggggctccacacctttgctgtgtgttctggggcaacctactaatcctctctgcaagtcggtctccttatccccccaaatggaaattgtatttgccttctccactttgggaggctcccacttcttgggagggttacattttttaagtcttaatcatttgtgacatatgtatctatacatccgtatcttttaatgatccgtgtgtaccatctttgtgattatttccttaatattttttctttaagtcagttcattttcgttgaaatacatttatttaaagaaaaatctttgttactctgtaaatgaaaaaacccattttcgctataaataaaaggtaactgtacaaaataagtacaatgcaacaaaa

SEQ ID NO: 220628 - DNA, 1000 bp, Homo Sapiens
taaaaaatttctttaaatacaatcatttttgtaatatttattttatgcttatgatctagataattgcagaatatcattttatctgactctgccttcataagagagctgtggccgaattttgaacatctgttatagggagtgatcaaattagaaggcaatgtggaaaaacaattctgggaaagatttctttatatgaagtccctgccactagccagccatcctaattgatgaaagttatctgttcacaggcctgcagtgatggtgaggaatgttctgagatttgcgaaggcatttgagtagtgaaatgtaagcacaaaacctcctgaacccagagtgtgtatacacaggaataaactttatgacatttatgtatttttaaaaaactttgtatcgttataaaaaggctagtcattctttcaggagaacatctaggatcatagatgaaaaatcaagccccgatttagaactgtcttctccaggatggtctctaaggaaatttacatttggttctttcctactcagaactactcagaaacaactatatatttcaggttatctgagcacagtgaaagcagagtactatggttgtccaacacaggcctctcagatacaaggggaacacaattacatattgggctagattttgcccagttcaaaatagtatttgttatcaacttactttgttacttgtatcatgaattttaaaaccctaccactttaagaagacagggatgggttattcttttttggcaggtaggctatataactatgtgattttgaaatttaactgctctggattagggagcagtgaatcaaggcagacttatgaaatctgtattatatttgtaacagaatataggaaatttaacataattgatgagctcaaatcctgaaaaatgaaagaatccaaattatttcagaattatctaggttaaatattgatgtattatgatggttgcaaagtttttttgtgtgtccaataaacacattgtaaaaaaaa

SEQ ID NO: 220629 - DNA, 1000 bp, Homo Sapiens; identical to SEQ ID NO: 115194

SEQ ID NO: 220630 - DNA, 1000 bp, Homo Sapiens
tgcagtggacagagctctgggcatctgtgcgagtgtgacgatgccagctgtgagcgacatgagggcatcctctgcggaggctttggtcgctgccaatgtggagtatgtcactgtcatgccaaccgcacgggcagagcatgcgaatgcagtggggacatggacagttgcatcagtcccgagggagggctctgcagtgggcatggacgctgcaaatgcaaccgctgccagtgcttggacggctactatggtgctctatgcgaccaatgcccaggctgcaagacaccatgcgagagacaccgggactgtgcagagtgtggggccttcaggactggcccactggccaccaactgcagtacagcttgtgcccataccaatgtgaccctggccttggcccctatcttggatgatggctggtgcaaagagcggaccctggacaaccagctgttcttcttcttggtggaggatgacgccagaggcacggtcgtgctcagagtgagaccccaagaaaagggagcagaccacacgcaggccattgtgctgggctgcgtagggggcatcgtggcagtggggctggggctggtcctggcttaccggctctcggtggaaatctatgaccgccgggaatacagtcgctttgagaaggagcagcaacaactcaactggaagcaggacagtaatcctctctacaaaagtgccatcacgaccaccatcaatcctcgctttcaagaggcagacagtcccactctctgaaggagggagggacacttacccaaggctcttctccttggaggacagtgggaactggagggtgagaggaagggtgggtctgtaagaccttggtaggggactaattcactggcgaggtgcggccaccaccctacttcattttcagagtgacacccaagagggctgcttcccatgcctgcaaccttgcatccatctgggctaccccacccaagtatacaataaagtcttacctcagaaaaaaaaaaaaaaaaaa

SEQ ID NO: 220631 - DNA, 1000 bp, Homo Sapiens
ttttctcctacattttcttttaaaagttttatagtttcagagtttacatgtaattccataatctccatttagttaaattttgtgtggggtgtgaactgtggtttaactgttttcttgtatatggatatccaattgtttcacacaatttttttgaaaagaatatccttggcagggcacggtagctcacacctgtaatcccagcactttaggaggtcaaggtgggcagatcatgaggtcaggagtttgagaccagcctggccaatatggtgaaaccacgtctctattaaaaatagaaaaattagccaggcgtggtggtgtgtgcctgtattcacagctgcttggatggctgaggcaggagaatcgcttgaacccaggagtcagaggtttcagtgagccgagattgtgccactgcactccagcctgggtgaaagagctagattctctctctcaaaaaaaaaaaaaaaaaggaaagaaagaaagaaaagaaaagaaaatccctttttgctttaacttgcccttgcaggtttgtagaaactcaattgttgaaatttgggtggataaatttctggattttctatctattccatgttggaccaataccacactgccctagtcactgttgcattatagtatatctttaaaggagtaatgggaatccttcaactacatttttttccccaataatttttggctattctgcttcttttgtgtttctatgtaaattttatcatcagtgtgtctatttctacaaatagtcctgatagggtttgaattgggatttctgtgaatctatagatcaatctgaggagacttaataatgatattgattctcccaattcatgaatatagtatacccctgtatttatttgttttcttgaatttcttttatcattgttttgtagttttcaccatgacagtcttgcacatattttgttaaatgtacagctgagaatttaattttttctggtgtacaatgctaataaaatggtgactttaaaag

SEQ ID NO: 220632 - DNA, 1000 bp, Homo Sapiens; identical to SEQ ID NO: 115198

SEQ ID NO: 220633 - DNA, 1000 bp, Homo Sapiens
actatcatgctgtggaccgtcaacccagccctgcttctcagtgtggggcaggtgtctcaggacgaaggcgccgcgtgaccacatgggcagctctgttcacaaagtggaggcctcgttttcctggtcttgactgctctgtttgggtgggagaagattctctgggggtccccacatcctcccaaggctcccctcacagcctctcctttgcttgaagccagaggtcagtggccgtgctgtgttgcgggggaagctgtgtggaaggagaagctggtggccacagcagagtcctgctctggggacgcctgcttcatttacaagcctcaagatggctctgtgtagggcctgagcttgctgcccaacgggaggatggcttcacagcagagccagcatgaggggtggggcctggcagggcttgcttgagccaaactgcaaaggctgtggtggctgtgaggacactgcgggggttggggggggggcgtctgtacctcaggggatgccccgctgtggtcacccagagaatcacccttcctggtctacagatggaagctgcaggttggtgactttgcaaatgcacttcctacagatgaactattaaaagacctgcaacattgaaaaaactcattttttccaccaaaaccttggccaggtaacctaccttaggcacctgcaaagaacaggaagtgatggctgtctcgcaacagagcctgggctgctcctcctgctctggggagtctaggccgtggggactgttctggggaggctcatgctgtctccatgacgtctgtggcaggagtccctgaggacgggagctgcctagctacagttttcttgccaaggcgaggtgttttgtgaatctgtgctgatgtaatgtgcaccttcacgtatttatgcatgtggcaagcgttacttcctgtgcacgtagccagccctgggtctgtctctggggtaatgaaaaaggaccctaataaacacctgctcactggctgggtattcttcgtaa

SEQ ID NO: 220634 - DNA, 1000 bp, Homo Sapiens
aaataggtaaattggacttaatcaagatttgaagcttttgtgattgaaaagaccctatcaagaaggtgaaaagataacctgcagaatgggagaaaatatttgcgagtcatatatatgataaggggcttgtatctggaatatataaataactcttataacacaacaataaggagaaaaataaatcaatttaaaaaatgggctaacggtttgaatagacatttctccaaagaagatatgcaaatggctactaagcacatgaaaaaatactcaacattattattcattagggaaatgcaagtcaaaatcacaatgagattccagtttacaatcactaggatggctacaataaaaagatggacaagaacgagtgtcggtgaggatgtagagaaactggtagaaatttaaattgttggtgggaatgtaaatggtgcacctgctttgaaaaacagtttggcagtacctcaaaaagttaaacgtagagtgaccatatgacccaggaatgccactcctaggtatttacccaagagaaatgaaaacgtacatacacacaaaaacttgtacaccaatgttcatagcaacattatttgtaatagccaaaaagtggaaacaacccaaatgtctaccaactgatgaatgggaaataaaatgtggtctgtccacgcaatggaacattattagactctaaaaagaaatgaagtactcacacatgccacaacatggatgagccttgaaaacttgctaagtgaaagaagccaggtgcaaaagcccacatattgtctgactgcattgaaatgcaatgtctaaaatggacgaatctatatagagtgaatatagattagcgtttgccagggcctggaggctgtgagagatgaggcatgactactaagggtttggggtttctttttcgggtgatgaaaatgttctgaaattagtggtgattgtgcacgattttgagaatgtactaaaaaccaatgaactttaaaaaataaaaataaacaaa

SEQ ID NO: 220635 - DNA, 1000 bp, Homo Sapiens; identical to SEQ ID NO: 115202

SEQ ID NO: 220636 - DNA, 1000 bp, Homo Sapiens
gatactgatgacccagaagaagaggaggaagaagcaccagcaccaaatgaagaggaaacctgtgaaaataatgaatctccaaaaaagaagactttcaaaaggagaaaaatctactgccaaataactcagcacctcttacagaaccacaagatgtggaagaaagtcattgaagaggagcaacggttggcaggcatagaaaatcaatccctggaccagacccctcagtcgcactcttcagaacagatccaggctatcaaggaagaagaagaagagaaagggaaaccaagaggcgaggagataccaacccaaaagccagaccagtgacaatggatagaatgggctgtgtttccaaacagattgacttgtcaaagactctcttcaagccagcacaacatttagacacaacactgtagaaatttgagatgggcaaatggctattgcattttgggattcttcgcattttgtgtgtatatttttacagtgaggtacattgttaaaaactttttgctcaaagaagctttcacattgcaacaccagcttctaaggattttttaaggagggaatatatatgtgtgtgtgtatataagctcccacatagatacatgtaaaacatattcacacccatgcacgcacacacatacacactgaaggccacgattgctggctccacaatttagtaacatttatattaagatatatatatagtggtcactgtgatataataaatcataaaggaaaccaaatcacaaaggagatggtgtggcttagcaaggaaacagtgcaggaaatgtaggttaccaactaagcagcttttgctcttagtactgagggatgaaagttccagagcattatttgaattctgatacatcctgccaacactgtgtgtgtgtgtgtgtgtgtgtgtgtgtgtgtgtgtgtgtgtgaaagagagacagaagggaatggtttgagagggtgcttgtgtgcatgtgtgtgcatatgtaaagagatttttgtggtt

SEQ ID NO: 220637 - DNA, 1000 bp, Homo Sapiens
cagtttcccactcctatgcactttcacaggaactagaaaactattcttaaaccaaaaataccatccgtgttgacccatgttgcagagcccttacttaaatccttcactggtgtatgaatactttgtcataatgctgctttgctgggtagtgagctcttatttttcactgggggtcagctataactaaaaactcaagtgacatatttcagttaccaaagtggccaggaactttttgcttttatgaaaatagattcatattgtatttcccagtgtgtcttttatgtctttgaatgttttggagaaaagtctatgcctgtctaaaaatgaatccagtgttgcctttctgagggatttctgctcaatgcaatacactgttcagtgctattctcccagctaggtttatccatgaaggactgagtgacctttgttgtatttaacaaaatccaggtgcatcaatttctgatgctttttactattgtgtattatctactatgtgtgttttatttctgctgagagtattcaggtttgccatggacatcagaagtttgaattccagtcttatcttatgttccatggctgaattttaaagctgtttaggtttaacaatgaagggatttattctttagtcaaaattgttgtttttactctagctcaggattcgtatttttaaagatttagttaatataaacacagcacagatttgtcagaagaaaaaaaatttgctgtaataccaaaactaacctcatcaaagatacagaaaaaaagaaatatagtgagccctaaaggacacatacattgaataaataattggaacatgtggttatctttagatccacatcttagctgtcatttgttcactctaaaactgatgttcatctttctgttaatttccctctgcctaaagagtacatgacagaaatgacctatcactacttattatttctgaagcctaactgcaagagtgatttcttgagaacaagtaaagaactggctcgtgccg

SEQ ID NO: 220638 - DNA, 1000 bp, Homo Sapiens
ttttcctcccctgggaagggctggaataggatagaaagctgggggttttcagagccctatgtgtggggaggggagtggattccttcagggcatggtacctttctaggatctgggaatggggtggagaggacatcctcttcaccccagaattgcgctgcttcagccccatctccagcctgatcctctgaatcttccttccctccctttctgatacagtgactggggcaaaaggagccattgtgaccaggggctgcgggaggcctttcctgggaccttccttgggactggtctgggcccctggggcttgtcgcctgccctgagtccggagccctttgcctccttcctctcccctggggctgggaggctccatccgaccaatgtctgtaaagtgctttgaggatctccccagcaaagcaccttcagaatgtatcgacaccagctgggttagggtcaagggtgcctggggagggtgagtaatcctgcattgctaaaagagagggtctgtcccctcctctccacgtcccagaactggcccagctgcaggcactaagaagctcctcccctgagacaagtgaggggtagtcggtgaaaggcagatggacaaggggctcagggctgctgccttcctgtcctctggagagaacccagccaggcgcggtgccccttcctctcctcaggctcctccttgcccccaccttgccccaggaaaggccaaagtccaggtgactgccctccttctttcttgtaaataccaaccatgcatttgtacagtgggccctgttcatgcgaaatccacatccatggtctcctagacctgctaccctggtacttccaccctaccccaccccgagaagggcagagacgcatgtgactcacccctgcccttggtttcccagacccctgctatagccagagaacaataaagaagggagaccaggaaaaaaaaaaaaaaaaaaaaaaaaaaaaaaaaaaaaaaaaaaaaaaaaaaaaaaaaaaaaaa

SEQ ID NO: 220639 - DNA, 1000 bp, Homo Sapiens
ccaacatacatgccttcatcgagtcactgcctaataaatatagcactaaagtaggagacaaaggaactcagctctctggtggccagaaacaacgcattgccatagctcgtgcccttgttagacagcctcatattttgcttttggatgaagccacgtcagctctggatacagaaagtgaaaaggttgtccaagaagccctggacaaagccagagaaggccgcacctgcattgtgattgctcaccgcctgtccaccatccagaatgcagacttaatagtggtgtttcagaatggcagagtcaaggagcatggcacgcatcagcagctgctggcacagaaaggcatctatttttcaatggtcagtgtccaggctggaacaaagcgccagtgaactctgactgtatgagatgttaaatactttttaatatttgtttagatatgacatttattcaaagttaaaagcaaacacttacagaattatgaagaggtatctgtttaacatttcctcagtcaagttcagagtcttcagagacttcgtaattaaaggaacagagtgagagacatcatcaagtggagagaaatcatagtttaaactgcattataaattttataacagaattaaagtagattttaaaagataaaatgtgtaattttgtttatattttcccatttggactgtaactgactgccttgctaaaagattatagaagtagcaaaaagtattgaaatgtttgcataaagtgtctataataaaactaaactttcatgtgactggagtcatcttgtccaaactgcctgtgaatatatcttctctcaattggaatattgtagataacttctgctttaaaaaagttttctttaaatatacctactcatttttgtgggaatggttaagcagtttaaataattcctgttgtatatgtctattcacattgggtcttacagaaccatctggcttcattcttcttggacttgatcctgctgattcttgcatttccacat

SEQ ID NO: 220640 - DNA, 1000 bp, Homo Sapiens
gacaccacaggccttcccctcttcgtgggcagcgtgaggaaccccaaccccagtgcaccgcgggagctcaaggaacagcaggattccccgggcaacaaggacttcctccagagcctgaaaggcttcccccgcggagacaagcttttcggccctgacttaaaacttgtgccccccatggaggaggattacccccagtttggcagccccaagtgaggggccgtggctgtggcatccagactccctgcctggaccagcctctccactcatgtgactctttccaacctgctttgtggcactggggcaggggccgggggcagtctgagagaggccattctttcccaacacctcttggggagtttagggtgggggggggcgcggctgggaggagggcaggcatcggggagccgggagcctgaccctcatctttcttccaaacaggctcagagggtgtcctgcaccggggcctgggcaggagggaggtgcttctagttctgccaggagacaggttagctgctccccacgtcagctgggacaccccgacttttgtttaccagagaaaaagggagggggagagggctgcctttggacttgtcccgggacacctaggctagggtggggagagacgggccctggtggtggctcgggaggcgaagcgttgtcctcagccccgcgtggaactcgtgtctggcacagcctggctgtggcctaacctgccgagagtccatcagcctccatcctaccccctgtgccttgtcacgccagacttcccacggctcctcgagatcccaacactgccagcatttcccttccttcctctcctgtctccctcctctgcccgggagctcaggaaccgaggcagggaaggatcccatgagctccttaaggctcttttgtaaggtttttgtagtgatttttatgccacctgaataaagaatgaatgggcaaaaaaaaaaaaaaaaaaaaaaaaaaaaaaaaaaaaaaaaaaaaaaaaaaggaattc

SEQ ID NO: 220641 - DNA, 1000 bp, Homo Sapiens
actggtttttttttcttgatttgcccatataattggtaatggataacttaataaatttgtgtgatataaaagtagtgtatcatgttctactgtttgatcttatcccttcccatttctgcaaaggtactgttagctggaagaaaaacattttggttagctttgtatgacagtagtctttccctttatagtttctctataaaaactggttttaaaatcagtggaaaagggcaggttgaatcaaggtgaatcaatctgaaattgagcacacctgcctgccatcgctgttccttcaactgagtgctgcacatcatgggctctgtctgtgagagaaaaatcccggtgcttggtgtccttgcatgacatggagttttgcatgtagatcaatttaaaatgtacctcttgtttacataatttgcataattttaaaagataatgttgccaaactttggaaatgttaatgttcagactgaaaatctccactacatgtaactttcttcctctggatcagtggcatggcttataatcccagccagtggtttgaactgttccagtgtcaactgccatgtgctctgcttcaagggggaactagccttttgtgaattttttgtacataagtatttgttacaaatattttagcaaatgctttctatttctcttgcttgtgcatatcttggctggcgttacagaaaaatagtgtaaacattatttccttaccggggaatgagggttttttctttttctttttttttttttttttttttagtttgtgtgtgggggtgggtaagggaggggatggtttatgttgaatgtttagtttttcttctgcatgatacgtcatgttgtgggatctttagaaaacttcatactgtatgaataagaaaataaaatatttgaaacttgaaaaaaaaaaaaaaaaaaaaaaaaaaaaaaaaaaaaaaaaaaaaaaaaaaaaaaaaaaaaaaaaaaaaaaaaaaaaaaaaaaaaaaaaaaaaaaaaaaaa

SEQ ID NO: 220642 - DNA, 1000 bp, Homo Sapiens
gcctgtcaaaaatactttgagatgatacacaatgtggatgattgtggcttttctttgaatcatcctaatcagttcttttgtgagagccaacgtattctaaatggtggtaaagacataaagaaggaacctatccaaccagaaactcctcaacccaaaccaagtgtccagaaaaccaaggatgcatcatctgctctggcctctttaaattcctctctggaaatggatatggaaggactagaagattactttagtgaagattcttaggcagttttataaccctttttcctcaatagcctgtttcctgtttttaagattttgcctttgttgttgaaaaagggtttcactctgtcaccaaggcttagtgcagtgacacaattacagctgattgcagccttgaccttcccagctcaagtgatcctcctacctcagcctcccaagtagttaggaccacaggtgtgcacctcatatccagataatttttttcaatttttttttgtagaggtggggggtctccctatgttgcccaggcagatctcagactcctgggctcaagcgatcctcacacctcagcgtcccagagtgctgggattacggttgtgagccactgtgcctggcctttttttttttttttaacctttttgtttaacttctctcttcactgcatcccaatccatctacaggcatgcacacttattaggaaaggaggtttgaggtaacaacagagactttcactatattttgctttgacagaaggaaagaggaggagtttctattaaaatctgtcacttgagtgatgtcatttaagtcctattttaggagataaaaacagctttggggactggttaaagtcccccagaaactacaataaagaacaacttttgttttaactcttaatcactttgtaattttgactcaatccttttctggaccatttttgttaataaatatcaaagtgtaaaaaaaaaaaaaaaaaaaaaaaaaaaaaaaaaaaaaaaaaaaa

SEQ ID NO: 220643 - DNA, 1000 bp, Homo Sapiens
aagggaaacgaatgcctgattcattatattcatgaagatatcaaaggtttataaagccaatatctgggaaagagaaaaccgtgagacttccagatcttctctggtgaagtgtgtttcctgcaacgatcacgaacatgaacatcaaaggatcgccatggaaagggtccctcctgctgctgctggtgtcaaacctgctcctgtgccagagcgtggcccccttgcccatctgtcccggcggggctgcccgatgccaggtgacccttcgagacctgtttgaccgcgccgtcgtcctgtcccactacatccataacctctcctcagaaatgttcagcgaattcgataaacggtatacccatggccgggggttcattaccaaggccatcaacagctgccacacttcttcccttgccacccccgaagacaaggagcaagcccaacagatgaatcaaaaagactttctgagcctgatagtcagcatattgcgatcctggaatgagcctctgtatcatctggtcacggaagtacgtggtatgcaagaagccccggaggctatcctatccaaagctgtagagattgaggagcaaaccaaacggcttctagagggcatggagctgatagtcagccaggttcatcctgaaaccaaagaaaatgagatctaccctgtctggtcgggacttccatccctgcagatggctgatgaagagtctcgcctttctgcttattataacctgctccactgcctacgcagggattcacataaaatcgacaattatctcaagctcctgaagtgccgaatcatccacaacaacaactgctaagcccacatccatttcatctatttctgagaaggtccttaatgatccgttccattgcaagcttcttttagttgtatctcttttgaatccatgcttgggtgtaacaggtctcctcttaaaaaataaaaactgactccttagagacatcaaaatccaaaaaaaaaaaaaaaaaaaaaaaaaaaaaa

SEQ ID NO: 220644 - DNA, 1000 bp, Homo Sapiens
ttacacactcctttcactgatagcttgactaatggaatgattggttaaaatgtgatttttcttcaggtaacactacagagtacgtgaaatgctcaagaatgtagtcagactgacactactaaagctcccagctcctttcatgctccatttttaaccacttgcctctttctccagcagctgattccagaacaaatcattatgtttcctaactgtgatttgtagatttactttttgctgttagttataaaactatgtgttcaatgaaataaaagcacactgcttagtattcttgagggacaatgccaataggtatatcctctggaaaaggctttcatgatttgacatgggacagacggaaatgaaattgtcaaaattgtttaccatagaaagatgacaaaagaaaattttccacataggaaaatgccatgaaaattgcttttgaaaaacaactgcataacctttacactcctcgtccattttattaggattacccaaatataaccatttaaagaaagaatgcattccagaacaaattgtttacataagttcctataccttactgacacattgctgatatgcaagtaagaaataatgcctccaatttttttcttaaaatagtttagatatgttaagcatggattttccccctaaattctactctaaagcttctataaaatatagtttggaaataaaaatgttcttacacaaggggcaaatgaatttcatgtgaatccctttaggatgttttcctccttcatttcagcatgatagataatttattatacaccttagtctttccttagttaaaaaaaaattccctaaagactaacttgaaaagaaaaccacagcaggatgctaatggaattactgccttactgtacatacaaattctactttaatataaacccataagtttaactgtatttttgaagactatttttctatgacttaggtaaaataaaagactattttctattttcccagaaaaaaaaaaaaaaaa

SEQ ID NO: 220645 - DNA, 1000 bp, Homo Sapiens
gacataggagcaggatattctgttagtgtgatttcttgcaactttattttatattttaaactgctgatattggatataatgctgctttttagagacacctaaattgcagtatcagaatgaatgttgatgtttgaagccaaaaagccaaatgcttaaactgatcaatgactgtagctttttagactgttggtcaaagaacattctacttcacagtaatagctctatcagccacagatctcatggtggctgttgcatgataatgataggataaacaaaataccactgtcttcaagaaacattatcttaggtttgtttgtttggtttgagtttgatttggcttttatattttttaaaatcccttttgctaccccatctggttttataaactgagtttcttagcattcgttaaaattaaggggtttgtttggaataatatatattttttatgcttttgtctttcttacctgattgatattacattcacctttgattgttttttaaaagtttatttttacagaatatatttagtacctttcttaaggagtaactgaattgaatcaaccagtttgcatttaaataaaagaacaggctcagtggtcttcctgtagaatggtttacatgcctgcatgtgcagtagttgtgtctggaatcctagaattggcactttctgcctccttgctctaaatgtcacaaaaaattatacttccttaaagtaaatgtaatgatttcttcttttcctattgaccagtacagatagatatgttgtgtttgcttcatttttaatgatgacttcaagattgatgatgtgatccaataactgtggaggtagctttaacttggttctgtgtaaatagtatgtattttattataatatttctcattttaagatgcttggtttacattaaattatggtatttaactatttttatgtttatactaggtagggtctttcttatgtttctgtgtttttggtatgctaaataaagctatttttaaaccc

SEQ ID NO: 220646 - DNA, 1000 bp, Homo Sapiens; identical to SEQ ID NO: 115207

SEQ ID NO: 220647 - DNA, 1000 bp, Homo Sapiens
attaactaggagatcaagagataataatctctccccaaattttccaataataattgagactttttctttgcttgtttgtgtaattcaaccaaaagaatttcaatacccattcaaattgtcctaggtctatcagaaattagggaaggtagtcctgctttataataggaaaatgtatttctgtataagagttctttgctttcattaacttggattcatttaaaaattaatcttccctgttaggctgatttcagattctctaggaaatctgtgtaagtaaccagaagacctttcagatggtttatttgctttcagcagagaatttatttcatacagttacttaagagtgttgatgtcttgtgaacagagatataaggaaccattctccatccttccttatcatgctgggtacaatgcttctatgaatatttccatgtattttgactggggagaggcatggagaagaaactctcattcaggggctccaggatccttctccttgaggcttctaaataaatggcagaattcttgctgtattgccatgatgtcaccctggccatgtgtactgacttgaggagatcttgcaacatggccatgtgcaaggctttaaggagtgagagagatgtgtacatatcttaggagggttatctatgttatctgagtatatgtttgggtaaccaaattggtcttaaaaatgatgttaacccaagaagtagacatcaaaaattaaaaaaaaaaaaaggaatgtgttttcattgttttaagtttttcttctgagtaaaacaaaattatagaaaacaaatgcaacaatgtgcacatctgacttaagagtttcatttctgttattatatgtgttgcatgtagcttggcgatttactgtgtaatgaataatagactggaacatctaccaataactttcacataaatgttcaaaatagaagtgtattttttcaggtttctggaaataaatagtaaaataaatggcaaaaaaaaaaaaaaaaaa

SEQ ID NO: 220648 - DNA, 1000 bp, Homo Sapiens
ggattacaggtgtgagccaccgcgcccagccaagaataaaatactcttaagttgatctaatgaagtgtttccttaccattgtgattattgttactattatttgctatattttaatattgttgtttaccaaatattctcctttaaacagactcgctttttaaacttttttttttttttttgagacggagtttcacgcttattgcccaggctggagtgcaatggcacgatctcagctcaccacaacctccacctcctgggtttaagcaatgcttctgcctcagcttcccaagtagctgagattacaggcgcacaccaccacgcccaactgatttttgtatttttagtagagacggggtttccccatgttggtcaggctggtctcgaactcctgacctcgtgatttgcctgcctgggcctcccaaagtgctaggattacaggcatgagccaccatgcccggcctaaactttgtttttaaaatgaactttttttccccccaattgctgccaatagtggataacatgtatcactcactgccaaaaatagaaagtgaccatgaaaaataaattcgctggggaagggggctccatgctggtgtggccaaggctgagagctctctcttctctgttacaaaacgagataagcaagtgttagaattgccttaaggccacactggcatctccctgaccttctccagggacagaagcaggagtaagtttctcatcccatgggcgaccagggccatctcctcccaccagtggcccccactcacagggagctggcaatgccctacctgcctgttctccagatggagaaacaggctctgagatttcacaggtcttgcccaaagtcattgattttgatgattaaaaagaataaacacagtgtttcctgagtagcagtgattgttatgccttgctattttaataaagattctattttcgtataacattgtcaagtggaaacatgctgaaatctattaaaccatctttgtttgtggaa

SEQ ID NO: 220649 - DNA, 1000 bp, Homo Sapiens
tagctaattttagctatctgtaaccaagatggatgcaaagaggctagtgcctcagagagaactgtacggggtttgtgactggaaaaagttacgttcccattctaattaatgccctttcttatttaaaaacaaaaccaaatgatatctaagtagttctcagcaataataataatgacgataatacttcttttccacatctcattgtcactgacatttaatggtactgtatattacttaatttattgaagattattatttatgtcttattaggacactatggttataaactgtgtttaagcctacaatcattgatttttttttgttatgtcacaatcagtatattttctttggggttacctctctgaatattatgtaaacaatccaaagaaatgattgtattaagatttgtgaataaatttttagaaatctgattggcatattgagatatttaaggttgaatgtttgtccttaggataggcctatgtgctagcccacaaagaatattgtctcattagcctgaatgtgccataagactgaccttttaaaatgttttgagggatctgtggatgcttcgttaatttgttcagccacaatttattgagaaaatattctgtgtcaagcactgtgggttttaatatttttaaatcaaacgctgattacagataatagtatttatataaataattgaaaaaaattttcttttgggaagagggagaaaatgaaataaatatcattaaagataactcaggagaatcttctttacaattttacgtttagaatgtttaaggttaagaaagaaatagtcaatatgcttgtataaaacactgttcactgttttttttaaaaaaaaaacttgatttgttattaacattgatctgctgacaaaacctgggaatttgggttgtgtatgcgaatgtttcagtgcctcagacaaatgtgtatttaacttatgtaaaagataagtctggaaataaatgtctgtttatttttgtactattta

SEQ ID NO: 220650 - DNA, 609 bp, Homo Sapiens
ttctcttcctgctctccatcatggcgcaggatcaaggtgaaaaggagaaccccatgcgggaacttcgcatccgcaaactctgtctcaacatctgtgttggggagagtggagacagactgacgcgagcagccaaggtgttggagcagctcacagggcagacccctgtgttttccaaagctagatacactgtcagatcctttggcatccggagaaatgaaaagattgctgtccactgcacagttcgaggggccaaggcagaagaaatcttggagaagggtctaaaggtgcgggagtatgagttaagaaaaaacaacttctcagatactggaaactttggttttgggatccaggaacacatcgatctgggtatcaaatatgacccaagcattggtatctacggcctggacttctatgtggtgctgggtaggccaggtttcagcatcgcagacaagaagcgcaggacaggctgcattggggccaaacacagaatcagcaaagaggaggccatgcgctggttccagcagaagtatgatgggatcatccttcctggcaaataaattcccgtttctatccaaaagagcaataaaaagttttcagtgaaatgtgcaa

SEQ ID NO: 220651 - DNA, 524 bp, Homo Sapiens
cctttctcgttccccggccatcttagcggctgctgttggttgggggccgtcccgctcctaaggcaggaagatggtggccgcaaagaagacgaaaaagtcgctggagtcgatcaactctaggctccaactcgttatgaaaagtgggaagtacgtcctggggtacaagcagactctgaagatgatcagacaaggcaaagcgaaattggtcattctcgctaacaactgcccagctttgaggaaatctgaaatagagtactatgctatgttggctaaaactggtgtccatcactacagtggcaataatattgaactgggcacagcatgcggaaaatactacagagtgtgcacactggctatcattgatccaggtgactctgacatcattagaagcatgccagaacagactggtgaaaagtaaaccttttcacctacaaaatttcacctgcaaaccttaaacctgcaaaattttcctttaataaaatttgcttgttttaaaaacattgtaaaaaaaaaaaaaaaaaaaa

SEQ ID NO: 220652 - DNA, 1000 bp, Homo Sapiens
aggcagtggggacacatccagagtgctgaaagaacctcccccaggtcatcctatccccaagagtgatgcccggcagcattcccagctcagggctaatggttcacggaagccaggaatcaaactgcctgggttccagtcccagctctgccagttatgcccagctgtggggacttgggcagctcgtttagtagcaccgtgcctcagtttcccatatgtaaaaggccattttgagtgcctttcacagccctgcataaggcaggtgtctcagtgttcactgctgtctctccagctcttagtccagtagctgcatggtgagtgagcgtagggcgcaccctggaaggctgccaagcccaaagttgtgcagagcgctggggactccagactccccacagcagcagagactcgggactgaggcatcctctgttcacaggacatgctggcatctactgggtcagggctctgctgctcggtggctgtgcaaccttgggcaagttcctcaacctctctgtgtcttcgtaccctcatctgtaacatgcgtgtcgatagaccctactactcagggttgatgagaagattaaatgtgcaaaacctgcttgactgtgcccacaaatcctgattgtaggaataaattaatgactttttataaatattttgatcagatggactcagatgatcacagatgtcttcacatgcctatgactaatttgtacacaaactaatgctcgtgtttcccaagcacctggaagacatgccagatccatgtgcagtaatgcctggtggctccaggtctgccccgccgtcctgtggggctgtgagctttcccagcctcctgcccgtgtttgtgaatatcattctgtcctcagctgcatttccagcccaggctgtttggcgctgcccaggaatggtatcaattcccctgtttctcttgtagccagttactagaataaaatcatctactttaaaaaaaaaaaaaaaaaaaaaaaaaaaaaaaaaaaaaaaa

SEQ ID NO: 220653 - DNA, 1000 bp, Homo Sapiens
tgtactgtgtttacctccttttgtgttgtatctggtaattaaataggcctcagattcagcagtgacataacaaggacataatgtaagataataaagtaggttttatatattctttaaatttttacttatataatactttctagtttttccaccatcagctgaaagtttttgaaacaaatatttgaaaaccaggtatccacacatagcacttttattcctgactagttttgcacacttgaaaattgtttacttattttacaactgttttactgatgctatctttattgtttttgccgtattctgacatgtcaaatctatgccttgaattatatcatctcttttcctgtgggtttcatttgttaaattcattggattttaataatataaaagtatagctaattgttcagttttaactatttttaattatcttcttaacaaataagaagttgctttaaacattaaccaattttctatatttagctatacagagtaattgaacttaacatgtttttgtcaacaccaattacattttcagcttttaaaaatggtagcttttgtgaaatagaatcagtgaccagtatagcacttagatcccttctaactcatataatttttctcagccaatccattcacaagcttggcattgacatgtgctgctagtttataaactggcattgacgaaaatcatttgaatctcttctggctgagataatttgccaatgcaaaatacagttgtcattaatcctgcacattggaaattattagaaacatattactttttaactttaaatctcaaagagattttgagttattgaattcttaaggctttcttagcttgaactgataactatgcattatgaaccctaagtcaatatatttttggtggttttagtgatcagtaatcaaatttgtacttattatgcttgttcaggtaatttacttgactgttctatttgtttgtccaaaagataaaatgatgagagagaaaaaaaaaaaaaaa

SEQ ID NO: 220654 - DNA, 1000 bp, Homo Sapiens; identical to SEQ ID NO: 115223

SEQ ID NO: 220655 - DNA, 1000 bp, Homo Sapiens; identical to SEQ ID NO: 115224

SEQ ID NO: 220656 - DNA, 1000 bp, Homo Sapiens; identical to SEQ ID NO: 115226

SEQ ID NO: 220657 - DNA, 1000 bp, Homo Sapiens
tggcttgtaataataaaaagaatatttctctgtaatgcattgttgaaagacaaccagaatatcaagaaaatgtatataggaatatgctacttgcctcctccctgcatttcctcgtggggcactatttgcgacataggcctacagaattagactttcatacttagaagataaggtacactcttcttcttttatttatttatttatttatttttaggccattcttctggtttgccaaattctattaagacagtgatacatttgcttccttatttatgcatgcttagatcatgaacatgatgcccttcttttttttttttttctttggtcaagtagggattaatgccataggtttagagagaaggattgttttcagtttttaagagaattttttaaaaatacattttatggttctcttaaggaattaatattcacttctgaaggacttacttgtaatatataatttatcattttagccagcagggaaataaatcatttttaatccccagaagaaagtgctggaaatagcttctatatagtcagcagttcacctggagaaagatcttaattccttgttgttttgactaggaatatcaatatttggtataaaataactagaatagtttattaccttttccctcatgaaattttaaatatatgcaaatatatatatcattagattcctgtggtggataataatttcttcagattctaaaacaggtgtctagtgactgcttaattgtttccaagttgcatcaaagatgaattggtaaataatggaaatgagtagtgatatgaaaatggttatgtaactacatattacttgtttctggtaatcaagtcttattttttaaaagcctattgtttttcagaattgagatatttaaaacttgttataacttcttcctaaaaatagaagagaagaggaggtactgtgtgttacaaaaatttttttaaataaagaattcagtgtcactagttctaaaaaaaaaaaaaaaaaaca

SEQ ID NO: 220658 - DNA, 1000 bp, Homo Sapiens; identical to SEQ ID NO: 115227

SEQ ID NO: 220659 - DNA, 1000 bp, Homo Sapiens
gtaaaaggaatctgtcctattgggaaagtcactgcgacatgattaatggtacagatgcagcctcatttccaccttttgttgagaaaagccaggtattgcagttcttttcttctgatatttgcaggtcaatctatgctgtatttgaatccgacgttaatctgaaaggaatccctgtgtatagatttgttcttccatccaaggcctttgcctctccagttgaaaacccagacaactattgtttctgcacagaaaaaattatctcaaaaaattgtacatcatatggtgtgctagacatcagcaaatgcaaagaagggagacctgtgtacatttcacttcctcattttctgtatgcaagtcctgatgtttcagaacctattgatggattaaacccaaatgaagaagaacataggacatacttggatattgaacctataactggattcactttacaatttgcaaaacggctgcaggtcaacctattggtcaagccatcagaaaaaattcaagtattaaagaatctgaagaggaactatattgtgcctattctttggcttaatgagactgggaccattggtgatgagaaggcaaacatgttcagaagtcaagtaactggaaaaataaacctccttggcctgatagaaatgatcttactcagtgttggtgtggtgatgtttgttgcttttatgatttcatattgtgcatgcagatcgaaaacaataaaataagtaagtatgtaccaaaaaatattgcttcaataatattagcttatatattacttgttttcactttatcaaagagaagttacatattaggccatatatatttctagacatgtctagccactgatcatttttaaatataggtaaataaacctataaatattatcacgcagatcactaaagtatatctttaattctgggagaaatgagataaaagatgtacttgtgaccattgtaacaatagcacaaataaagcacttgtgccaaagttgtccaaaaaa

SEQ ID NO: 220660 - DNA, 1000 bp, Homo Sapiens; identical to SEQ ID NO: 115228

SEQ ID NO: 220661 - DNA, 1000 bp, Homo Sapiens; identical to SEQ ID NO: 115229

SEQ ID NO: 220662 - DNA, 1000 bp, Homo Sapiens
tcagaacgcctatttggagctggggggcctcggagaacgagtcctaggtttctgccacctctttctgccagatgaacagtttcctgaagggttccagtttgacactgacgatgtgaatttccctatcgataatctgtgctttgttgggctcatctccatgattgaccctccacgggcggccgttcctgatgccgtgggcaaatgtcgaagtgctggaattaaggtcatcatggtcacaggagaccatccaatcacagctaaagctattgccaaaggtgtgggcatcatctcagaaggcaatggacctatgagcagaggaaaatcgtggagttcacctgccacacagccttcttcgtcagtatcgtggtggtgcagtgggccgacttggtcatctgtaagaccaggaggaattcggtcttccagcaggggatgaagaacaagatcttgatatttggcctctttgaagagacagccctggctgctttcctttcctactgccctggaatgggtgttgctcttaggatgtatcccctcaaacctacctggtggttctgtgccttcccctactctcttctcatcttcgtatatgacgaagtcagaaaactcatcatcaggcgacgccctggcggctgggtggagaaggaaacctactattagccccccgtcctgcacgccgtggagcatcaggccacacactctgcatccgacacccaccccctctttgtgtacttcagtcttggagtttggaactctaccctggtaggaaagcaccgcagcatgtggggaagcaagacgtcctggaatgaagcatgtagctctatggggggaggggggagggctgcctgaaaaccatccatctgtggaaatgacagcggggaaggtttttatgtgcctttttgtttttgtaaaaaaggaacacccggaaagactgaaagaatacattttatatctggatttttacaaataaagatggctattataatggaaaaaaaaaaaaaaa

SEQ ID NO: 220663 - DNA, 1000 bp, Homo Sapiens
aatgtgggagaactttcagtcaaaaatcaagccttagagaacatcagaaagcccacccaggggattaaatgtatgcatataaagaatacgaaaaaactctgagctggaaatcaaacctcacaatacataaatgaacacacaggagagaactgttaacatagtgagcactggaatttcctctacaatttcagcctccaccaaatatcaaagaatagaagataaattgttgaaatctattttatatgggcattctttcagccagagcccagtcttctatggatatacagaactcacacagcaaagaaaccctataaacataatgaatatggaaaatactcttgcgaactcactcctcagaaaactcacgctgcagaaaagctctgagaaagtaataaaaatgtgaaaactttgtgccaacaatcaaaactcattcaccatcagagaaatcacacaatgacaaaagctagaatataataagtgtgtgataaactttaatgaaaagtcagtacagcagaaaatacattcaagatagagacctcatagtatattaaaacaaacaagaaatgaagttaatggatgtgggaaattcttctgccatgtcaaccctcattttaacctacacagaggtaatccctatatgtcgtataataactattgaaatgttcactagtaatcattttcacttctccctcatgccacacctggcctaaatttctcaaccactctctcatctaaacggggtcatattgttaccctctagctagtggaatatggggtcagtgacaggtcttaaatacatcagtcaaattctcaatattttcttctatccctcattagaatggaatggaggaaaaccttgggactcaggctctgatgatggaaagtacaagatggtaggaacccgggtcagagaaggatcctgtggcatggagttttctcctccctgtacacagttggacttcttgcagtgaggaaataaatgtgttccctgctgaacttc

SEQ ID NO: 220664 - DNA, 1000 bp, Homo Sapiens
aaattaaagcctcaccagcaaaatccacctcccatcccagcctgtttttataaataagctgtgttggaacacagccaatcccattcattcacacattgcccatggctgcttttgcttgacaacagcatagttgagtagtagggacaagaccatatgacctccaaagccagagatattaactgtcaggccctttatagagtgattcacggagacccccataatagaggaaaatacaagtggccaatagcacataagaagatgcccagtattacagccaagaggaaaatgcaaattacacccacagtaagataccattatgcatccattagaaaggctaaaattaaaaggactgacaacaacaagtgttgacaatggtgggtaacagcaagagctctcatacactgatggttgaagtgtaaattggttcagttttggaaaagagtttggaggtgtctactacagttaaacatacatatttccatgccccagaaactcctgggcatattctcaaaagaaacgagggctgtggccaccaagagacatgtgtgagaaaggtcctagcacctttatatatcatagtcccaaacagaaaacaacacatacccatccacgttaggatgaactaaataaattggggcatatgcattcaatggaatagtacatagcaatgaaaaaataaactgttgccccatgcaaagatgttttacagacataacgttaagcagaagaaagcagatctcaaggagcccacattgtacaattccgatctatatgaagctcaataacacatggtactagaagttgtaatagcagttacctgtaggactggaggtttgtattgaaagagaaggaacatcaggaagtctgctggagcctggaaatgtctgagatgttgctctgggaggcagttgcatggctgtagacatatgtaagacattattggatggtatacctgagattggagcacctacaatagaaggtacagtgttacatctcagtg

SEQ ID NO: 220665 - DNA, 1000 bp, Homo Sapiens
aattcaaaagcccttcatgctaaaaactctcaataaactaggtattgatagaacgtttctcaaaataataagagctatatatgacaaacccacagccaatatcatgtggaatgggctaaagctgttgacctgatagatatgggttcaagaggacacagctgaatactgtgcttaggaaaagaacagtttcaaaggctttccagattgtcagatttgatgatatcctccttggtgcacacctctcttggctatggggcacataaaccacctctaccaatctaactggtttgtgcagtttttctgattttgtatctaccggcaaaatatatcttaagccatttttaggaaacaggaggtttagtcacgtgctcaacaaaagcacaacaaatggggagcatttaatggtgtaagggctgtgaggtgtagctgctgaaactgtagctaggagctgccttgctgccttcttgcaggcagattggtcagatgagccaggctaaaatacaattaatatctaccattgtggtttaatatgaaatatggatacctggtctttgtctcagttcttgtcatagagttccccaaacctttagaacttcctgagtggtaggaatatctcattagtgataatgagcccctttgattcgataactcctgagtttatgctaatgaggttacttaatgtggggccctagatattcttaggatggggctagttcccggaaagaccaggtcatttgaggattagagggttggaacttttagctctacccactgatctctgggtggggaaggtgctggagatcaagctgcctaaaaactcttgaacaacaagatttgaggagcttccagtaaatgcgtccacaagctgggagggcactgcaccccagtttcactgggacagaagctcttgcacttggaatctttccagacctagcccttcatgctgcttcatctggctgttcatctgtatcctttataataaattggcaaatgtaaaggt

SEQ ID NO: 220666 - DNA, 1000 bp, Homo Sapiens; identical to SEQ ID NO: 115233

SEQ ID NO: 220667 - DNA, 1000 bp, Homo Sapiens
gcaagtttgaggatgacatgagaaccttgagggagaagaggactgagccaggctggagcttttgtgaatatttcatggttcaggaggagcttgcctttgttttcgagatgctgcagcagttcgaggacgccctggtgcagtacgacgaactggacgccctcttctctcagtatgtggtcaacttcggggccgggggtataaaatgtcctttccacaactcagtggcctgctggtgatgcttcgattctgtccctcgttagaatcagagtggacgtccctttgccttccatccaggggttatctttggaatgctcgagtgctcattgctgtgaacttataaaatgcccttgggtgttcatctttcttttgcacttttaaataatatcttaagctcctttacaattaaagaattagcacagtgaaaccatacacagagagaaacattggttattgtcctcagtgtttttcgctgatacttattttgatgaaagtgataccacgttatatagctgtttctctgtcgctcctttttgttactcacagcccatcctgggcatctctccaggttagcaggtggggtttggagttgtttttgttacaattggtattcctggcttgattccattacctggtgttggacattgggttcttttatgcttcttgccaccacaagcagtgctgtagtgggcatctctgccaggtgttctttttgagaacccttgtcaccatgtgtgaaggaaggagtaattttgaggagccctggtgtcagcaggagaacctggagggagatgaagtgtggggacggtcagttctagctgtgagcactgtcctcactctggaactcatcagtggcgccgatggatactggctcatagtgcttctgaagatcaggtctggatatctcactctcctgagatgccagtatagacacagaaccaaagcaaagtgtttactaagtaaaaaaataaaataaaaaaacacttctatttcttataaaaaa

SEQ ID NO: 220668 - DNA, 1000 bp, Homo Sapiens
ccggacaccccgctccccacggcgcgcgccccccgcgcacccgactccggcgccctccggattggcctgcgctcgagacgtcaggcactggcggcgggcgcggggctctggtgcgcgtgcgcgagcgtcccccgccccctcccagcccggcgactgctcgggcccggccgccacctgcacggcgggggagccgctcgccgcgggagcgtcaggtgaggggacgcccgacccaaggtcaccaggcgtgggggcgctgggggatcggggaccatcccggctctgaccctggtgcgctccgagaagggcgtgggtcctggagggggatggggaacgcggaggccacgccctccctgagcccggccgaaaatcaaccggctctcgtgggtagcagaggaggccgtgggggatacaggcaccaggtcgcagcgctgcagaggtgcgcaagggccgcccaaagaccagcttgggcctcgcactgcgcccgaggcagacacagggcgttccatcctcttccctccccgctcccgcacagaggggcgcccaggaggcagtgacagtcgtcgcggaatcctgcgtgtgacaccccgcccctgcccagcggattagggagttgtcctctggtaaaaggatttctgggctgcttccagcttggggccctcatccctgccctggcaggcctttctacaccgatctgcatctagtggggggtcagcgtgagcagcagcgccgtgagttctgaggccaagaaccttctccacttgagaagccttcctgggggaggctgagtgggccaggcctggagccacgtaccaacactttatacccaggggaatggatcccaagggcccagataacgcccccaacttcttggggttcacacgcgtcctgagacatctgggaactgcctctgcctgggccaaagctattccattaaaactttattgctgtgcttaaaaaaaaaaaaaaaaaaaaaaaaaaaaaaaaaaaaaaaaaaaaaaaa

SEQ ID NO: 220669 - DNA, 1000 bp, Homo Sapiens; identical to SEQ ID NO: 115237

SEQ ID NO: 220670 - DNA, 1000 bp, Homo Sapiens; identical to SEQ ID NO: 115242

SEQ ID NO: 220671 - DNA, 1000 bp, Homo Sapiens; identical to SEQ ID NO: 115243

SEQ ID NO: 220672 - DNA, 1000 bp, Homo Sapiens
caactatctaaaacctaattgcaaattgaccacagacctctaacctcctacttttatagacttgaatacttaagtaatttaaattagggttggtatttcatttttttcttatctaaatcttagtttcctggaataataaagtttgatgttcagcaagagaactgcttgagtttaagccattttcaaaagaaacttgccttttacattattgtgttccagaacattaagtgactgtaggtactgggtattagtgatggtaaactttgtgttgctctttatgaaatgatccatataactgttgggtgcatcagtgcttttcaaaggggctgcttactatagggttaactatgtatattcattgttaagagttaacttgtggtttggctgtttcctggattttataacatacatgtgcagaaatgtattcaaatgaaaggaagcatacctttatcaagatgctattaaaattgaacatcaagtataatatttcatttggattctcttttttggttaatgcctaaaaatgcctatttgggatttttttttttttttaaattaagagaagctctcttctgtgtagaacagttgttccaaaatagcttagtgttttgttttcctgttgcatgacagatttaactattctttccagcagtggaggtgctgtcagagtccagtgttctagaagaggcagtgtctaaagcctaattttacttttctaattctggtagctattaccaggaatttttgaaagttttgtttaagtagtctaatattttttatgtaaagagcattaaattttgctatgtataaatttttgtaacctaacagtgaatcaatattttctatcagtgccaagggcttcctgtagttctattcaagtgttacaataaatatttgtagataatagtcaatacttgtgtatgcttattttaaagatctatttaggtggaaatagttgtggatgtactaagagtaatgaaataaaattatagcttcaaaa

SEQ ID NO: 220673 - DNA, 788 bp, Homo Sapiens; identical to SEQ ID NO: 115246

SEQ ID NO: 220674 - DNA, 1000 bp, Homo Sapiens
cggcttgaagctctgacactgtcagagaaagtggatttattgtgtcataggagtttctgggacccagctcttcctgagaggggtgggaagattggggatgggatcctcactcagcagtctgggtagggccctttgaggcagagggtcttcggccagtgaagagagatttattctgcttctgctcagagtgctggggtcccatcctttctccctggctgccctgttaacagatggtgctggaccttgccccggaaggggcttgtagcttttttacgtcaacgaaatgccctcctgtactctgtcttcagcagccaactcctggagctgccaagtgaggggttaaagaagaggtggggaggcagtgtggctccctgggaaaagtctgttgctttggttctcagtcctgggtattctaggagcttggacacgggattgcgtttcctgtgctaaaattctctctcctggctgggctccggtaaactgaagctgctcgagaaatcacctgggaactctcatagccgtttgtcacccagggtgtacttgccaggacctctccttgctactcttcccaaagtcgggaggcaaagcggctgggtcaccagagcctgaccatactgacgctccagggggaagacgcagaggccgggaagagacaccccctcccaaacacataaaacttgccccttcctagcctcggctcccctcactggggccttgggcaggaccgacccgcatccaactaggcctaaggggtaggctctgagcctcttacccctaagaggcggagatgcgcccaaggcgggcgcccggcctgttccccagccctgcctggaagccccgcagccactgcattttgtttaaacacagatagcacgggcctttctcttattgctacagtgttttgtacacggttaaaacactagtaaagctttttcgttattaaaaaaaaaaaaaaaaaaaaaaaaaaaaaaaaaaaaaagaaaaaaaaaaaaaaaaaaca

SEQ ID NO: 220675 - DNA, 1000 bp, Homo Sapiens
actaacagagcccaactttgaaaataaacatggatatggaatctgtcattccgacacaaactcttcttgttgcacagagcctgaagacactggagcagaaatcattcacgtctgattgtgtgcgggttgtcattttcctggacatccatgaagagctgaaggaaattgtttactgccaattgtatacctttcttatgtcctttaatagcatagactggacaggtgactatttatagtggcttctctttttctaaaccctccttagtctcctagaaaaccttcctgtgggccaggcatgcctgggtcctgcctctgcctggcagctctgtgggaaagtggaagaccccatgatgacatcatggggagccagcagagttcctgcccatggtcttgagctgaatgagagaataaaatgccaatcccaagggaagaggaggagcaggggtgcccaggccctgatacccagccgcctccagcttgcagtggtccccagcctggagcagagcattggggagtgtctagccatgacgagaagattccctctgcatcacggcgaaccccaggagatggtattgaaacagacccccaaacacagactcctgcctgccctctgccgatgctgcctcctccatgctcttgagcaggtggagccatggtgctctgtggtggcgcatgattcactgagcaaacagcactttacagaagaaaatctttattttgtaatatgtgtgtccagcgggattgacactcaaaaaaagtctcacttagaaatcttcccttccttacctttgtatctcctttacatcatgagagatcaaaaatccattttgccttacatatgctaagaagcgtggcattctttctgttcataaaacagactcatgacttttaagacaggacaagcaggccagaggctttttttttaatcacagatctcatgggaattagtggatgctaaatggcaattaaagcatgattcctatgcaaaaaaaaaaaaaaa

SEQ ID NO: 220676 - DNA, 1000 bp, Homo Sapiens
cccacaaggacctgcttgggtgagaccacctctcccctctcagcagcgctggtgggctctttgtcctggtgcccaggagccctccagccccctgcccacagaagggaaggcctgcagagggggccaggatctacctaaccatttccccacccctaagtccctcagtgggctttgccttataggtgccacagggcacagctccatcattgccactggtttttcctaagtcatgcaccaaggacttcagaaagttcttcctccgagtcagtcagtggtgccgggaccccagggcagcctcctcgactcctgaagaaaaggcagtgcccgtggctgcctctgtcttcactcgctgttgatgtgaccgccaggcctcctctcgtaccttggacaaaggatacacctgaaccagaatagttttcttaccctcacattgaaatgaggattttgcttaaaacagcacttgccgccagtgggaggagggaggttttatttattcccacagtttctcctgggccttctggaatgaccatgttttcctgtggcggtgggtgtgtcattgcgcccgccgtcttccaaagccttacttccccaagctgccagccaggaggtgataaccaccctcccagagtttctctcggctctttttttaaaagtcccccaacaaataggattcttgctgggaaaggaagttcggtaaggaaatgtcaaatctggtttttaaacaaggtccaaccctgcaatgaagcagccacttcagcccagagagattataagaactgatgtggccagagtgcctacccactgtggccccggtgctctgcccccacgccccgaccatctggtcttggtagatgtccctagacgggctgagccatgtgcaataagaacatagatcctaaaggatcctctggaagctgtatttcttgaattagaattctcaaattgtacatctgttaatatatgtttattatgtgactggcaaaaaaaaaaaaaaaaaaaa

SEQ ID NO: 220677 - DNA, 1000 bp, Homo Sapiens
aaagaagagacatcgaatcaaccaataagaagagcccaaataagcatcctcaaatcttttgggatttggcacttggggacatgagtagttgtctgggatacgtcatattctcaacagtttctttgtagtagtaggatcaccttcttataataggatcaccttcttgttgctatagctgtacccgaccttcccttctcccttgagtgcttgcatgagctccacttttccttttgcttgaacagcttctcctgagtcctccttaccgatggttgtgactttaattatatacatctctgtccctccagacagatccctctgtcctcactctctgatttcattgaggatcttgggtgagagagagggacctgcaggatgaacaaatgtctactctaagacagctagattgggaggttggctggtcactgatggttataatgactgtgggacaggattaacttcagaataaatgaacaggagacacagatatgaagaaagtttctgattgatatggtctgaagtactcctggtattgcaagtcatttgctctaattctcaattgtaggcaaactgatttgtaaatttgcttcttcagccttctttcctgtagcctagcatggagaatctgaccagaccccattttgagaaggtcagcctacactggaatgaactttttacattagggcatttgtatttccctcacaatacttgccacattacttggcataggagagatgcttagtgtaattataagttaacaagcctttggatcagggcttgactcatgatagacaaagtatatgcctgctggatggaagaatctcttgggcgagcaccatttttctttccatcacctttccttgaaaatatatcttcagctttgggtaggaggaatcttggtgtatgaaatcattgcaaatttacttcatcttttctggagtttgaagttgtgactctcctgctaccaattaaataaagcttactttgccataacaaaaaaaaa

SEQ ID NO: 220678 - DNA, 842 bp, Homo Sapiens
atgcagaccttcccagttgctggggcgctggaccctgctatactggacacaaggtttcttccccagggaacagagcttgagcggggggccacccccccgtcctaccggagttctgaggtgcggtcaggcgcggagagcggacgcccagcgccagattctgtgggctccggagttcaggcccactgagccgcagctgagcacaggcggggcaggaaaaaggatgaggtaagtttgttcctgtcaattgggaaccccctcaaccacttccattccccaaatacctgcgctgctaccgatgcctcttggagaccaaggagttagggtgccttctgggatctgacatctgcctcaccccagctggcagcagctgcatcactctccacaaaaagaacagcagcggttctgacgtcatggtgagtgactgccgaagtaaggagcagatgagtgattgttcaaatacccgaacttctccggtgtctggcttctggatattctctcaatactgcttcctggatttctgcaatgaccctcaaaacagagggctctatactccttagtgtgactgcagcaaactttggtgtaaaattccaccagtttccagccaccttcctgacttctatctgggcttggccaggacttctagtccctcataccagccctccttgcctccctccagccactggaccccagccttggctcttcctcttggttgacgcccttcagcacacttactgctactctgtacccccagccctactgcccaccaggtttcctctcttgtcccctagtccctggatgtttctcccaaataaatttgtgtgtaaactgttaaaaaaaaaaaa

SEQ ID NO: 220679 - DNA, 1000 bp, Homo Sapiens
aaaaggggggaacatctctttacccagactagacctagcaaaaccctggaaggatattgaggtctggggaaaagggaggactttgcattttcccaatgcggtctcttggaccatggcttctactcctgaagctgggtggcctggcctggcctgaccaatgagaggccagaacactctggaacatcggaagaggagttctttgctatgttccaagccatctactgagggaggcagaaaggccacaacccaccctaggttgatgtatgggagctaggacagtccccatggcaatggggctggagcatccctcatctggaagaatcccatactgatggcagggctggccagggggaagagggtagtatctgtgggtcctggcctttcttcatgtgtgcgtgcatatcagcccgtgtggctgactgatgtataggtccctggcatcctggttcatatctgtgttgctgactacagtgtctgtgatgtccgcatgtccaggcctgtttggggttgcctagcgactcttctggcacagggtgtgtctgtggtatacctgtgaggtggttgacaattagtagtttaatcacagggtgtgtgtgtgtgtgtgtgtgtgtgtgtttatgtgcacgcatgtatatgcatcaccacgtagccaggaggggcctgttggggtttgagtcactgggatcttcctggtgagaggtaagagaagtcactgggcttagctgggcctctgaggcctgtatggaactcttggttgctgaggcaaccatggacctgttgctaggagatagctggggaaggcccaaggccgcccagggcagagagaggagacgaagagtttgggacagtgggggaggagatgggaagggatgggatttctgggtcccagagcgggtgggatactcacgcacagcttcttcactggtggggggtggggcacacattatttctcactggtcatgatttacaagaagaaaaataaaactgcttttggaaccac

SEQ ID NO: 220680 - DNA, 1000 bp, Homo Sapiens; identical to SEQ ID NO: 115257

SEQ ID NO: 220681 - DNA, 1000 bp, Homo Sapiens
gtgggggcagagctgagcatggcgtgtacttggccacagaagtcttgctgtggtgccgctggacccctgctaggaggacagggtcccctctctcacgaagcacacggacctccagagtccctgcccctgcagtcctgggagcctgcagttggggctggagttggcctctcggagccacccaaacggagaggcccatgagaggggagctcaggggtccagcagaggctgacagagtggcctctttgtcctgttggcggcccctgctcatgcctggggcgtcctccctggagctgggggagctcagggacccccaggtctgtgtggctgcccctgccactccaggcacagcggcacggccctcactctttacctatttggaattggaggcaatgagtggcaagaacatgatgacagacacgggaggtaaaaatatgttcactggctgttccctttataaataagaagtggtgggacttgcgctgctatttttaaatagaccagagagtacactggagaaggcattgagtggttttattttaagtggtggaaaaaatgatgagaatctcctccagatgacagctccggaagtgtcgtgcctgaacccctctcacagtctggcgggcgcagagtctgtgagcggccaggaggccacctgctcgactggcccgtcctctccatgtgccagatgcagcccagcatgacactgccctcagctcaaaaacagcacagctactctgtgtgcaggaaaaaactgccagtgacttcaccaggatttgagaacggtccgtacgttcacactaagctgagacagcgcaggttagaagatagcgcggggaagtattcacacttcagatacgaccatcacggccacatggctaaggcccacaccctcccggggtgaaataactacagcagaagaatggggcgctaaccacctccacgggcattttaaataaaacccaaagttgttttgtttttttaagaaaaaaaaaaaaaaaaa

SEQ ID NO: 220682 - DNA, 1000 bp, Homo Sapiens
actccaaatagttccagctggccactcagaccagggccagagttaacttctcaaacaccagccagctgaaaattagggttctcgtgcaggcaagtgcatggttgacacacagccctttggtgacaaagctgggctttgcctgcatagtgcagacaaggctgttggttcagaggctgcagggcacattccaggttggggccttttgtcggtcggaattcaataggacattccctggctgtgggtgtttagggcaggaattacaggcttgcagagaaagtcagaggcaatgagatgctcccagtgccaaactgtgacactgggatcagggtggtcattcccttgggtcagagtgggaccctagagccggagtgagctgtgggtggcctgggtgtgtcctgtggacggcggagactgttgatttggatgttgagctctgagtcagtttcagaaccaaggatctcaggctgagaaggccaggtccccatgggagcggcaggagtctgatggctctgctgccagagcctaccccagcctgccacgccgctgaccttcccatggtaaggaaggggcaggcagcatggttcccaccctcagctgccccagacccacacatccagccccaagagcagcctcacccaggcacagtgcagggcattttagctcctgggaggggagatgcctttgtgagtttcagatgtcagaggagaagctccgagagagtaagtcatgtgcccccaaacactcagctcctaagtggcaggacaggcaagtggccaggttgggccgcccccacagcctgtgccgtccacacactcactacagcactcccagaagaaggagcagaatcgcatgcagcccagagcaggtcctgtggaggggtcctcacccctcaggagtaatagggtgattatgtcacatgtttagtgatacaatcccacctgtgtctggattgtgtcactaaacatgcaacatggattgccatctcttctccatcccctcg

SEQ ID NO: 220683 - DNA, 1000 bp, Homo Sapiens
tctaaaatcttaaaaaaagatgcatatagtgaaattttttaaatggatatacttttaataaagttttataactcactgacaaaacatatttcaatagtatatgagtatgagatttcttatcaattatgagtgaaatattctatctgaatgcattggaaggcatttacagtatttgctttcaacagttactgagtatgacattttagcatgaaatatatcaaacacatcatttgaaggacatatgtaatcttgactatggttatggtttttttgtatgtattccttgttttcatattgatagcatctaattcttttgacaatcttaatatgtaggttcatttaaattttaagacagttcagtgcatatatagtagaagccttaagaaaaaagaaaatgagcaagcaaatatttgaagaaatgtataaaaccatagatttctttcagaaaaaaaaaacaggcataggaacagttttctcttcatatattatgattatgaataataggaaagttgtattaattcagtatttgtcattatgcagtattttaatacctacataagtctattccattattatattttgcgcttggcatatttattcctttatgcttttaatcactaacatattttacttaagagtataaaactatgctaaataaattgtattgtatatggaatatgcttgccattatgaagaacagctgggtataccattatttcaagtaataaatctgaattctattagtttaaaaattgtaaaattcaagttaaatgacgtgtatgatatataagctgaacacattttctatagcccttaatttagttgtgttaatttttcaaggtgatgtatcaacagctttttttattttgcatttgttttttcaatgtgtttacattgtatgaattgagctttttgcccacagattcttgatttgtagttgtttggcaggatttttctttgtgatataatcacttctataaaaaatatgatgtacaaaaaa

SEQ ID NO: 220684 - DNA, 1000 bp, Homo Sapiens
ttgtcatggatataaaagttcctatgagaggacctgaattttggagaataattaatggagatactatgaaaaaggagaaaaatgtcactttactttggaagcccctgatgaaaaatgactcattgtgcagtgttcagagatatgtgataaaccatcatacttcctgcaatggaacatggtcagaagatgtgggaaatcacacgaaattcactttcctgtggacagagcaagcacatactgttacggttctggccatcaattcaattggtgcttctgttgcaaattttaatttaaccttttcatggcctatgagcaaagtaaatatcgtgcagtcactcagtgcttatcctttaaacagcagttgtgtgattgtttcctggatactatcacccagtgattacaagctaatgtattttattattgagtggaaaaatcttaatgaagatggtgaaataaaatggcttagaatctcttcatctgttaagaagtattatatccatgatcattttatccccattgagaagtaccagttcagtctttacccaatatttatggaaggagtgggaaaaccaaagataattaatagtttcactcaagatgatattgaaaaacaccagagtgatgcaggtttatatgtaattgtgccagtaattatttcctcttccatcttattgcttggaacattattaatatcacaccaaagaatgaaaaagctattttgggaagatgttccgaaccccaagaattgttcctgggcacaaggacttaattttcagaagatgcttgaaggcagcatgttcgttaagagtcatcaccactccctaatctcaagtacccagggacacaaacactgcggaaggccacagggtcctctgcataggaaaaccagagacctttgttcacttgtttatctgctgaccctccctccactattgtcctatgaccctgccaaatccccctctgtgagaaacacccaagaatgatcaataaaaaaaaaaaa

SEQ ID NO: 220685 - DNA, 1000 bp, Homo Sapiens
cccgcctggatttgccccgtaggcccggcccgggcccctcgggagcagaacagccttggtgaggtggacaggaggggacctcgcgagcagacgcgcgcgccagcgacagcagccccgccccggcctctcgggagccggggggcagaggctgcggagccccaggagggtctatcagccacagtctctgcatgtttccaagagcaacaggaaatgaacacattgcaggggccagtgtcattcaaagatgtggctgtggatttcacccaggaggagtggcggcaactggaccctgatgagaagatagcatacggggatgtgatgttggagaactacagccatctagtttctgtggggtatgattatcaccaagccaaacatcatcatggagtggaggtgaaggaagtggagcagggagaggagccgtggataatggaaggtgaatttccatgtcaacatagtccagtacagaacctgctaaggccatcaaacctattgatcggaagtcagtccatcagatttgctctgggccagtggtactgagtctaagcactgcagtgaaggagttagtagaaaacagtctggatgctggtgccactaatattgatctaaagcttaaggactatggagtggatctcattgaagtttcagacaatggatgtggggtagaagaagaaaactttgaaggcttaacgatgtcaccatttctacctgccacgcgtcggtgaaggttgggactcgactggtgtttgatcacgatgggaaaatcatccaggaaaccccctacccccaccccagagggaccacagtcagcgtgaagcagttattttctacgctacctgtgcgccataaggaatttcaaaggaatattaagaagacgtgcctgcttccccttcgccttctgccgtgattgtcagtttcctgaggcctccccagccatgcttcctgtacagcctgcagaactgtgagtcaattaaacctcttttcttcataaattaaaaaa

SEQ ID NO: 220686 - DNA, 1000 bp, Homo Sapiens; identical to SEQ ID NO: 115260

SEQ ID NO: 220687 - DNA, 1000 bp, Homo Sapiens; identical to SEQ ID NO: 115261

SEQ ID NO: 220688 - DNA, 1000 bp, Homo Sapiens
aacattgaaggttgatattttatgtggaagaacatttgaattgaattcagaatttttctgaaggtgtagatactttttttttttttttaacagaaaacctgatgtcaagaggtgggcaatagaaatggaaacaaattgtcttcctcaataattaagctactttctctttttcccttcttgttttaatctagtgggttttttattttattttttcttagaaatatgtaggtaaggtttatcttgaatcttaattgccttaattttaaggacgtcaaaggctctcgaggcaagctgtcaacgtcttgttgaaaacaaaaatcaagaaagaattgaaatactgtgccggctttcactggcacagaagtttaagactatgagtttttagggtgaagaaaaaactgtacagtttaaatgaaaatgtttttcttcatttgaagaaaatttgttgataaaccatggcaactgcaagaattggaaaaatgctgggacttttcatgaactttgtcttaagtgttgacatgaatcattctaaaaggctaaaacattttacagtaaagttattaaggttggtttaaaaacaactgcattagaaataatgcgtgtttggggggcagaatgcagatttttttaatttacaaagcgtgatcgctagcaaaagcattagtgctttttatctgcagtcttttttatgagctttacaaagtttttagtcagctttgcttgtcacattgcaaaacctagcttaagagcattaaaaaaaaaaacttaagtagataggagcttatggtcaaaaagtgcaaaaaaaaaaacaaaaaaaaagcaatagatagagaaattgttgacaatttctgtagtctttcctagttgtgatcaaattcagcctatggatggcctattttataccaaagatgaagtgacaccctattacagtccagaagatagaggttgttttcgtttcttttctttttaaaaaaaaaaaaatttatttgaccgaaaaaaa

SEQ ID NO: 220689 - DNA, 1000 bp, Homo Sapiens
actgtgcctctgggagactcatttgacgaggaataatctggcccactttcccaccctgaaattggtttccagaaatgaaagcgatggcctgaactacattcccaaaatcgcggaactcaagaccgaattccagaaaaggctgtctgatttcaaactctacgaaagcgaactgactctgttcagctccccgttctccacgaagatcgacagtgtgcacgaggagctccagatggaggttatcgacctgcaatgcaacacggtcctgaagacgaaatacgacaaggtgggaataccagaattctacaagtacctctggggtagctacccgaaatacaagcaccattgcgcaaagattctttccatgttcgggagcacctacatctgcgaacagctgttctccattatgaaactgagcaaaacaaaatactgctcccagttaaaggattcccagtgggattctgtactccacatcgcaacgtgatggagagaaaactcctggcagggccctatggtgggaaaggctggagtcttctagtcccaagggattgggagatgacaaaatgaattttttttttcttttttgagatggagtcttgctctgtcgcccaggttggagtgcagtggcgtgatctcggcttactgcaacttccagctcctgggttcgaacgattctcctgcctcagcctcccgagcagctgggactacaggcatgcgccaccatgcccggctaatttttgtattagtagagatgaggtttcaccatgttggccaggctggtctccaactcctgacctcaggtgatccacctgcctcgacctcacaaagtgctgggattacaggcatgaaccactgtgcccagctgacaaaatgagttcttaaacttttttttttttcagttttttttccactttgaatcagaaatataatctgcagtatcatacttgtttatattacattgtatgcctcactattcattaaaaatcaagaaagttttattgta

SEQ ID NO: 220690 - DNA, 1000 bp, Homo Sapiens
gttctcttctttcttcaagagtttggtcatcgagctggacaaagatctttatggccctgacaaccacctcgttgagtggcatcggacacccacgacccaggagacggacggcttccaggtgaaacggcctggggacctgagtgtgcgctgcacgctgctcctcatgctggactaccagcctccccagttcaaactggatccccgcctagcccggctgctggggctgcacacacagagccgctcagccattgtccaggccctgtggcagtatgtgaagaccaacaggctgcaggactcccatgacaaggaatacatcaatggggacaagtatttccagcagatttttgattgtccccggctgaagttttctgagattccccagcgcctcacagccctgctattgccccctgacccaattgtcatcaaccatgtcatcagcgtggacccttcagaccagaagaagacggcgtgctatgacattgacgtggaggtggaggagccattaaaggggcagatgagcagcttcctcctatccacggccaaccagcaggagatcagtgctctggacagtaagatccatgagacgattgagtccataaaccagctcaagatccagagggacttcatgctaagcttctccagagaccccaaaggctatgtccaagacctgctccgctcccagagccgggacctcaaggtgatgacagatgtagccggcaaccctgaagaggagcgccgggctgagttctaccaccagccctggtcccaggaggccgtcagtcgctacttctactgcaagatccagcagcgcaggcaggagctggagcagtcgctggttgtgcgcaacacctaggagcccaaaaataagcagcacgacggaactttcagccgtgtcccgggccccagcattttgccccgggctccagcatcactcctctgccaccttggggtgtggggctggattaaaagtcattcatctgacaaaaaaaaaaaaaaaaaa

SEQ ID NO: 220691 - DNA, 1000 bp, Homo Sapiens
atcagcaagcttgaagataagacaattgaaattctctagttcagtagcagaaagaaaaaaaattatgaagaaaaataaacagaactttaaagatctgtgagacaacatcaagcacatgcactttgggagtcctcaaagaaaggagagagagaaaggagaagaatgactatttaaagaataactccaaaccttccaaatttgatgaaaaacattattcatccaacaaacttgacaaattttaagcagcaaaaaaatttaaatttaaagaggtccacaccaagagaacattataatcaacctgtcaaaagccaatgacaaacagagcatattgaaatgaataacagagaaggaacttttcaggttcaatggatcctcaataagattgcagcccagttttcttcagaaaccatagagttcagaaggcactggaatgttgacaaatttagaggtcagaaaaaaaaagactgtcatgcaggaattgtgtgtctggaaaaactctccttcagaaataatggattttatatatatataaatatatatatatatatatatatacacacatatatatacatatatatgactatacatagtaccacatatatataactatatatagtactactatgaaattatatatatagtactatatatagtagtcatactataaaagctagtagtaatatgtatatttttggtgtttatatgtgtgtgtgtgtgtgtgtgcatatatatatagtactatatatagtagtcctataaaagctagtagtaacatgtatatttttggtgtttaattcttcctttgtttttcctatttggtttaaaagaaaatgcccattgactaatgaatgaataaacaacatgtagtgtatttctaaaaaaaaaaaaaaaaaaaaaaaaaaaaaaaaaaaaaaaaaaaaaaaaaaaaaaaaaaaaaaaaaaaaaaaaaaaaaaaaaaaaaaaaaaaaaaaaaaaaaaaaaataaaaaaaaaaaaaaaaa

SEQ ID NO: 220692 - DNA, 1000 bp, Homo Sapiens
gctactgggttatagggttacagaataaatgtaagtatggtgtctttgaagagtctttgtcctctgatcccgaggttttgactctctccatggctgtgcctccctgccgtgttggggttttcctcgactatgaagcaggcattgtctcatttttcaatgtcacaagccatggctccctcatttacaagttctctaaatgttgcttttctcagcctgtttatccatatttcaatccttggaactgtccagctcccatgactctatgcccaccaagctcttgaattttctcatttcttcacctacaaccctttgtctcgacttatctcctgcaactgactcatctgcaacattcacaccattgcttccttgtggtttcccttctttagaacttttactcatccttgagatgtatggtgtatttggcttgagttatgagagatgcttatttattcatttactctttttcatattttcagagaaagttacctaatccctcctaaagacacagcagtatgggtataacatccttgccttcccatttatccatgtttcactttatcactgatgtgaagaggcccaaagcctgttagccaccatccatgctacctaggtagtccataggaaccacccccatgaccaccaccaacatcaactaaaggttcttggagggtatgtcagtgtgttgctcaggataccccaggtacatcaaggaatcaaggagaggaaaatatgagcaatatgtgtattcagagtgaagattttatgtccagagtatttgagctcaaaccttgcctgttgttttctaatcatgatgaatactttctcagtttctttttcctgaaatataaattgggatttaagactgtacctaactattaagatcactgtgtaaaactaagtgtctctaaatgtaatgcatcgatttagtgtctggaacataataaatatttgctctcatgattgctaaaaaaaaaaaaaaaaaaaaaaaaaaaaaaaaaaa

SEQ ID NO: 220693 - DNA, 1000 bp, Homo Sapiens
atgagggtggaggactcagcctggcctctgcctggcctgtttcaaagtctgggccactggcagccttctcttgctcaatccgaggtggaaaaagatcacctcccagtgacctccctcagcccccaggggagtaggtctgtgtccaaagctatgtggcaggcttgtttgaaggacccagaggggcccagctgacctgtctcactgctcctggcagcccagccccatcggcaggtggcccctgcctgggggttattcgggatggttcagccagggcctcccaggaagagtgctgtggagccacggtgactgtcctggacagcaaggagcatgctaccccagtgagcacttctttttgagggacttgatggggaggtggggtaggcagaagggacgtggcagaagcgggaagactttggtcaccatggctctgcaggccttctgcaaatcagtgctggcctgggctggaaacagctctgtgtgtgaaggtgaggactcttggaagcaggccatcctggccagacaccctagcaggaaggggctcacctgtcacccttaggcagcctgagggctggtggggacttttgagtcttgaggggatagcggaaaaagctgagctcataggtgcccagccagcctcccagctaaaggtgctcagagccccactgccccctctctctgtgcaggtggccagtgcccctccctgctctgggagcattgctagccttctaccccatccctggatccacaggggctatcgaggagacccagtgagaatgtagcattttgttcatccccagggtagctgccctggggtctgggcactctgcctctgggagagaggaagaagaaaggggccccattttttaaaaaactgtacagagcctttggctttatgtgtttatgttcttcacatgcatatgtgtgtatgtgtgtatatctttccccccatcaattggtacaatttttaataaaatcatttaaagcaaaaaaaaaaaaaaaa

SEQ ID NO: 220694 - DNA, 1000 bp, Homo Sapiens
gaggcacgccgggtccctgaagaggccagcacgaaccggagggctagagacagcggccgagaggacgagccgggcagccccagggccctgagggcccgacttgagaagctggaagccatgtaccgccgggccctgctgcagctgcacctcgagcagcggggaccacgtccgagcggggacaaggaggagcagcctctacaggaacccgactccggcctccgctcccgggactcggagccctctgggccctggctgtagccgaggccgcagccggtgagaggcggagcctcgagcgggcccctcctcctccgttcccagctacccccgacctcgcgcacgccctggcccgctccctgcccgcggataccttggactacggtgccttcccgcccccaccagtggacacttccgggtggcgcttggccatccgcttggtggaggtcgagtgggtgcaagggccctcaggacctcccacatgtacagttcccctgcctcttgccccggctagtttccctggagagaggcctagccaacaacgaagggacggattttaaaacagcgagaactgggtgccaagaaacacttcatattccctgaacttttctggatgttgtgcgaacctgttgtatttttttttttcctgtattttggttctgagggatgagtaatgtgtttttagttggttgagtttatccattcttcaatcccctaaagccttcagctattctttcatatgtggccaacattttaagtacagtgtttgcttttataagtcggtgttacttggatgtcctataaaatacccactttttataaagatgatatttataacctaggaactcatgcctgtcttggctgcagtccctgtacatctaatatatactgatttgtttgcccccagagaatttttaaggtatctgcctatatcgtgatcttttgaaatggtaaataaatctggtgcattaaaaattaaaaaaaaaaaaaaaaaaaaaaaaaaaaa

SEQ ID NO: 220695 - DNA, 1000 bp, Homo Sapiens
tatcaggagcactgagctcacagactgacttgggctcctactggtggggacctctgttagtcactttacctcatccaaagtataaaggaattggaccaaataatttaccacatagctctaaaacttaatttaaaatgtaattccagaaaaaaaaagggaataagcaaagggggaagaattgaaagagagagagaagaaagaatacagagagcttaccttttgcctttctgttgatgttacatctcttcttcctatgttcttaggtctatgagtctgtttccccatcatttggtatctagtccagttcctgcttactgctttgctaatagctggccttgctagaatccttggtttcactgctgttcttcatgtgcttctatgagatttactccaacacaaataggactgaatttattgtgaagtaacattggcaatcttaacttattcatttaacttatttttatagctagataaatattgttagtcttagacaatagctcacattttttgagaagcatgccctccctgtccatttgtcttataacatgacccagccctattttacgtcattctaaattcagcctcatataatgaaaatacattatgaaaacagatgtttaggagatttcctgtatagcagtcagccaattcatatgctttgtctctgctggcttctttttccatgcgttaacttttcccaatagcagaggaggcaaatatgagcatacaatccctttgttctaaagatattgttccagctagtggaatgatgttgaatctttaataaccataattagttgctttttcagtatcttctgctttgtctgtgtctatccagtggcctaggaattaaagtgtaagttgttttcgctgttaaattggatatttatatatatatatagcaagattttcatgtgttatttaattctgtattgtttcttatatttgtagtaaaatattgaacaattaaaagtgttgactccaaaaaaaaaaaaaaaaa

SEQ ID NO: 220696 - DNA, 1000 bp, Homo Sapiens
tagctgtgtgtgatttccatgtgtgctgcaagtatttaacctatgaccactcctgcatttggagtcttggaaattgcagcaggaggaaatgtctctctacagatctattttttatgtcacttgcttttagagtaagaggttatttcaggcacagtaatttgatttaatctgttttcaaatactaaatctgaaaatactaaaatgaaaagaatttgcaaatgtgagaatttgcaaacatgtggagtgtgttcttatgtgctttccagtttctctgatgataagaaatgagtaatgttgggccttgatttcctaaactcagccctcagtcactttctcaaattatttgaagaccttccaagttgcttcagaagcattgtccaaaggagattattcccagtagtgaagaataatagatggatgagaatgtctaaggaatcctacttctgtcgcagaagtggcactctccagaacctcaagggcccatggagttcatgggctttggagtcaggcagagttgaccctgagtcccatcccagcctcttaatagactagttacttgacttggaacagttatgcaagacaaagcacaatgatactgattgcagtaatgggaacaattcattcctctctgtatccatgccctttgcaatgcatgtttttagctactcccatggagggaaagattctgtttttccagtccttggatctgactggccttatttgctgtggccaattcatacttactgttctagtgaaacaattaggcatgttttgctcctcattctagactttaattaaaattaaaattttatgatattttatttctactgtattttgctgtattcattctgctcagtattctagttcaccggtcctcttatctctgtttaatttagtggtgaacctatacattgtctggtaacttaattttgtattttcgtattctattgggctgtcgttcaaatgtggcttttaaacttcagttacttgttctttctac

SEQ ID NO: 220697 - DNA, 1000 bp, Homo Sapiens
cacattgggttatataatcatttaacaatattaatttttccaatccatcaatatgggttatatgtctgtatatgtttttaatcatattgatgtatatttgtagatttcaaggtacaaacttctcacctttttacttttatttctatttctttaagttctctagcaaatggaagtgtttttaaattttcttttaaaattgtttattgttacaaacttctcatctttttgcttttattcctaagtatttcttactttaagttctctagcaaatggaagtgtttttaaattttcttttaaaattgtttattgttaatgtatggaaattcagctaatttttggtgctgatattgtactgtgcagatacactgaatctgtttattacttccagtagtattttggttgagtctttgtgattttctacacagaagatcatgtcatctacaaacacatataattttacttctttctttctgatttggatgggtttgattttttttgctatttcattgctctggctaggacagccagtatttattgaatagaaggggtgagagcattcttccatcacgtgagatcctacaggaaaatcattccatgttccctgcttcgttatctactcgttggtcatttcatggatggcctttctattgttgaggtaaatttccttttctgtctattttgttcagaatttctatgatgagtggattttgaattttgtgaaatactttttctccatctattgagatgatgtggttttcatctttcattctgttcaagtggcatatcacattgatttgcttgactatgttgaaccatccttgcatcccagaaataagtggcacttgagtatctacagtcctttttacatcctcttgaatacagctttttagtacaaggggtcttcaagaagttcatggaaaaatacatattttgcatattatgagaaaattgtgtatgaatttcccagtttttgcaccaaaataaactggtacgaatctgt

SEQ ID NO: 220698 - DNA, 1000 bp, Homo Sapiens
caaacagctgaaggtgttctttcaactatagtaaaaggggtgtctcggtggccacaggcggcccagatgaagagacctgtctgggccgcagagaggagtctggaggccccccgagccaggctgagccagccgctaggggcacggagcagtgcccaccttgcgcccagtgtggccagagcttcggccggaaggagctcagtgcgccgcaccagcgcgtgcatcgtggcccccggcctttcgctggtgctcagtgtcccaagagcttcacgcagcggaccacccccgccagccaccgtcgggcgcacgtggccgagtgcacctacacccgcgcccaatgcggcaagaccttcctccagcagtcgacgctcacacccactactgcgcgcacatcagggagaagccctacgagtgcgccaagctctttggccgcctgtccacgctgctggagcaccggcacatgcacacgggtgagcggcccttccagtgcacgcaatgtggctgctgcttcagccgcctgtccacgctgctggagcaccggcacacacacatcagcgagaagcccttccagtgtgcgcagtgcgacaagcgtttcacgcgtctggccaacctgaccgtgcaccagagagtgcacttgggcgagcgctccttccagtgcgcccagtacagcaggagattcatgcagaagcccggcttcctgcgtcatctgtgtggccactcgcaggagaagcactatccttgcagcccttgtggttcccatgatcagtggtgaaatatagtgattttcacctgtgcttccattctgaagttctggaaagaagtactggatggactgaagtccaggacaacgttccaaagaaaggcagagtccaggtaggcttggaggaccaagccctggatgagcactggagggcagaggcctcagtgtccagcactgtgccctgcacatggaaagcccctacgtttgtggaatgaatgaataataaaaatgttttcataagtg

SEQ ID NO: 220699 - DNA, 1000 bp, Homo Sapiens
ttgataccaccgaacaaaatctagtgatatgtcgtaattctaaaggcaaatatggatatgtgctcattgaacgtctagatttcaagcatcaaagttggtcaccttagaaagatcaagatcaaatgctatggactgcacaaaggagaactagtcctaagatcctagtcctgcgttacatcagtttcagtttacatgtcaaaattttgagatggtggaatctgtggaaactttcgttctgaacttaaaagagaaaaataaaaacaaatcctcaacatttagatgttggttttactcctaaaaggttatatctttcaatgtctatttcagtatctacttcactgtcagttcaagagaatgtgaaacagtatgtgttagcatttgagcacttatttaatgagccatatccaaagttagaaatcatgccttatggcacctagtcagttgtgcagatggttagtttgcttctaatattagtatatgagcatttgtaatttctagatgttgtgcactcaaacttggtataatttaattctgaacagtaaacagtgtaaccaaggtcttttaaatactcaagtttaaggtataatcttaattatggctcagtctttaaaaaagtataaatgtccttttactttatcacaaaaataaactcatatgaatactgttccacatttgtttcttttgggaatagtttgcagaaaaataatttattcctaaattcacccatcattttaagaagtgcccaaatgtatttaacaaaataatatatatgctgtattactttaaaacatctttttgtccaaaataagaacaattgtcattattttgtctatgcccaaataactattcaaataatagcattcatatgtactttcatttatatggaattaaataaaaatttaaaagctgacatctattctgttttttaaatgaggtgcactgcatgtcaataagagaaataaattctacatatgcaaaaaaagaaaaaaaaaaaaaaaca

SEQ ID NO: 220700 - DNA, 1000 bp, Homo Sapiens
gcgaatacggcgcgtgcgtcccggccccagggtccggcagccccgccggccgagcgcctccctgcggcctagccgggcccggccgggccggagcagcttcccacggcccccacccgctcgcctgcccgccgcctcgcgggtgggggcggggcgcgggctccagccccttttgaaatttgagtctcgcaaccagcaagttcggaatcccgagataccggatcctctgcgcaaaatgttttctcccgaaggtgaaaggcgggcggcgggagccgaaggcggactcggagcgctccgccgccgccttcaggacccgcccgcaggcccgggacgcgccgatgccggctgcagccgaggagcagccccgaggtccgaggtccgcgccgctggcgcgcggccgaggagacgctcggctgttcgctgttgctggtgttctaaactatttatcttgtgtgtgtacatttgtgggtggagtttgtgcgcctggtttttttgtttggaaaacactgcgtggtcaatgtggttatgggggggagtgatgcatttttttctagtcttaaaactaaaaacttgagtctaccatttcttggttgcactgaaaataccgcccagcctgatggtgttcccgtgctgtccctcccccttcccttctccccgcgtctacctccccaccccgttctgttccccctccctccttctccctctccctcaaatccgtgagttttggaagccccagggcctctctcccccgcccctcctggatgaggccaccatccccccaaaccggcttgttttgcagtttccccaggatcctggaagctcgctggcgctcgagggtggcggggacacgggggggtgggtgaaggttcgttaccttttctagtgcgttctatcatagttaacggttgcacacttttttaaaaaaagtaaatggatttgccacaattaaatgtcataacatttatgacagaatataaaatattaacataaaaaaaaaaaaaaa

SEQ ID NO: 220701 - DNA, 1000 bp, Homo Sapiens; identical to SEQ ID NO: 115272

SEQ ID NO: 220702 - DNA, 1000 bp, Homo Sapiens; identical to SEQ ID NO: 115274

SEQ ID NO: 220703 - DNA, 1000 bp, Homo Sapiens
acgaacccaatctgcacactccaggcctctagttccagaaggatccaagacaaaacagatctgaattctgcccttttctctcacccatcccacccctccattggctcccaagtcacacccactcccttccccatagataggcccctggggctcccgaagaatgaacccaagagcaagggcttgatggtgacagctgcaagccagggatgaagaaagactctgagatgtggagactgatggccaggcaagtgggaccaggatactggacgctgtcctgagatgagaggtagccgggctctgcacccacgtgcattcacattgaccgcaactcacacattcccccaccagctgcagccccttgctctcagctgccaaccctcccgggtcacttttgttcccaggtacctcatgggaagcatgtggatgacacaatccctggggctgtgcattcccacgtcttcttgctgcagcctgcccctagacatggacgcaccggcctggctgcagctgggcagcaggggtaggggtagggagcctcccctccctgtatcaccccctccctacacacacacacacacacacacacacacacacacacacacacacacacacacacacacactgcctcccatccttccctcatgcccgccagtgcacagggaagggcttggccagcgctgttgaggggtcccctctggaatgcactgaataaagcacgtgcaaggactcccggagcctgtgcagccttggtggcaaatatctcatctgccggcccccaggacaagtggtatgaccagtgataatgccccaaggacaaggggcgtgcctggcgcccagtggagtaatttatgccttagtcttgttttgaggtagaaatgcaagggggacacatgaaaggcatcagtccccctgtgcatagtacgacctttactgtcgtatttttgaaaaattaaaaatacagtgtttaaaaacaaaaaaaaaaaaaaaaaaaaaaaaaaaa

SEQ ID NO: 220704 - DNA, 1000 bp, Homo Sapiens
aactctggcagattgcaggatttgggaatggaactcctggcaaagtcatcagttgccaattgttacatacgaaactccacaaataagaagagtaattcgcccaagccagctcgatccagtgtagcaggtagtctatcacttcgaagagcagtggaccctggagaaaatagtcgttcaaagggagactgtcagactctgtctgaaggctccccaggaagctctcagtctgggagcaggcacagttctccccgagccttgatacatggcagtatcggtgatattctgccaaaaactgaagaccggcagtgtaaagctttggattcagatgctgttgtggttgcagttttcagtggcttgcctgcggttgagaaaaggaggaaaatggtcaccttgggggctaatgctaaaggaggtcatctggaaggactgcagatgactgatttggaaaataattctgaaactggagagttacagcctgtactacctgaaggagcttcagctgcccctgaagaaggaatgagtagcgacagtgacattgaatgtgacactgagaatgaggagcaggaagagcataccagtgtgggcgggtttcacgactccttcatggtcatgacacagcccccggatgaagatacacattccagttttcctgatggtgaacaaataggccctgaagatctcagcttcaatacagatgaaaatagtggaagataatttgatttgaaactgacactgcacctgatgggttaacaagatctaggcttcagaaggtgacagatatgagtgaggaccatgtgtggggcaaagcctcagaatgatgaaaaggttccggcactatagttggggccatgttgactccttttcaaccatttgtcacagacgtgagaagaagaaatgacttcaaaatcaagagaaaacaaatactgaaagtctctacttacatccaaattttaaaaaataaaatctgtagattaacaatctgaaaaaaaaaaaaaaaaaa

SEQ ID NO: 220705 - DNA, 1000 bp, Homo Sapiens
gaaaggcaactgtgatgataaaatttaacgttcccccaaacactgagtcaatgagatttttctcaggagatactttacctataacaacgccgttaaatccaaatctcttctaaacgatggcattctatgtaatgcctttcctggacttttttggccactgccctggactagtgaaagaatggactctatctttatctgcaagaggaactaaggccttctatcagactgcctggccagcctggggcactgaaaatacggctcatgttaatgagttacattatcagccagcccagccttgcccaccatttaagaaatatcacagagccactagatctcatatgatcttcttcaagccattattttaactcaagaaaactctagagaagaaaagtgaagaagtcatgttgaagaagatgtaagaatgtgtcaagaccatccagaaatgatatgagaaatactgatattttaaatggttgacatcatccagcgaaatgaatctacattaaatgttgttttaactgcgctatgattaaaaccattcatatagagttagtctttacaactactattctgttatttttttttttaatctgacaacatttgtcctaagtaagataagcaaaaaaattcttcaactccttttggcaagaaaactgtaacagaaaataaattttgaatgtgtacttaagtctttattatatttgaagcaattttttttcaattttaaaagctgaatgaagacaacttaggttgctaacctagttcaaaatgaaattatttagataccaatttttaaaatactggagagaatttatatgtctttttccagagttctgatgataagcatttggagtgcatttattcctccagataataaatgtgtgttcagaactttttgtgttttttaaggcattaataaagccttcgataatattaaatacaaaatgaaaaaaaaaaaaaaaaaaaaaaaaaaaaaaaaaaaaaaaaaaaaaaaaaaaaa

SEQ ID NO: 220706 - DNA, 1000 bp, Homo Sapiens
ccctccaacatgaagagggagtcacccacttgcaatctgttccctgcatccaaaagcccagcatcttctcctcttacccgatcgactcccccagtccgggggagagccgggcccagtgggagagcagcagccagtgaggagaccagagcagccaagttgcgggcctgccagccgaatgccactcaccagccggagtgtgccacctggcagaggtgccctacctccggattctctgtcaactcgaaaagggcttccaagaccaagcactgcaggacacagagtgcgggaaagtggacacaaggttcctgtttcccagcgactaaatcttcctgtcatgggtgccactcgcagcaatctgcagccccccaggaaagtggcagtcccaggacctaccaggtaaagagatcaggacagcaagcaagacttcagtagcaaaccactacagtcagtacctggactcgcctctacccagcagaccctgactccagcagattctggcccagggacaggaggaagagatgccaccagggctggtctcccaggagtagagaccatgggaaatggggtggattaggattgagctggagaagacttaaactctctgggttgaaagaagattaggggaaaagaggtcaccttccagcagtgaaatgaacaaatagaagatgagaagtacaggcaagtggtttgtctttatccacccccactgttgtggtcagccccagagaattttatcttcttccttggcattggttcactggacatttccacgtgagcggcctccgtagctaacctccctgccctctgaggagccatcttcctgaatcgcattctctactggactctggcctgcttggagaggtggcagcaggcacctggtcttcagaaattgtttcctgtgaattctgtgactcctaataggccagtttgtgataagcttactctatgagtcttcatttttctaaaataaagtgaatgtatttttatattctctgtaaaa

SEQ ID NO: 220707 - DNA, 933 bp, Homo Sapiens
atgggggacaatataacatccatcacagagttcctcctactgggatttcccgttggcccaaggattcagatgctcctctttgggctcttctccctgttctacgtcttcaccctgctggggaacgggaccatactggggctcatctcactggactccagactgcacgcccccatgtacttcttcctctcacacctggcggtcgtcgacatcgcctacgcctgcaacacggtgccccggatgctggtgaacctcctgcatccagccaagcccatctcctttgcgggccgcatgatgcagacctttctgttttccacttttgctgtcacagaatgtctcctcctggtggtgatgtcctatgatctgtacgtggccatctgccaccccctccgatatttggccatcatgacctggagagtctgcatcaccctcgcggtgacttcctggaccactggagtccttttatccttgattcatcttgtgttacttctacctttacccttctgtaggccccagaaaatttatcactttttttgtgaaatcttggctgttctcaaacttgcctgtgcagatacccacatcaatgagaacatggtcttggccggagcaatttctgggctggtgggacccttgtccacaattgtagtttcatatatgtgcatcctctgtgctatccttcagatccaatcaagggaagttcagaggaaagccttctgcacctgcttctcccacctctgtgtgattggactcttttatggcacagccattatcatgtatgttggacccagatatgggaaccccaaggagcagaagaaatatctcctgctgtttcacagcctctttaatcccatgctcaatccccttatctgtagtcttaggaactcagaagtgaagaatactttgaagagagtgctgggagtagaaagggctttatga

SEQ ID NO: 220708 - DNA, 1000 bp, Homo Sapiens
ttactttctgactacaaagaaaaacagatgctaaaaatctcttctgaaaacagcaatccagaaaatgtctcaagaactagaaataaataaggatggtgatagagaggttgaagaagaaatgaagaagcatgaaagtaataatgtgggattactagaaaacctgactaatggtgtcactgctggcaatggtgataatggattaattcctcaaaggaagagcagaacacctgaaaatcagcaatttcctgacaacgaaagtgaagagtatcacagaatttgtgaattactttctgactacaaagaaaagcagatgccaaaatactcttctgaaaacagcaacccagaacaagacttaaagctgacatcagaggaagagtcacaaaggcttaaaggcagtgaaaatggccagccagagaaaagatctcaagaaccagaaataaataaggatggtgatagagagctagaaaattttatggctatcgaagaaatgaagaagcacggaagtactcatgtcggattcccagaaaacctgactaatggtgccactgctggcaatggtgatgatggattaattcctccaaggaagagcagaacacctgaaagccagcaatttcctgacactgagaatgaagagtatcacagtgacgaacaaaatgatactcagaagcaattttgtgaagaacagaacactggaatattacacgatgagattctgattcatgaagaaaagcagatagaagtggttgaaaaaatgaattctgagctttctcttagttgtaagaaagaaaaagacgtcttgcatgaaaatagtacgttgcgggaagaaattgccatgctaagactggagctagacacaatgaaacatcagagccagctaagagaaaagaaatatttggaggatattgaaagtgtgaaaaaaaagaatgataatcttttaaaggctctacaattgaatgagctcaccatggatgatgataccgccgtgctcgtcattgacaac

SEQ ID NO: 220709 - DNA, 1000 bp, Homo Sapiens
gcaaccgggccgtctccaaccccttccaacagaggctgactctgtcccagcgagctctggccaacatccactcccagctgctgggcctggagcgagaagctgtgcctcagttcccttcagcgcagaagcctctgctgtccttggaggagactctgaatgtgacagaaggaaatttccaccagttggtggcactgctacactgccgcagcctgcacaaggactatggtgcagccctgcggggcctgtgcgaagacgccctggaaggcctgctcttcctgctactcttctccctgctgtctgcaggagcgctggccactgccctctgcagcctgccccgagcctgggccctcttcccacccaggaatccaagcgctttgtgcagtggcagtcgtctatctgagcccctcctcccggctggactggagcctggctcccctcttcgttccttccctggctgccggaggagaccccactaacccagcctgcctgggctctgaccactaacactcttggccatggacagcctgcacaggaccgcctccctgctcttggccactgtgctcccatttctgtccttggccttgggagtagctgagggggcagactagggagtagggctggcaggggagggggcagacagcctcgcctcgcacccttcatccctggctgccggtcccatccttggagggactaagctgggggtgggggacatgagtccccctgctgcccctgccacatcccagtgggctctgaccccctgatctcaactcgtggcactaacttggaaaagggttgatttaaaataaaagggaagactattttacaagcagctgggtcctccttatttctcctctcccttgattcggcctcctggccagggctgggacatcctccctgctgtcctctctcccccggcctcccagctgccaggaatttctgcgcctgtccaggctcagcaaggggtccaaagacattgttctttaaaaaaaaaaaaaaaaaa

SEQ ID NO: 220710 - DNA, 1000 bp, Homo Sapiens
tgagcccaggggacctggccaaggtgggcgtctcagaagctggcctgcagcacgagatcctccggagagtccaggaactgctggatgcagccaggatccagccagagctgaaaccaccaatgggtgaggtcgtcacccctacggccccccaggagcctcctgagtctgtgaggccatccgctccccctgcagagctggaggtgcaggcctcagagtgtgtcgtgtgcctggaacgggaggcccagatgatcttcctcaactgtggccacgtctgctgctgccagcagtgctgccagccactgcgcacctgcccgctgtgccgccaggacatcgcccagcgcctccgcatctaccacagcagctgagtgctgcccgcccacctgggcctggtcctagccctgcctcggccactgtgagccccgggctcctgctcagccttgtgccagccagactcgtatgaggctcccccctgccctgggccccttccccactgcccaggagcccccatcctaagctccaagcatgtctgggccaggcagaggtgctcctcatccatgacaccaccagtctgaatggtcctgggggctggggctggagaggccgctgcaccaccacccgagcctgggagccagcgtcccagcctaatcacggatctgctgcctcccagctgtcttgactgaaggccaccgcccctgcaggagcttgggtcctcatctgggggccatgcacaggcccgtcccaccctgcatgtgggaagggagcaggagggcctggctgggtgaggggaggccttcctgggaaggcgtgtggtgcaggcctgtgctcacagtggcaccagcaaccctgggtctccctctctgctgctccccagaaccccggggccctcctgctctccacaactgtccctccttaccccatgtagctcgatccgaagcaggagtgtcaataaacctgtcttcagtgcgaaaaaaaaaaaaaaaaaaaaaaaaaaaaaaaaaaa

SEQ ID NO: 220711 - DNA, 1000 bp, Homo Sapiens; identical to SEQ ID NO: 115284

SEQ ID NO: 220712 - DNA, 1000 bp, Homo Sapiens
catgcaattaagggcagatctgggccagtggaataggatagctgattggtgtttgttactgtgaaccctagaccgtaccccgtagaatggtgtctcttgctttgtaacacatcgggccttcagtgtgctgtattcctcagaagtgagggcatctcggtccattctgcccatggccacagggtgcagagaggcagcagggcccatgcaagctgccaccctgggatttgctgggctggagttcaacagatgtaaagacttcagtgaagcaataaacacaaaactctgggagaagatatccagaattttgtacattactctgtttctttttcaaaaatgaggcagatcagatgcccctgagctgcccctttttttctgattcccaactgcaatgtcctcagtcagtgttgtccctctgcccggctccccagctctttgccaacctcttcacactccccttgagctgagcatcagtcgcctgtgacgtggccaccttctgtcctgctcccactcccgacccatgctggaccccggaggacctcctgccccgcccccaccacacacccatatcccccaccattccaatttgttctttcccgtggggaattttttttcccagcgtctccatcccttcctacatatccacacacacacaaattggtctgatcttttttccattggttaaacatttaactccatgccagaccttgttttaacccctctcacatcatgttctttccttttttgcgagttattttgcattaaccaactttgtcagtgacagatgcgtatctgagggtgtcacacacgaccttcagcagggaagacttctgggccatggagggccgtctaatacatggacttataaactgactgcatgagcaatgaaaaggccaaattattctgaattttttttgaatcactgtaaaaaaactgatttcttttgtatagagaacactaaacgtataataaaagttgttcaaaatggactcttgccatgtga

SEQ ID NO: 220713 - DNA, 1000 bp, Homo Sapiens; identical to SEQ ID NO: 115287

SEQ ID NO: 220714 - DNA, 1000 bp, Homo Sapiens
cccataccgggcagaggtgggcccggccggctcacagttcggcctcctcgcctgcctcttcgtggagctcttccagagctggccgctgctggagaggccctggaaggccttcctcaacctctcggccatcgtgctcttcctgttcatctgtggcctcctgccctggatcgacaacatcgcccacatcttcggcttcctcagtggcctgctgctggccttcgccttcctgccctacatcaccttcggcaccagcgacaagtaccgcaagcgggcactcatcctggtgtcactgctggcctttgccggcctcttcgccgccctcgtgctgtggctgtacatctaccccattaactggccctggatcgagcacctcacctgcttccccttcaccagccgcttctgcgagaagtatgagctggaccaggtgctgcactgaccgctgggccacacggctgcccctcagccctgctggaacagggtctgcctgcgagggctgccctctgcagagcgctctctgtgtgccagagagccagagacccaagacagggcccgggctctggacctgggtgcccccctgccaggcgaggctgactccgcgtgagatggttggttaaggcggggtttttctggggcgtgaggcctgtgagatcctgacccaagctcaggcacacccaaggcacctgcctctctgagtcttgggtctcagttcctaatatcccgctccttgctgagaccatctcctggggcagggtccttttcttcccaggtcctcagcgctgcctctgctggtgccttctcccccactactactggagcgtgcccttgctggggacgtggctgtgccctcagttgcccccagggctgggtgcccaccatgccccttcctctttctcctcctacctctgccctgtgagcccatccataaggctctcagatgggacattgtgggaaaggctttggccatggtctgggggcagagaacaaggggggagacacaagt

SEQ ID NO: 220715 - DNA, 1000 bp, Homo Sapiens
atttccaaaagtctttccaagaaatcaatgttatgttttgttccagaagcaaatttgcatttgtgatctgtttctaaaaatggtacaagttagctctgtttagaaagtaaaaatatctgatgttagattggaagtatctcttcctggggaatccagaaagataagcatagcatattgtcttactgcaatagataagttgcttattgagaagtctggttgttattctatatggtaacaatacagttgatgtatattttatgatagatcctttatattttcctcatgactttagaagggggaagggggagaaaattatgatgaccagactagttaaagagcattgaaagtccacagtactgtagctaaagtagaagtttgggtttgttatagactttacattatatcaactaataagcagatactgtacagtattgctcaccattttatcatacttttgcatatgaactactccattgccttttatagatgttttatagctgatcttaccagttttcctggtaactttttttatttcttttttttttttttgagacggagtctcgccctaacacccaggttggagtgcagtgccgtgatctcggctcactgcaacctctgcctcccgggttcaagcaattctcctgtctcagcctcccgagtacctgggactaccggtgcctgtctccacgcccggctaattttttgtatttgtagtggagacggggtttcaccgtgttggccaggatggtctcgatctcctgacctcatgatctgcctgcctctgcctggacctcccaaagtgctgggattacaggcgtgagcccccgcgcccagccactttctttaatactataactaagaatttattaaaatgcacaaattgtctaagactgtaaagtttattggggagaggccatgactacctctgaatttagtaaatttaaaatatttctgattctcaataaagaactaatatccatataaaaaaaaaaaaaaaaaa

SEQ ID NO: 220716 - DNA, 1000 bp, Homo Sapiens
tcccacccctagccaccagtgtcctccaagtgccccctcacctctccaggtgctcattgtaaccatttctcactagtgtcaggcccccagtgggaccacatgccactgcctgcacctttcggcagaggaacccccaccagacatcaccctttgccttagcaggggtgactttgtctctcctggctgggccatccttccgccaatctggcccttacacactcaggcctgtgcccactccctatctccttcccacccctacacacacactccctgcttgcaggaggccaaactgtccctcccttgctgaacacacacacacacacacacacacaggtggggactgggcacagctcttcacaccattcattctggtcatttcccccaaaggcatcccagcctgggggccagtggggaactgagggcaaggggatatagtgatggggctcagatggactgggaggagggggagggtgatgcattaattaatggcttcgttaattaatgtcatgttgcttgtcgctttctcagtgtgtgtgtgtggtccatgcccactgctggtgccagggtgggtgtccatgtgcacccggcctggatgccagctgtgtccttcgggggcgtgcgtgtaactgtagtgtagtcaggtgctcaatggagaatataaacatatacagaaaaatatatattttaagtttaaaaaacagaaaaacagacaaaacaatccccatcaggtagctgtctaacccccagctgggtctaatccttctcattacccacccgacctggctgcccctcaccttgggctgggggactggggggccatttccttttctctgccctttttttgttgttctattttgtacagacaagttggaaaaacaacagcgacaaaaaagtcaagaaactttgtaaaatatcgtgtgtgtgattccttgtaaaatattttcaaatggtttattacagaagatcagttattaaataatgttcatattttcacttcaaa

SEQ ID NO: 220717 - DNA, 1000 bp, Homo Sapiens
cattaattaaatacaaccaacaaagagtacatgaattagaaaattgtaatggactttctatgattcatcaggtgttgatcaaacaaaaatgcattgttgggttttacattttgaagacccttcttgaaggatgctgtggtgaagatattatttatatgaatgagaatggagagtttaagttggatgtagactctaatgctataatccaagatgttaagctgttagaggaactattgcttgactggaagatatggagtaaagcagagcaaggtgtttgggaaactttgctagcagctctagaagtcctcatcagagcagatcaccaccagcagatgtttaatattaagcagttattgaaagctcaagtggttcatcactttctactgacttgtcaggttttgcaggaatacaaagaggggcaactcacacccatgccccgagagatggcaagatctttcaggagaaagtgcggtcaatcatgtacctgaggcattccagcagtggaggaaggtcccttatgagccctggatttatggtaataagcccatctggttttactgcttcaccatatgaaggagagaattcctctaatattattccacaacagatggccgcccatatgctgcgttctagaagcctaccagcattccctacttcttcactactaacgcaatcacaaaaactgactggaagtttgggttgtagtatcgacaggttacaaaatattgcagatacttatgttgccacccaatcaaagaaacaaaattctttggggagttccgacacactgaaaaaaggcaaagaggacgcattcatcagtagctgtgagtctgcaaaaactgtttgtgaaatggaagctgtcctctcagcccaggtctctgtcagtgatgtcccaaagggagtgctgggatttccagtggtcaaagcagatcataaacagttgggagcagaacccaggtcagaagatgacagtcctggggatgagtcctgcccacgccga

SEQ ID NO: 220718 - DNA, 1000 bp, Homo Sapiens
ttctttacaaagccctaaaggaaagtttgcatctatgaaaagccaataggctgagacatccaattgctgcatggaaattgatgtacattcaggggacggcaaaaatagctgtaaaatagtgaaaaagagcagtggttgtgctcttttctggccaatgatttacaaaagaatctacttgactctgtccctggagtgaaatccttagggttggaacttgtgggaacattccaacttgctaagcagggtccactgggagggaagctctatctgggaactcacccccagcgcacacacatctcccccagggtcccaaggccccgcagcttcctcccccgaccaaaccccaagacctggatcccaggagacaacagtctccacagtgagagcaacattaagggcaaagccatggagaaatgtgggagaggccggcctcaaatctttccatttaacaaaccccagtgatgggtatggacagcatgcagggcttttggggcgcttccccccgctcctccatcaccctcagcctccacacttcaaagttcaagttcaaagctgttcaagtttcctaccagcaaatagccctaacttgcctctagagtaggccaaatgccaactctgtaaaacacacttacattatcggttacagaatgtcactcttaccgtcatgtcttgcaacaaccctgtgagggcagtattaatgcccccttacagcagaagacactgcagctcgaagacagcttaagtggcagaataatgctagaacagctaaggtttacatgtaccaaataacatgtttcagctcattccatcctcacaacagccccctgaaagtgggtactatcattagtcccatgttatagaaactgcagcagagttgaaaattgcctccaaattaccggaagagtgtatgaagattgaatgtgatgtattcacgtaacatgcttgaaactgcctggcatatactaaacgctaaataaatacatgctaactgcgatcatta

SEQ ID NO: 220719 - DNA, 1000 bp, Homo Sapiens
tgaatgtaaagactgtgggaaggccttcaatcgtggctcgaaccttgttcaacatcagagtattcacactggtgagaagccctatgaatgtaaggagtgtgggaaggcttttagacttcacctacaactttctcaacatgagaaaactcatacaggtgagaaaccctttgaatgtaaggaatgtgggaaattctttcgtcgtggttcaaatcttaatcaacatcgaagtattcataccggaaagaaaccctttgaatgtaaggaatgtgggaaagcctttcgacttcatatgcaccttattcgacatcagaaatttcatactggtgagaagccctttgaatgtaaggaatgtggcaaggccttcagtcttcacacccagcttaatcaccataagaacattcacacaggtgagaagccatttaaatgtaaagaatgtgggaagtcctttaatcgtgtctcaaaccttgttcaacatcagagtattcatgctggtgtaaaaccatatgaatgtaaggagtgtgggaaaggctttagtcgtgtttcaaaccttattcagcatcagaaaactcattccagtgcgaaaccctttgtatgtaaggagtgtaggaagacctttagatatcattaccagcttactgaacattaccgaattcatactggtgagaaaccctttgaatgtaaagaatgcggaaaggcctttggtcttctgacacagcttgctcaacatcagatcattcatactggtgagaagccatttaaatgtaaggagtgtgggaaggcctttaatcgtggctcaaaccttgttcaacctcagagtattcatactggtgagaaaccctatgaatgtaaggagtgtgggaaggcttttagacttcacctacaactttctctgcatcaaaaacttgtacaggtgagaaaccctttgaatgtaagaaatgtgggacagccttcagacatcagtagcaacttactgaacatcagaaaattcatacttgggtga

SEQ ID NO: 220720 - DNA, 1000 bp, Homo Sapiens
tggagggcagcagcgcctttctggagtgtgagccccgctcgctgcaggcgcgcgtggagtggactttccagcgcgcaggggtgacagcccacacccaggtgctggcagaggagcgcaccgagcgcaccgcccggggactactgctgcgcaggctgcggcgccgggactcgggcgtgtacttgtgcgccgccgtcgagcagggctttacgcaaccgctgcgtcgcctgtcgctgcacgtgttgagtgctacgcaggccgaacgactggcgcgggccgaggaggctgcgcccgccgcgccgccgggccccaaactctggtaccgggactttctgcagctggtggagccgggcggaggtggcagcgcgaactccctgcgcatgtgccgcccgcagcctgcgctgcagtcactgcccctggagtcgcggagaaagggccgtaaccggaggacccacgcccctgagcctcgcgctgagcgggggccgcgcagcgcaacgcactggtgaccagactgtccccacgccgggaaccaagcaggagacgacaggcgagagaggagccagacagaccctgaaaagaaggacgggttggggccgggcacattgggggtcaccggccgatggagacaccaaccgacaggccctggctgagggcagctgcgcgggcttatttattaacaggataacccttgaatgtagcagccccgggagggcggcacaggtcgggcgcaggattcagccggagggaagggacggggaagccgagctccagagcaacgaccagggccgaggaggtgcctggagtgcccaccctgggagacagaccccacctccttgggtagtgagcagtgagcagaaagctgtgaacaggctgggctgctggaggtggggcgaggcaggccgactgtactaaagtaacgcaataaacgcattatcagccaaaaaaaaaaaaaaaaaaaaaaaaaaaaaaaaaaaaaaaaaaaaaaaaaaaaaaaaaaaaaaaa

SEQ ID NO: 220721 - DNA, 1000 bp, Homo Sapiens; identical to SEQ ID NO: 115298

SEQ ID NO: 220722 - DNA, 1000 bp, Homo Sapiens; identical to SEQ ID NO: 115301

SEQ ID NO: 220723 - DNA, 1000 bp, Homo Sapiens
agtctggaacctttcattagagcaatatttggttattgcacttcatttttatttactaagaaatgcaatttgggaatttttaatctgttatgctttgtttatcaaccttgattttaattaagacttttataagactagcttaaaacaccaaccaacattatttttgcaaaagtgagttggactcactttccattcttgctagtcagagtaagtaggcagcacttttaaaaatatgtgaactcaaatattgcacttctttcaagatgttatcaattggttattgtactgtatagttttaataattttgattgaaaccctttaacaactctttgtaaattttaactcattttagttgattttcagtactatttacataggaattgatttttatggatatagtagaagaaatgtgctgtattttgataaaattcacttattgtatgtgtgttgtaatctaaaaaaaaaaagaatgacaaacagcttctttaagacaagtctcggtgttccctttattcttagtttgtttttaaatattaattttggcattctaaaatagctaacatttcttttattgatttcagattttcacaggcacattctacttttaatcagaaatatatttaataagtataattgtgaagttttcaactactttaccttgaaccacatataccaattataattttggaaaaggaattaagcctcacggaacaatggatcttcagcaaaccttaacttcattgtctgcacattacattgaagtattataaatgcaacagatgttatatgcactggcattttatcctactctagttagttaaaattttatagtattcttgcaacacataaagttgcgtaagaaactttaccaagaggagtattatagccaagttttctttgaaagtattggaaaactaaaattaaatgacaaggactttgaattagaattttgctgtaataaagtttcaaaatttgaataaaataattaaattttttgagg

SEQ ID NO: 220724 - DNA, 1000 bp, Homo Sapiens; identical to SEQ ID NO: 115303

SEQ ID NO: 220725 - DNA, 1000 bp, Homo Sapiens
ttacattttgcaacactcatttctgaattttcagtaaagaaatacacattacaaattaaaggttaaaggcccctttacatgcccttccccagtctcctcttcctcccccggaagtgtccattctgctgaattcaggttcatcattgccagacaaatgtagtaagctagtgtttcacatttccaaaatcagccttctggcagacttggaagtactcttgagaaaagaagactcgtgaccaaattctcccacagatttgtaataatgtacatattgaaaggactgaaggctctcagactgggaaagaaacttacccattttaaaattcagcattgctcaacttacctgactgccggaccccttcacccatgattctatgcactgtattgttggaacatacattgtgaaaacactgccctgcctaggcataccccctttccagaattaactttccatttaattctatagtttttcactgatgtaactttctagactggacaacaaagatgactaatagtaatcactccaagttgatgttgactgttgggttgtggtgaaatcattttgcattaaaggaaggtaaaatactaataaattgcatattccttgaccagagcacagattacttatgcttcttaattttttaaaatcttaaatcctctgtccaactggagtatctggctatgggccatgggtactcatataccctttgtcttaaactgatctgttacattttatgttcttgtggctagaagtagcctgagtttgctgttaatgtttaacacattttcttgagtaacagttctgttaatattgtacaagatggtacttgaattctttgtttgccttttttcttcctgtattagaaaatcttggtgctttttataagttttgtataaaagaattttttttaagatttgttcataaaatggtctgatccaggaaaaataaaatgggaacatggacaccatttctgaccttcaaataaaacttattatgtat

SEQ ID NO: 220726 - DNA, 1000 bp, Homo Sapiens
accgagaccagtaccaaagccaaggaaccggcccagcgtgcccccacccccccaacctcctggtgtccactcagctggggacagcagcctcaccaacacagcaccaacagcttccaagatagtaacagactccaattccagggtttcagaaccgcatcgcagcatctttcctgaaatgcactcagactcagccagcaaagacgtgcctggccgcatcctgctggatatagacaatgataccgagagcactgccctgtgaagaaagccctttcccagccctccaccacttccaccctggcgagtggagcaggggcaggcgaacctctttctttgcagaccgaacagtgaaaagctttcagtggaggacaaaggagggcctcactgtgcgggacctggccttctgcacggcccaaggagaacctggaggccaccactaaagctgaatgacctgtgtcttgaagaagttggctttctttacatgggaaggaaatcatgccaaaaaaatccaaaacaaagaagtacctggagtggagagagtattcctgctgaaacgcgcataggaagcttttgtccctgctgttaatgcgggcagcacctacagcaacttggaatgagtaagaagcagtgcgttaactatctatttaataaaatgcgctcattatgcaagtcgcctactctctgctacctggacgttcattcttatgtattaggagggaggctgcgctccttcagacttgctgcagaatcattttgtatcatgtatggtctgtgtctccccagtcccctcagaaccatgcccatggatggtgactgctggctctgtcacctcatcaaactggatgtgacccatgccgcctcgttggattgtcggaatgtagacagaaatgtactgttcttttttttttttttaaacaatgtaattgctacttgataaggaccgaacattattctagtttcatgtttaatttgaattaaatatattctgtggtttatatgaaaa

SEQ ID NO: 220727 - DNA, 1000 bp, Homo Sapiens
tgaccttcctccatttaacagtgttggttatgcaataagacacccaatttttcatgggagttgacaccaaaacacagctggattccatcaggaaagctgcattgatcagggtgttaaccgcatatgaaacaacccatatggaagacatacttaggggtcaaacctgtggtgtgtggaagtgaccactgggatgtcatcattcaccatttatccaggatggccgctcaccaggcaatttgctaggctcgggggcgggtagtatccatacactatgcactactgctctgaagcttctggaatcagaaatgaacccattttcatcgacgattgctgttagttgacaagtgacatcttgaaaatgccacattccctcatgtcacaggaagttctgggatcaccaaggattgttggagagtccagtgagatggaaccacacaaccagttccctaccagtgtcttgtcagctctgggtgtttgttccctgccactaagtggctcagtcacacctttgctgaaacacagtagtcttatgaaaagcactggacacatactttgaatacctttcatattttaggtgctgaaaatggtgagggagtgagtgctctgcacccttgggcttttcaactcttgcacctggagttctgctggttaagtttgttaaacttagttgaaactgggaacctgttggctaaccattggggccttacactgtttttcaaatggttgcaacatttaacttctcgcacatggttcccgtcctctggagctctgtcttgtcggggagatgggcatgttgtataccaaaagagtgtacaaagtgttgcagggctgtgacacaatagggactctatggaaaactggcagccattgggtgtgggggcagtctgtaaatcagtcacctgtgttgctgcaggccaaggtagaaacgccctccgtgtgtgcatatttgttggttctctgattaaagttttgagtctaaaaaaaaaaaaaaaaaaaaaaa

SEQ ID NO: 220728 - DNA, 1000 bp, Homo Sapiens
tacccatgagaagcaagagaaaggcactttgaattcaaatgcagcttatgaacaaagtcatttcttcaataaaaattataccgaagatattttcccagtgacaccaccggagttagaagaaaccattcgagatgaaaaaataagaagacttaagcaggtgctgagagagaaagaagcagctcttgaagaaatgcgtaagaagatgcaccaaaaataaaatctcctgtaaagacttcagtgaaatagctgttttttaaaatatacttcagcattaataagttaattgtaggtgtgttctgaaagtgtctttgaatatgaagcttgttttttcatcagtcgattgtacaactttaaggaatacagaaaaggttgattcacatatgacttgtgaataatttacatggggtatctatacctttgtcttagatacctttttttggaaggataaattttatatttttctattattttaactagaattctccaagtttgaatatttgggcagggtttttgttattgtttgtatctttacctaaattgctcaggcattattccagcagtagatagtgactgtgtattactgaaattttacaattcaagagaggaaatcagctccaaacttagcttttccagtggatttgtatatgtacttgctttatctctttacccttaaaatgatgataccttgtattcaccattgttttttttaatgtcgtgaaataatatgtattatggcaacattatttaaacattcaaacatttctcaagaatgagcaacatttgtaactttacaatgtaattttatataatccaaaggtattttagaattcaggccatttgatgttttgtttgcttatagtgatgtgttcccaggcaaatgctgctttttttttttttgggactatgtacatacgttactgagattgtgtaaaaagtagatcctgaacagttatcacatttaatatttcttaaactgtaaaagtgtaaaaaaaaaaaaaaa

SEQ ID NO: 220729 - DNA, 1000 bp, Homo Sapiens; identical to SEQ ID NO: 115311

SEQ ID NO: 220730 - DNA, 1000 bp, Homo Sapiens
cccggacaagttcatggaaagcttgatctacattcatcctaatctttgctgatgcctccatgtatgttaccttaagttgccgtgctaactgccgtccttcttcctgtgttacctgtctttgatgatccagatctgctttattaccaattaaaatcattgggaactcatcacgatcctttactctgagaatctgtctttgaaacttatagatttcttcaaaactgcctctatctgtgactgaaaagaccaacaggaagccctcgccagtcctcatatactgttctctcatggctccaagctcttcttgtcctgctgtatccaaaatatctagccgggctgctctgtcatctatcacacactgctttgtgtaagaatcttcattggttggatcataatccgttacaaaataggactcccaacttaggaaacaaaacatttgtaatatgattgaagactcctgcatgcctcctcaataatattcccctctctcctcccccagcaccaagaggtaatcaatatcctgaatttggtatctgtcattctcatgcatttatacaacattagtaatcatatgatagtattcctaagctatgttttggagaggacaccactgcaaatcttcagccctatactagcttttatcggtagccatcaattgcagttttaatagaaatacaaatacatcaagtgtctgttctttaatttgtaaagaaaatttgttttctagcgtgacaccctcaaggtaccgtatctgtatgtaaatgttgtgcccaatgctacacagacattattttaaaactattttctgcctttggtaaatagactaaactgttttctttattcctcaaaagaattagatcatacttcagtgttgattttgttgctaatgggacatggagatgtctggatgataataaatattcctgtggtatggtcactgaaaaaaaaaaaaaaaaaaaaaaaaaaaaaaaaaaaaaaaaaaaaaaaaaaaaaaaaaaaa

SEQ ID NO: 220731 - DNA, 1000 bp, Homo Sapiens
tccaaactctgaaactgggcctggaaaaaagaactctggagaagaggaaattgattctttgcagaggatggtccaagagctacgaaaggaaatagaaacacagaagcaaatgtatgaggaacagattaaaaaccttgagaaggaaaattatgacgtttgggctaaagtggtgaggctcaatgaagaactggagaaggaaaagaagaagtctgcagccctagagatcagcctccgcaacatggagcgctcccgggaggatgttgagaagaggaacaaggccttggaagaagaagtcaaggaatttgtcaaatccatgaaggaacccaagaccgaggcttaagggtcccaggagtactgcagggacagccccagagaggcccaactctggcccctttctcagtgctatctgatgacggggaaacaaaattattctctgagagggaaaggacatttgagggaaacatcaaatttccccataaataaatgaatggagtttgcaggaaggtgagggtgagcagagatgtgtgtggacatctctgaccatccatcgctgtattcaaatggattgttttattccattctggtctcaggcatgaccacgtccagtgaagacatttgaggcagcacatctcaggacccaggcaatagactggccccaactcaggctggactaaggtgtgattaattctttgttttttgtgtggaacagctcaccttgtcagacagcctcagggcatctctgagacacaggggcagaaaatgacattcatcttttgagtcctcatccatggagtgctgtgtttggggggctgcatctgctgaagcgagaaccccattctgccaccccaccaggatgcccattctccaggacttctccaacttactattagactaaaccagaacaagcaacaaactgtatttatgcaagcaaaattgatgagaaaattatattcaaataaagcaaaaattaaaaaaaaaaaaaaaaaaaaaaaaaaaaaaa

SEQ ID NO: 220732 - DNA, 1000 bp, Homo Sapiens
cagataactatgcttaagggacattataaaactgttgactgctgtgtatttcagtcaaatttccaggaactttatagtggtagcagagactgcaacattctggcttgggttccatccttatatgaaccagttcctgatgatgatgagactacaacaaaatcacaattaaatccggcctttgaagatgcctggagcagcagtgatgaagaaggatgaatatcatctttagtacctttttgtctctgctgaaactttttaaatgagactgtgtttttttcaactgtatggtctattcctgacagctaaattagccctaaatgtgggtaatatttttcctcatgttttaaaatgaggttaatatttgcataaaatcctaaaacagacttctgtatagtttatttagtcaaaatgtgttccttgatcccagatgttgtggcctgggaaagccctcattgctacagtacaagtaacacaagtcgttgtacctcagttgtgaccttcagcagattttatgaactataagatgcagtctcagaggatcagcaagtggaggccatcagtattgactttctcttacttgctgtactatcagcctgctcgtttccacctttaagaatgattttgccaagaatgattatatcaaaaatagtagttgaaatggtaacatcaaaattattttattctttcttcttcatgtattcacatttttcagtggtttcatttaattaaccatgctttatgttaaacattttggggctcaatgtctcctactatccaaaatgtgcatcacaggaggcttttaactttgtgaaaatcccatgtttgctttattttattttaatgtcagaaggcagtttgcgctaatgcttgaactctttttctgtgaaactcattaaggtatgaccaaatcctgcctcattaattcaagcagaaaatatcctggcagggaatctggcttaaacatgaaatgctgtaataaaatttctatgttattgtctcc

SEQ ID NO: 220733 - DNA, 1000 bp, Homo Sapiens
cacccagtgtcaagtcttacacctgcccactcaagaggcaggagttaatcccagaggtctgtgtcctaatgcattatggcaaatggatgtcacgcatgtaccttcatttggaagattatcatatgttcacgtaacagttgatacttattcacatttcatatgggcaacttgccaaacaggagaaagtacttcccatgttaaaaaacatttattgtcttgttttgctgtaatgggagttccagaaaaaatcaaaactgacaatggaccaggatattgtagtaaagctttccaaaaattcttaagtcagtggaaaatttcacatacaacaggaattccttataattcccaaggacaggccatagttgaaagaactaatagaacactcaaaactcaattagttaaacaaaaagaagggggagacagtaaggagtgtaccactcctcagatgcaacttaatctagcactctatactttaaattttttaaacatttatagaaatcagactactacttctgcagaacaacatcttactggtaaaaagaacagcccacatgaaggaaaactaatttggtggaaagataataaaaataagacatgggaaatagggaaggtgataacgtgggggagaggttttgcttgtgtttcaccaggagaaaatcagcttcctgtttggatacccactagacatttgaagttctacaatgaacccatcagagatgcaaagaaaagcacctccgcggagacggagacatcgcaatcgagcaccgttgactcacaagatgaacaaaatggtgacgtcagaagaacagatgaagttgccatccaccaagaaggcagagccgccaacttgggcacaactaaagaagctgacgcagttagctacaaaatatctagagaacacaaaggtgacacaaaccccagagagtatgctgcttgcagccttgatgattgtatcaatggtggtaagtctccctatgcctgcaggagcagctgcagctaa

SEQ ID NO: 220734 - DNA, 1000 bp, Homo Sapiens
acccagctaggggccaggccgtacgattgggagcccggggcagccccccgcgcagtcaccacgacgcggcacccgtggacgggcgttggctctgcgtggtgggcggctgggacgggtctcgccgcttggccacagtgaccgcactggacacagagcgcggtgtgtgggaggcgtggacagggacccctggtgactgcccccccgccggcctcagtagtcacacctgcacccgaatctctgaccgagagctgcaggtggctggccgggagggcggtatccacactcagcgacgctatggaagcatctacacattaaggctggaccccagcgcccgcacctattgctacaagcaagaaggctgccacacagcctcacgctcaggtcactgtgcggccctgctccaaactcctggaccccatccaggtcatcagctattgctctttggaggttgcaacttagctgaaccagaagtagctgggcattggagtcatgggaaaattaaggaggaaccacctgttgctcctcatttgatggaacagcttgcaaggcttgtgagcagtgggcaggggtcccagaaggggccccatggactacggcatcactcatgttctgtggtcgggccctttgctgtgctgtttggtggagaaactctgaccagagctagagacaccatctgcaatgatctctacatctatgatactcgcacatctcctcctttgtggttccacttcccctgtgcagatcgtgggatgaaacgcatgggccatcgcacctgcctttggaatgatcagctttacctggttgggggttttggtgaggatggcaggacagccagtccacaggtttgcatcctggactttatctaaatagtgccaagacacatcactaagcctcgttttgttttgctttgttgcaaacctataaagcgttatcaccagagctatctgcttcacttcaaatgcttattaaatttcaatctgagactcaaaaaaaaaaaaaa

SEQ ID NO: 220735 - DNA, 1000 bp, Homo Sapiens
atttgatggtaacagtaagtgatttgggtagaggagaggacataaataaatacatggttgttaaagctgatgataatggcatctgtgagccagaaaactctccttggatacgttttctgagaaaaaatagcatgaagcctaaagccatttcttccaaaaacaacattgcaacccttttctttacccttttgtcttttaaaataatcccagaacaccaaaaataaaaacaaacaataacatgtttatctttacccttagcaggaagatgcttggctggaactttgtgttcacagacttagtcattgcataccaaaaccatatttactggaaaatatcccaggtttctaaatgttataaaagcacaatagagttatggaaatgtttccatgatgaactgtgctgttaggattcttatttgctactcataaaaaccagagtttgtaataaaatggaagcatggtattcttttctttatgtaattgatggttattgaaaggtacttgtgaagaaaattattttaattggtatggagagcttgttacagtggtgtaccaaggttgggggtgagcctaccctttcgaggaggagtattttaatcaccaacattgtttagaatttcaagcagatggtgataataaaaagcagaccaacttttagttagctgtattgttagttttaaattattttcagacaatacactattgcccacacatgggatggactctcctaccgcccctacccccttggtacatggctggcttggtattaaagaaattcactgtaaaatctttttagaaagtgagccattttgtaatgatgaagatgttaggacttcaaaggatttttctttactcgattagttttgtttatcaaatgatttctttaaatcgattatatatatatatggaatatttcaaaattcaaactgtcacattaagaaacatgataacctaaatgacctaaataagaacactgtacctaaaataaagaggcaacttta

SEQ ID NO: 220736 - DNA, 1000 bp, Homo Sapiens
aagattccactaggaacagaaatattcatactgaccccaaagagtcaaacttctcagatgttaataccaaccgttctgcattcaaatataccagggctaataacaggactgaaagggaccggatagaacttctccaagatgcagaacctttggattttaatgcagaaacattcactgatgatcctcttgaatctgaatcaggaaggtatcagcctggtggacgatatctctcgatgtctcgcagtgacatatttaatgatgtttaaagtctgaaaaagtttgtgggaccactaaccaaggtcaacacatcagttcagtcttgatgaacatctgtgtaccctagaatttcctctatacacagtgaaaagtgtcaagataacaaaaaaggcactgagaattaattatatcttaggaataatagtttaatgtgcattgaatagagtatcacctttttcaacaagatttattacatatcatttcctaagcatctgccttagaaatacagttacagtggaaggactttaagaaagatcaacatatgttaagaacatgcagttcagtttgtttcagattaattttttttcaagagagttattttaaagattcaaggaagccataagtcatactaaataatattatatacagttttgttattgtgacttacatttttgttacttctaaaaagtatattcaacctgtatttcccaaagaaatgtaagtgaatggagacctcaaataataactgtattcataaaactcgtgtcttaaaacaaggcttacttactagacataactgaatgtaaaaagtgctttttcaaatctgtttgcaaactcgtgggggatttttgcatgtataagattaagattatacttcaagtgatgcgtgtctgtgtatttagcatgtgtactataatcaggtgatatagtattccttcagtctttgtagtaactggatttttttatgcttctggtattgctttataaaagattttcatttcag

SEQ ID NO: 220737 - DNA, 1000 bp, Homo Sapiens
aggggaggagtggccccagaattcagcacgcacacaacacacaagggagagaacccccagatgagaaaataggaaggagcaatcatttgtagatgggtgaaaaaagaatgaggttcaagggagcgtgcaccaggtgaggtgagcgtgtgtgctctcagggaagggcccaggatcccatgcctgggaggagctgccagagagaagcaaaaaggcggctgtggatcgccctgggctgggcaccagtgacaggtcaggatctccaaacatggacgtcctcccctccaaatccagaagctcccagaaggtgtccttaactgcaaagctgtgcagggtactcctccagatggaatcaggaagtcgagacaccatcccaggtgtgtgtaagagagagagagagaacagggaggatacagaagtattgcagcccagatcccctatcagggggacagctggtgggcaaagcagccaccccacagccttgtggctagagtacagtggggtagaccctccagccccaatagccctagtacccagctggcagggttgcccacccctgctgtccacctgctccatcctctagggttccacaggcccctgaccgcacagggaggctggggccagcctggtctcccaggcctgaggacatgcctcccaccaaatgtcccctgctccagtcccactcctgtcaccccacgctctgcactggggagaaaacgggaggtgctcgtgctggccctgggtgggagcggggagtcctggtgagaccccggtgagatggaccatcctgcccccgtgggggatcccctttcccacatccgtgctgtgtcattgttgctctgcttcctttcaatgtgtcagtgcctggggggaggggaggagcaccccctcagcccccctgaacctgaccaaaagccatggctgttgctcccccctttgtatgatgcaaatgctgaaatgtacaaaatcaaccatgacaacaaagaaaaagaccttgtacagc

SEQ ID NO: 220738 - DNA, 1000 bp, Homo Sapiens
cacgcaatagcatcatgcacttgaaccacacagcaaaccccacctcaaatagtaatttcttggacttgaatctcccgccacagcacaacacaggtctgggagggatccctgtagcaggggaagaagaggtgaaggtttcgaccatgccactgtcaacctcttcccattcattacaacaaggacagcagcctacaagtctccacactactgtggcctgacaacagaactgagaggagaggattagactctggggtgcttgcatgggcaactggatttttgcatgattcctttatgattttgcttttaatgtatacacccagaagagccaatataaacgttcctcatgcctacagctagcgtgttacctcatagttgttgaagtatttcttcattaggcctttaacataatttattagtgtaataattttggcattgtttctcatgagtgatactatttctaactcataaaaataaacttgtagtactaagatcccaggtgagattagctagaattgttgttattttggctctattattgaaaaattatacaaaggtaatggtagtatcttgttttctggtttgtgaaaaaataatatcctaatctcctgaaaaatttgcaaattaacaagataatgtctattgcattctttgaatacttgagaagaaagaatacatataaaacaaaattggtggtgtcatttaatgctcagaaggatattgttggcgattgtttttagttgtctagatttatatcctataatatgcattacatgtgtagaaactgttttgttctctctcttttgcacttttgcactttctttttgaatggttgttaattatgcatagatggttaaaagataattattgtagcctaaatgcaatataatctcttttctaatgcactgcctagtataccaggaaatgcctcaaaaacagaacttcagtttatagttgacttatctgaaacttgaatacggagtaaacattgtatgtgaaaagc

SEQ ID NO: 220739 - DNA, 838 bp, Homo Sapiens
atgaggcacaaacctagcgccaaggttggctgtcaaggtagattccagggtgtggaagtggctttgtggtgccacctctaaccgctcggaggtcaacccccattctacaccgaaaactaggccttggctgctatggaaggacagcggcaagaaagccacgcaaccctaacactcgcccaggctcatttcaacaatggagagtacgcggaggccgaggcactgtactccgcttacattcgccggtgcgcttgcgcggcctccagcgacgagagtcccgggagcaaatgcagccctgaggatttggctactgcatataacaacagggggcaaatcaagtacttcagggttgatttttatgaagccatggatgactacacatctgccatagaagtccaacccaattttgaagttccatattacaacagagggttgatactgtataggctgggatattttgatgatgctttggaagatttcaagaaggtcttagacttaaatcctggatttcaagatgctactttgagcttaaaacagactattctagacaaagaagaaaaacaaagaagaaatgttgcaaaaaattattgatatttttaacttaatggaagtattgattcatggtccttacatctgcatctagttatcagtaatttagatattgagctattttgatttatatttaagaaattaatacattagcactgaaagttaaatagtgtgtttaaggtagttaatttcaggttgaatgggttttttttaatgaagtgtaaataataccaatgtataagtgtatattattatattaaatattatagtaaaaagaaaaaaaaaaaaaaaa

SEQ ID NO: 220740 - DNA, 1000 bp, Homo Sapiens
caggctggagtgtggtggcaggatcatagctcactgtaaccttagacttggactcaaacaatcctcccatctcgcctcctcctataaagcactgggattacaggcatttttgctcatttttctatgttgttttttttacttgtcagtttttagatattacatattttgaatactaatgatctgttatgtatgttccaattatcttttttagtctggtttgtcttcatattttggttatgaaatcttgagtttttaaaaacgtaattttaccaatctttcataatgatttgctttttctggtttttgtataggaaatgtcataaaaatagtcctattcagccttccaaaagttacaaaatttttgtttttaacatttagatgtttagtccaactgaaatttgttttcttttatggcatgattttggaatcttgttttaattatttttacatatttatagctgttcctccaagtatcaatttttcaagtgcaacatctgtcatgcagttactatgtaagggccagattctgacctttctgttctttttatctgaaggaaatttgaacatgccacccccaaatatgccgatttggcatactgattatttcgagctaaaggtgcttgactaacagtagttgcagaaatggctattttaactgtcctttcctacctgtagcaagccatacaaacttctttgataaagatgctttcctgataccaagatgagaagatggctctaatcagctgagacagcaccagaggaatctacaaacaagaaactattagtttcttaacatatatttaccttccacagtttctgcctctggaagcctaaaactgctttccttcgtcttgtcacacttctctgaaatgtattctttgtggaagatgctatatagtccagagttgtaagccactacttgtgtttaccttttcattgagttttctcctgtgtgatgtacgttgcatatattaataaaattacttgtttttctcttgtt

SEQ ID NO: 220741 - DNA, 1000 bp, Homo Sapiens; identical to SEQ ID NO: 115332

SEQ ID NO: 220742 - DNA, 1000 bp, Homo Sapiens
ggttgatctgccacagaaaaagcatctttgaagacaaagagggtgaggtcttcatgagtctcctgggcccaaagccatcttctgatggaaggaagagagtagggccagtgaaggctgcccagagagaatgtcacagatgaggctgcccctgccccccccccgccagggaggtttcatgagctcatgtctatgcagcacataagggttcttcagtgaaaagcaggagaagagcccactgcaaggatagctcattaggcacatgaccgatgcagggaaggccatgccggggaagctcttcctgcaggtattttccatctgctgtgccaaggctgagcggcagaaacttgtctcataaattggcactgatggagcatcagctgtggcccacagagagccttgctgagaagggggcaggtaaagcagagattttagcattgccttggcataacaagggcccatcgattccctactaatgagaggcagggagagcatgggcaatggagacccaccaatgatccccaaccccggtgggtactggctgcctgccctgggccagggaatggctccttataccaaagatgctggcacatagcagaacccagtgcacgtcctccccttcccacccacctctggctgaaggtgctcaagagggaagcaattataaggtgggtggcaggagggaacaggtgccacctgctggacaatcacacgaaaggcaggcgggctgtgtactgggccctgactgtgcgtccactgctgtcttccctacctcaccaggctactggcagcagcatcccgagagcacatcatctccacagcctggtaaattccatgtgcctctgggtacaaaagtgcctcaacgacatgctctggaaatcccaaatgccacagtctgaggttgatatctaaaatctatgccttcaaaagagtctctgttttttttttttaacctggtagacagtataaaagcagtgcaaataaacacctaaccttctgcaaa

SEQ ID NO: 220743 - DNA, 1000 bp, Homo Sapiens
tttcataatatatgctggaattggaatctcttgtcatcttgctttgctctgaattttagaactagaagtgtgcatgtatgtcaaaagattatgcagagctattttctttgctaacaatgtaaacatttgcaccccatgaatgggactttataatctggaagtgagcctaaggttgcgtatactgaagtcatgttttaaaagttaaggttgacttaaacatatacaaggctgtattttaattgtaactagaaatcatttactatgcatacagaacctcatgtatcttatcatggaatttgtgaattaatgggccttgccgaattcaagggtaagggaaactggtaacaacttgttttaaatcaacatactataagctcctgcttgcttgactcaagttgtttgaaaatctgaattaaacaggatctcattgtcaggaaacatcttctaagcttgacatctacgtttaagaagggaacgtggaagagaaggtgagacatgaaactaaaacagctgggagggtaggatcagactgcacctgatttttggaccaaagtttcatataggaataaataaaaaggaggaccacttgtgagccaacctaggaaggacttgccagaaagtagcagctcctgctgcaaaatacagtgccttcaaaatgattctctgtgtgaattgcatgcaatttcatgtaaccataaagtgtaacctgtatgtgcatgacatgtgtctagaatgtgtaaagttaggattcagcaggaaggggcctggccctgtcactgtggtggatcagtggacctgctgaagtcactggactcatgtgacttaggtttgcagcatcagacccctgtgtttgcattaagtggccacatcgttgaaatcggatcaatctctccctcagctttctttcctactttgcagctttgctggttttaactgcttcattcttctgcttcttggtatccttttttcttttgaaataaaaacatgaaatacttaattc

SEQ ID NO: 220744 - DNA, 1000 bp, Homo Sapiens
ctaacaagctcaggggtttctgagtctcagaatgacatcccatttcaaaaagaagaaaagagatattgaaatcattctgcctgtttgagagatgactggttatttacagcacaaaaaaaggcttagaatgaaaactagaagaggccttttgtttttcactcccagtgaggagagtagaaatcttaagatgctctactgggctacctgtagcactgactggagtttgctgcctacagagttttgaatgtactagtccttagtttccatagaactgaatgcacctctttagtaagttgctgatttatggtgctaaagaaaatgattattcccatttttttcttcttccccaagccccttaagcatttaagaaaatttaaaataaaagcgttagaggccctttttatgaatgtaacctaagtttctgtttgacatatgacactgcaacttaaaaatgttaggaaattatttgcctttttttttcttttagagttaagctttataaataatctgtagaatcaattgaagtttaaagcttaaggatcactcttaagacgtctacaaaatcttgtatatttttaagtgtgccaatttgtaacatattttgtaagtgtatatttttcttagaaaagtgctgtgaagtgtctgtatgtgagagttttcctttttctgcaccactaggtgctaataaaaggatatttacttcaaagtttctggttttagaaaccacaatacaaagaaaaaaaatacacttttgttggaaattttgtaacacaaaacatgttgtgaaagagtgtagtgatcttgtgcaaaaaaaatgaacatttgtgagcttcttgctgttttatagattttcttgtaaattattcttgtaacacttctggttttgttgttcttgttgcgaaggtttcaaatatttgtgactgaatgtacggtgaaactgtcataatgttacctagctgagttttgttattgtttatgaaataaataaaaagaaaagttt

SEQ ID NO: 220745 - DNA, 1000 bp, Homo Sapiens
taacatagaatctcttggtgctgtcagctgttgggaattgaagattgactttgtgcttccaccctccatccagaaaggcacccttcattccaccagaactttacccaggaagaacacgatcatttcctttttcaccgatgccctctctcagctttctgagtacgtctcttggggtcgctggaggtgatcctaggatctgtctctgagaccaatgtgctgtttcagccccctgcagctaagaattgtattgactgtcctcacagcggcttttcatagctttcagcttcagctttacgaggcttctcctctctccctggcaccctgctggctgcctcactgcttacagacaggtcccaccaaacccaaacacctgcctagggtaaatgggtctctcttctatccccagaaactttcagaggaagcagctcatagaaacatacaaaagcacacaagtattttgggaaaaaatcctaaaaggtgacttaatttgatgccttaaattcacaagtgaggaagctaaggcctagaaggttaaggatgtccccagggtcacacagtgagcggggctcagagcttgagtgtctttgtgctttgtgtacattgtgttctccctagggtgctttagaccctgtttgttttcttctgcatgaggctgatttccagtttgtcatcaacctctttatcttataatttaggatagagttgaacgttagtcttgaaagattttctaaagtagtctttcaaactgttcctcagaggcctaggattttccaaaagtaccttaggaaccttgtaggctgcagtgggggtgtggcgatagagcaggaggcagggagacagggctgcagggcctcccaccttccaacagacaggctctgctgtatctgttgtacatactgggattctgtaaaggacattatctggggtgttgtatgtatttttgtgtgttctgctttttttaaataaacttgaaaagctactgaaaaaaaaaaaaaaaaaa

SEQ ID NO: 220746 - DNA, 1000 bp, Homo Sapiens
ttccccaacacttcaatggcaacagcaacaagtggcacagttttcaactgttcgacagaatgtgaacaaacatagaagtcactggaaatcacaacagttggatagtaatgtgacaatgccaaaatctgaagatgaagaaggctggaagaaattttgtctgggtgaaaagttatgtgctgacggggctgttggaccagccacaaatgaaagtcctggaatagattatgtacaaattggttttcctcccttgcttagtattgttagcagaatgaatcaggcaacagtaactagtgtcttggaatatctgagtaattggtttggagaaagagactttactccagaattgggaagatggctttatgctttattggcttgtcttgaaaagcctttgttacctgaggctcattcactgattcggcagcttgcaagaaggtgctctgaagtgaggctcttagtggtattttgaccaacgtgatttagctgatgagccatcttgatgtagctgatctctcagggatagaagatatttctcatgaaggcagcctaactctgaggaaaacaatgccaattcaagtacagatttcaacacatcttcaacactatgtgaagggttcacatcttaacctgtgcaattcagattgatactcagaatatgggttgatttgaatatctgaaatatcaatggaaaatcccactcagtttttgatgaacagtttgaacagttttctgtaatcaagcagcttgcatagaaattgtatgatgaaattttacataggttcttggtgctgttttgttctttttttgttttttgttgttttgttatttacttatatacatataaaattttattgaaaatatgttttggttactaaaattttgtttgactcctaacaaaagacaatggatggccttagcatcagaattaaaataatctggattaaatggcaatgtgttcatagtcagcaataaaattaaacatttttccctttaaaaaaaaaaa

SEQ ID NO: 220747 - DNA, 1000 bp, Homo Sapiens; identical to SEQ ID NO: 115347

SEQ ID NO: 220748 - DNA, 1000 bp, Homo Sapiens; identical to SEQ ID NO: 115350

SEQ ID NO: 220749 - DNA, 1000 bp, Homo Sapiens
tatagggatgtgatgttagagaactacagaaacctggtctttcttggtattgttgtctcaaagccagacctcatcacccatctggagcaaggaaaaaaaccactgcttaacgaaataaaagaggatgcaaagaaatggaagaacattccatgctcatgggtaggaagaatcaatatcatgaaaatggcccatactgcccaaggtaatttatagattcaatgccatccccatcaagctaccaatgactttcttcacagaattgaaaaacactactttaaagttcatatggaaccaaaaaagagcccacattgccaagtcaatcctaagccaaatgaataaagccggaggcatcacgctacctgacttcaaactatgctacaaggctacataaccaaaatagcatggtactggtaccaaaacagagatatagatcaatagaacagaacagagccctcagaaataatgccacatatctacagctatctgacctttgacaaacctgacaaaaacaagcaatggggaaaggattccctatttaataaatggtgctgggaaaactgtctagccataagtagaaagctgaaactggatcccttccttacaccttatacaaaaattaattcaagatggattaaagacttacatgttagacctaaaaccataaaaaccctagaagaaaacctaggcaataccattcaggacataggcatgggcaaggacttcatgtctaaaacaccaaaagcaatggcaacaaaagccaaaattgacaaatgggatctaattaaactaaagaccttttgcacagcaaaagaaactaccatcagagtcaacaggcaacctacaaaatgggagaaaattttcgcaacctactcatctgacaaagggctaatatccagaatctacaatgaactcaaacaaatttacaggaacaaacaaccccatcaaaaagtcggcaaaggacatgaacagacacttctcaaaagaagacatttatgcagcc

SEQ ID NO: 220750 - DNA, 1000 bp, Homo Sapiens
tagaaagctaaaaagttaagtacatacatattctccgttttgtgcttgcattttgcatcaggtcataagggtaaaagcagttagttgtattgtggagttttgcatgggtgcagttaacaatggatgtttcatcagctgagtttaatttagtattctctcttcattctatttatttggtcttgaaataaattcttttgcattcatttaaatattaggattgatcaggaaatagtgtttgtaatctacacgtttatttgagccttactttaaaaatatttctgaacagagatttaagctctgtcagtattttcatttactgatagcatttatattttaaatatggcattgtatatttcattattatccttcataacagaattataatgagaatatgaatttgttatttttcttgttggtagatgtgaaatggtgcttcaaaaaatatatagtctttctgtatgtctctgtgtgtgtaagtatgtgtgtgtgtgtgtacacatattttaaagtatgaattggtcctttaaaaacaggcctgccatctgaaaatgggaaattgagacctgagacctgctaaagcatagaagaacttgatataggtagggtttttttttttttttttttttaatagatggagtctggctctgttgcccaggctggagtgcagtggcgtgatctcagctcactgcaagctccacctcccgggttcaagtgattctcctgcctcagcctcctgtgtagctgggactacaggcacgtgccaccacacctggctaatttttggtacttttagtagagacggggtttcaccgtgttagccaggatggtctttatttcctgacctcgtgatccacctgcctcggcctcccaaagtgccaggattacaggcatgagccaccgtgctggcctaggtacaggtttttaaaagccccacagaagtttataatacgtttaaaaacccatattaaaatttgaaaacttaaaaaaaaaaaaaaaaaaa

SEQ ID NO: 220751 - DNA, 1000 bp, Homo Sapiens; identical to SEQ ID NO: 115353

SEQ ID NO: 220752 - DNA, 1000 bp, Homo Sapiens
aactccttccctgaaaccagcaaacaccgggaaacattttggctcattataatccggtgaacaatgcagtcaggcctgttataaccgctgagcagccacactcgcacctcctgggtgctgtagtctgtgttggtacaggcttctgcatgcctggtaaagtccagccaaggctggtcaaggcaacatctccacacagaaaatctgcaccagttatgtaagctaaaaagctgtgtgaacccaggtgtcccggaaaggggctgcaggacacagcaaaatgccagcagcgtgccggacccctcccttccatcctcctctccaaagaacagaggtcaggaaaaacactggctgggacgctagaagggtcatgtgttaactataatcacatttatggtttggaaccatcaccccaaggtaaaaaaaaaataaaaggtattcccaggtatgtttggcaaaataaaataaaggtaattaaaaacctaagaaatggctgtaaactgagattacaaaaaaccagaggccttttgggagccacaggctgggggctggggccaacataccccagctctgggaccaaaagcctttggagtcctgtccctggatacagatgctcaggccacccacctagcactcctctcatttttgctgctcccccaaaagccagcgctgttctacaatagttcaggtcagacatctaagatccccaggccaaaccatgccacacacgtgtctgttccgaggtcttgttacaaatgaccaaaggttagcctagacctttggtcaggtggtgaaggccctgggaatgcaggttctagaaggggtgggggcatggggcccaggaggttgctagagataggaaatggggcaaatcgcaggtgacctcagcagtacctggatgattcccaccaaggaggaatggccaaaccagatgggtgagaacaagcccaatgtgatgcacacctacccttgctaaataaacgctgctggtcagcctctagcccac

SEQ ID NO: 220753 - DNA, 1000 bp, Homo Sapiens
taaatccattcaacacatctctctttcaattctcatctgtgaaacaatttgatgcttcaactcccaaaaatgacatcagtccaccaggaaggttcttttcatctcaaatacccagtagtgtaaataagtctatgaactctagaagatctctggcttctaggaggtctcttattaatatggttttagaccacgtggaggacatggaggaaagacttgacgacagcagtgaagcaaagggtcctgaagattatccagaagaaggggtggaggaaagcagtggcgaagcctccaagtatacagaagaggatccttccggagaaacactgtcttcagaaaacaagtccagctggttaatgacgtctaagcctagtgctctagctcaagagacctctcttggtgcccctgagcctttgtctggtgaacagttggttggttctccccaggataaggcggcagaggctacaaatgactatgagactcttgtaaagcgtggaaaagaactaaaagagtgtggaaaaatccaggaggccctaaactgcttagttaaagcgcttgacataaaaagtgcagatcctgaagttatgctcttgactttaagtttgtataagcaacttaataacaattgagaatgtaacctgtttattgtattttaaagtgaaactgaatatgagggaatttttgttcccataattggattctttgggaacatgaagcattcaggcttaaggcaagaaagatctcaaaaagcaacttctgccctgcaacgccccccactccatagtctggtattctgagcactagcttaatatttcttcacttgaatattcttatattttaggcatattctataaatttaactgtgttgtttcttggaaagttttgtaaaattattctggtcattcttaattttactctgaaagtgatcatctttgtatataacagttcagataagaaaattaaagttacttttctcaagtgttttcaaaaaaaaaaaaaaaaa

SEQ ID NO: 220754 - DNA, 1000 bp, Homo Sapiens
ggaggaaataccagcccaggaagcagcagggtcaccaagggtccagtttcagtctttggagacccagtctgagtgtctgtccccagagcctcagtttgtgcaggacaccgacatggaacagggactcactgggggcatacttctccgccttcccaccacccggattcatagtgtgaattcctgcccggccctgagtcatacccaggcaagtgctttctctggagaaacacttgccgtccttacagcaggaatctccaagagatggcccaagtatcggcttcccatcgatattgctcgtccctgctcggaaactccttttccacgattgtgagatattaaaattgactgatggaatagaagctccccaggatgccaccactgtgtaaaatcgcagctcctcaaattacctctgtttaatttcaaatgttagggtccaaggaagccctctgttgcaaccagatatgttttgaacccagttcattcagaaaccatggttggtggtcatcatctacttgtattgtgaaaaaccagaaattccaaattcagctcttcagttatggtcttttcatattattttagaatgtgaaacttatgctgtgtgcccctccttttatgtggcgaacacaacctgccccgtatggtgcctaactctcctgtgaaccctgggcttccctcatgtttaacattctggtttcctccttccttgaagtccctgtggccctcttcaaggtcctaccttcctaccctttattctttgtggttctgtacagattgatgcaattatattgcctttcctgattaagtgttccttactctgtccttgatggaggggagaagggagggcaaagaagttaaatttatttcagggcatcaaattgaatatctacttaataactttgtaaactgtaaagtgacatacatataattgtaaagtactgttaattttatctaataattacagagtttccaacagttaaaaaaaaaaaaaaaaaaaaaaaaa

SEQ ID NO: 220755 - DNA, 1000 bp, Homo Sapiens
cctttcaggagaccttgaagtatcaggtggcccctgcccagctggtgacccggcagctgcaggtctcggtgtggcatctgggcacgctggcccggagagtgtttcttggagaagtgatcattcctctggccacgtgggactttgaagacagcacaacacagtccttccgctggcatccgctccgggccaaggcggagaaatacgaagacagcgttcctcagagtaatggagagctcacagtccgggctaagctggttctcccttcacggcccagaaaactccaagaggctcaagaagggacagatcagccatcacttcatggtcaactttgtttggtagtgctaggagccaagaatttacctgtgcggccagatggcaccttgaactcatttgttaagggctgtctcactctgccagaccaacaaaaactgagactgaagtcgccagtcctgaggaagcaggcttgcccccagtggaaacactcatttgtcttcagtggcgtaaccccagctcagctgaggcagtcgagcttggagttaactgtctgggatcaggccctctttggaatgaacgaccgcttgcttggaggaaccagacttggttcaaagggagacacagctgttggcggggatgcatgctcacaatcgaagctccagtggcagaaagtcctttccagccccaatctatggacagacatgactcttgtcctgcactgacatgaaggcctcaaggttccaggttgcagcaggcgtgaggcactgtgcgtctgcagaggggctacgaaccaggtgcagggtcccagctggagacccctttgaccttgagcagtctccatctgcggccctgtcccatggcttaaccgcctattggtatctgtgtatatttacgttaaacacaattatgttacctaagcctctggtgggttatctcctctttgagatgtagaaaatggccagattttaataaacgttgttacccatgaaaaaaaaaaaaaaaaaaa

SEQ ID NO: 220756 - DNA, 934 bp, Homo Sapiens
gggctgcggagaggcgggccgggccaagcggagccaagcgagcgggagcgcggcgtccgggaggcggcggagacgcggggctcggagggtcagcctcttatcgtagcaggtctcctcggcacgccccccttgtttcgccccacggccaagcccgccgcgggccggcgtgcgctggtcactgaggcccaggtcgccgccgcggcgcgtttttgaaatcatgaatcctgtttatagtcctggatcttctggggttccctatgcaaatgccaaaggaattggttatccagctggttttcccatgggctatgcagcagcagctcctgcctattctcctaacatgtatcctggagcgaatcctaccttccaaacaggttacactcctggcacaccttacaaagtgtcctgttcccccaccagcggggctgtgccaccgtactcctcctcaccacaggctgtgcccatgagtccctgtgcagaccagtgggcaaggcagctgggccagatctcaggccagccgtttgtgctcctagcagggttgctgtgctggccacacggagaggccctagagagcctcatggattgtaactaaagaagaaacggttcctttttgtttttttaaaaatgatttttaaataccgttttttacaccgttctctcggtactttttttaagctaagtcagcattgtcttccagtgttaaaggcatccctcacctctgcattgaacttacgtatccatgccaaggaatggaatttccatcctgagccagttcagttaggtgtcaattgatactattttaattttttatgcaatctgatgagatgagctcagatttaaaaatctcaaaagcacgtttattgtaacaagaattgttatgtattaatactgcagttttcaataaagattgacttgtgttgcaaaaaaaaaaaaaaaa

SEQ ID NO: 220757 - DNA, 1000 bp, Homo Sapiens
caggggcatccgagcatgggcggcccaatgcagagggtgacgcctcctcgtggcatggccagcgtggggccccagagctatggaggtggcatgcgacccccacccaactccctcgccggcccaggcctgcctgccatgaacatgggcccaggagttcgtggcccgtgggccagccccagtggaaactcgatcccctactcctcctcatcccccggcagctacaccggacccccaggaggaggtgggccccctggaacacccatcatgcctagccctggagattccaccaactccagcgaaaacatgtacactatcatgaaccccatcgggcagggcgccggcagggctaatttcccgctcggccctggcccggagggccccatggccgccatgagcgcgatggagcctcaccacgtgaacggatccctgggctcgggcgacatggacgggttgccgaagagttcccccggcgccgtggccggcctgagcaacgccccgggcaccccgcgggacgacggcgagatggcggccgccgggaccttcctgcacccgttcccgagcgaaagctactcgccagggatgaccatgagcgtgtgatggggcggcagccccgggcctctctgcgggcctaggcttctgcccagcgcccctgctcagggcgaggggctgaggtcacacctcgggcacctggactcctggccaatcaaggcttgcccagctgggaggccccacacgaaagactcttaccattttattaaaaacgcaaggacctcagagacgttcttttctgtatggacccttcctgccatttgtattttgtcccagagagaaaggctctttggggggcccctctccccaggacgtcagggggtggggcccataaataaatggaagctggttttggtttttggtagcttgtctcagattccctctttggccttctgccaccacactctccaccctgtggtcttgttccgtccccgcccccatctagccccac

SEQ ID NO: 220758 - DNA, 1000 bp, Homo Sapiens; identical to SEQ ID NO: 115357

SEQ ID NO: 220759 - DNA, 1000 bp, Homo Sapiens
gggctgaccggagccgggagaacaacctggcctcagggagagagacgctaccgggcttacgccaccccctctcctcaacacaagcccaaactgctacccgcgaggtgcaagtaagcggcacctcagaagtgtctgcgggccctgaccgggcgcaggtggtggtgcgagtgagcagcaccaaggaggcggcagccgaggccaaaaagagcgtttgtcgccgtctagattacatcacgcagagcctccagcagcagggcgtgcaggcagaaaatataactgtgacaaaggattttaggagagtggaaaatgcttatcacatggaagcagaggtctgcattacatttactgaatttggaaaaatgcaaaatatttgtaactttcttgttgaaaagctagatagctctgttgtcatcagcccaccccagttctatcatactccaggttctgttgagaatcttcgacggcaagcctgtcttgttgctgttgagaatgcgtggcgcaaagctcaagaagtctgtaaccttgttggccaaaccttaggaaaacctttactaatcaaagaagaagaaacaaaagaatgggaaggccaaatagatgatcaccagtcatccagactctcaagttcattaactgtacaacaaaaaatcaaaagtgcaacaatacatgctgcttcaaaagtatttataacttttgaggtaaagggaaaagagaagagaaaaaagcacctttgaaattccaaacaaattatattgtacttgtatctttttacctatttttatactttttataatgtttacgtttgtcctgaatatatatatatatatatatatatatatatatatggtataggagataagctatttctttccaaaatctataaatctttgaatatagtcccacagaatacttatgttcactttctatttttaaaagactactctgaaaaacactcttggataataaatgtattatgtgcatacttatatactgacagttcata

SEQ ID NO: 220760 - DNA, 1000 bp, Homo Sapiens
tgcactccaacctgggtgacagagcgagactccgtctcaaaaaaaaaaaaaaattatttgggtttgaaaggccaggggcagtggttcatgcctataatctcagcacaatagaaagccaagacaggagggtcacttgatgcctggagatcaagataagtatgggcaacgtagcaaggcccatccctacaaaataaaaaaaataagccaggcccttggcatgtgtctgtagttccagctactcaagaggccgaggcaagaggattgctcaagcccaggagtttgagagtttgagcagtgagctctgatcttgccatttgtactccagcttgggtgacagagcgagaccctgtctcaaaagaaaaaaaaggctagtttttatgacttcaacctgaactttgaaatttcttcatgtgccttccctacaggcctttcactgtggtctgggaaagaatcagtaagatgacagggctgacttcattagatgaggagcgtttctatccagtttcctggaggaataaggacactgccttttcagattaaagattgtctgatttagagaccatggaggtggacagagaataacaaaaccgtgatggcagtcatcatgcttattgcagttagcacacacttttcctgacaggcacagtgctgctgtgctctacaaatgaccatgaaatagagcacgccatgactttaggacacagggatttttatgggaagagagttcatcagggactgattacgtaggagagacgatgcaggggaaatggtggccaccgtctccattgaatagcaatagctgctgtttagcaaagactgattaaaaagtactctgatttttcaaatggaagagagaacagttaaatcagagtagagagtttaatcaaaactaccagtggaacatgttcttgagtaggattcacatttaactgctggcataatttgcaactgttggattttctcatgtttggaacaataaagttgaaattttccaaagtgt

SEQ ID NO: 220761 - DNA, 1000 bp, Homo Sapiens
ggttttgtcaaagttttacgaaaatatatgatatatatttatactaaaactatataatccttagatttaggaaagcaatcagttaatgtctttagcacactaaagcagtattaaacacaggtacaagttggaaattgtagaaaactgaaagaaaacaagacaaaatgtctatggtagggaataaaagagtttaagatattatgtaaaattatgtgtattttcttctcttttacataaattgtttgtgaaaagtgtgctcaacttttttacaagagtgatattaacttggatttatttttcaatataatttggagaccctttgttatccaaataaaattgatgagtttctgtgcctgtaaaaaaaaaaaaaaaaaaaagaaaagaaaagacactgttgcatgccccagaaagcttgtggtgggtggtaagttctcacgagatttatttatctgagcaacattgggactgagggaacatctgaaagctaccatcttgaaaatttttgaggaagtgtttctgaaatatttaaaaatacttaagtcagtcattttgaacaaaagaaattgatacaataagtttttttttttaaggatgattgtctaattttgtaatatgttgttttttaaaaacctgtctgatggtgttttatacatttctaactttttacctgagttatctctttagtcttttggaaaataccctacacaatactaacctttaaaactatcaaatttttgttataagataaatgttatctttgtactagatagcaaccctttataaggttgtaaggtataataaactgcttatttttttacatacttcatatcaagcattttgcagtccaattatatagttgaggatggtgtattttgatatgtatgaagttaatattttcaagtaagcaatcagtctactaccatcagattataagcttttttgtaataataggtacataaaatgtgtatgaaaaatctacaataaacatgtttatctgata

SEQ ID NO: 220762 - DNA, 1000 bp, Homo Sapiens
aaaaacaaatgaggaaacaattctagaacaatcagaaatgatgaaaccagaaagtccagaagagataagaaagtcaaatgagaaaaaaaatccacagccaccagaggagactggtccagtgctaccacaggagatcaacccacaagttgaagagaaaacacaaacaaagccaactgagaaaattctagagttaccagatgaaaccaaaccaagggagacacatgtagaattttccaaggaagacaggccagaaccaataaagtctaagtattctgtaggaaacgatgagctagagcaccgtgagcctaaaagaggaaagttgtcactaagtgacaaatttagaaaagaatattacgcattaggatctctcagagaaagtgaagaatcaattggtacacattatgagtttttgcaaccactccaaaaattgcttaatgtcagtgaagaatgctcatactcagatccctcagagtctcagacagaattaagtgagttcgttcatgaaaaggaagttgtagatttgtcccaagagttgaaggaacgggtctctgaagatgacgaaacccagccagaaaaagggactgagttacaatttgagcatcttaattgggatccagaggaagttgcagagtggattagccagctaggcttccctcaatacaaggagtgttttatcacaaacttcatcagtggccgaaaactcattcacgtcaactgctcaaacctccctcagatggggataacaaactttgaggacatgaaggcaatttctcggcatacgcaggagctcctggaaattgaagagccattattcaaacgctccatcagccttccctatagggatattatcggcttatatttagagcaaaaaggtcatactgggataaaatctgattccttgactttatctgaatttgtcaaagcagcaggattacaggattatgctccagaaataactgcccctgaagagaatgaggaattaccttgcactgaaccatag

SEQ ID NO: 220763 - DNA, 1000 bp, Homo Sapiens
atatagtacacttaccaggaatcgagttagacaaccagaaaagcccaaagaagatttgctgaaaagttctaaaagcatgcacaatgtgactcataacttggaggaggatgaggaggaagttaccaagagaaactctccaagtggcactactaccaaatcagtttccattgctgctttacttgatgtgaataaagaggaatctaacaaagaacttgcttcaaagaaggaagttaagggttccccaagttttttgaaaaaggggtctcagaagttaaggtcattacttagccttaccccagataagaaagaaaatctatccaaaaataaagcacctgccttttatagattgtgtagtagctctgacacattagtttctgagggtgaagaaaatcaaaaaccaaagaaatcagacacaaaagttgattcatctcctagaagaaagcattcttcctcatcgaattctcaaggcagcatccacaagagtaaggaagatgtaacagttagcccatctcaagagataaatgctccaccagatgaaaataaaagaacaccttctccaggtccagttgaaagcaagttcttggaaagggcaggagatgcctctgccccaagatttaacactgaacagatccaataccgagattcaagggagattaatgcagttgttacccctgaaagaagacctacttcttctccaaggccaacgtccagtgagcttctacgatctcattcaactgatcggcgtgtttacagtcgttttgagccgttttgtaagattgagagctctattcagccaacaagcaacatgccaaataccagtataaatcgcccagaaataaaatctgcgactatgggcaacagttatggcaggtctagtccattgcttaattacaacactggtgtttatcgctcatatcaacccaatgagaacaagtttcgaggatttatgcaaaagtttggaaactttatacacaaaaataaatagctattaaaatgcaaa

SEQ ID NO: 220764 - DNA, 1000 bp, Homo Sapiens
agcatcggcacagccaccagttacggcttctccttactgctccttcacaggcagaagccgagccgacgccccggcgcgggcggcaggaaatggccagcccaggcttcgggcgcaggtggacctcagctcggcctcgtcggtgctggtcactgtcctggacgccaaggctctgcccctgactctgctgtcctggggcagcttgtgcgcaactgcccaaaaccacaacaaccaggaaggtgcaccagcccaacccaaaggctccatggctaaccagagggcccttcgatttccacctccttcaggaagcccccctgggctgcacaccaggatgaggctgaccagtcctccccaaccacactttgagccccctcctcccacaacagtgggtgctcccaggtccctacagggggactggtttggcagtgattccagggccgtccgggcgctgaggctcataggctgggcttcccgaagccttcatccgttgcccggttcccgggatcgggcccaccctgccgccgaggaagaggacgaccctgaccgccccattgagttttcctccagcaaagccaaccctcaccgctggtcggtgggccataccatgggaaagggacatcagcggccctggtggaaggtgctgcccctcagctgcttcctcgtggcgctgatcatctggtgctacctgagggaggagagcgaggcggaccagtggttgagacaggaagggagccgacagccgcccttcggatttgatgtcacgtttgcccgtgactgtcctggctatgcgtgcgtcctcagcactgaaggacttggctggtggatggggcacttggctatgctgattcgcgtgaaggcggagcagaatctcagcagatcggaaactgctcctcgcctggctcttgatgtccaaggattccatcggcaagacttctcagatccttggggaaggtttcagttgcactgtatgctgttggatttgccaagtctttgtataacataa

SEQ ID NO: 220765 - DNA, 1000 bp, Homo Sapiens
tgttaaacaccaaagagttcacactggagaaaggccttataagtgtggtgaatgtgggaattcctttagtcaaagtgccattcttaatcaacaccgaagaattcacactggagcaaagccttatgagtgtggccagtgtgggaaatcctttagtcaaaaagctaccctcattaaacaccagagagttcacactggagaaaggccttataagtgtggtgactgtgggaaatcctttagtcaaagctccatccttattcaacaccggagaattcatactggagcaaggccttatgagtgtggccagtgtggaaagtcctttagccaaaagtctggtctcattcaacaccaagtggttcacactggagaaaggccttatgagtgcaacaaatgtgggaattcctttagccaatgctccagcctcatacatcaccaaaaatgtcataacacatagaggcctcatgaatgcagcaaatgtggaagcgccttcaactcaagatctatcatcatttagctcctgaaagtccacacttaagtagagccttagacctacagggaaagtgctgtctctgtagtattgtagcagtagagagcctttgtgagggagccatctgcctgaagttgaacctcattcttccttgtttctctggtagaaaccatctaccctctaccaccttgcacagtgggcactggtcactcctatgtgctaagacaaggcagacatctgtgtgttctcttaagtctttggaggaaatcttgagcagtctaagcctttagagaaaattcattcttttttctgactgatcacagcatacgtgtgacccagtttgggtcaggagggcccagccttggttctgctggacacttatgtgcaaggattcccttcatgtaaattcttggtctcacatgacacttggtcattcttccagcctccatgtcaccacgtggtgaatggctgcctcacattgctccagtttgtgcactaataaaagccttatatttg

SEQ ID NO: 220766 - DNA, 1000 bp, Homo Sapiens
ggagggagaggttcatccctacccttctgcaccccctcattattattttgaagaaaaagagtggcctgaccctccagatctttcttttccagaggacagtgggcaaaaattagttgccccagtgactgttcaagcagcacctcgagcgactgctcttagttctattcagtcaggaattcagcaagctagatgagaaggtgattaagaggcttggcagttccctgttagactacactgcccagaccaacagggaaatattgtagctacatttgagcctttttgttttaaattactcaaagaatttaaacaagctattaatcagtatggaccaggttctccttttgtaatgggactattaaagaacattgctgtttccagtcagatgattcctactgactgggacgctcttactcaagcttgtctaactcctgcttagttcttacaatttaaaacttggtgggcagatgaagcttccattcaggcttctcacaacacgcaggaccaacctcaaattaatataactgcagaccaacttttgggggttggcagttgggctggtttagatgcacaaatggtcatgcaggatgatgccatagaacagcttagaggagcgtgcattagagcttggggaaaaaaaatcacttcaagtggagaacaataccctttctttagtgctataaaacagggaccagaagaatcatatgtggattttatagctcagttacaggagtctcttaaaaagatgactgcagatttggctgctcaggatatagtgttgcaattattagctttcaacaatgctaatcctgattgccaggctgctctgtgacctatcagagggaaagcacatttagttgattatatcaaggcctgtggtggtatcagaggtaatctgcatcaggccacctgctagcacgggcaatggcaggactgagagtggatacagaaagtactccatttcctggagcttgttttaactgtgggaagcatggtcatactg

SEQ ID NO: 220767 - DNA, 1000 bp, Homo Sapiens
taaaaccctctctgccaaaacctacactccactttaggcccttcttgaagatgagcacaatttttaaatactgagcacaatttttaaatactgacatcacttcctcttccccctcccaccccagctcagcagcctcaaatctacagagaagaagaattatggcatgaacattcccacagacccaccatctttaagacttgacctctgtaagtttaccaaagggctcctcacaattgtggtgggggttctggttcaaaatttggagcaaacatgaagtttttggaaacgttttctcatttgaagcctccagtatgctgtactattctggaaattaccttcaagagtctcacttcttgtttctgttgtgttttctgtgggcatcatgttcttcacgcttgcagtagaaggtgctttctcggtttcccagagtatccaacggctcacctttctcaagtgctggcagtagctatgcactcacgggctggtttgggtcgctggtgcagcagcgcaaatctgttgccttctgaatttttctcacctaatgtgacactggctacaatgaatcttctcttcatcgggctgaatgaaagattcaagaaccatcttcaaggtgcatggtgggaattatcaacctcagggatactcattttaactcaggcgtgtcctgctttgtaacattccattgttgggagagggcaggacaggtgtgttcttctgtgggcaggagtcatgtcactgtcctacatatgtaagagttgggaaggtgacgatttttgacacatccaggaactcttactctagttagaatttgtaccagatccaaggtgaaaaccccaataagcaactgaatttagagtttaaaaatgaatgactttatgctacatctgtggttatcaaattatataggttgttgagaagcagaacgctgtttgtagtaagaaatctttgtggaaccccagtgtgtgaagtaaattgtatgttattaaatttatttaaggtt

SEQ ID NO: 220768 - DNA, 1000 bp, Homo Sapiens; identical to SEQ ID NO: 115360

SEQ ID NO: 220769 - DNA, 1000 bp, Homo Sapiens
atcacttcagagtctaaaaccagattactaatcgtgtgtaaggaggcattttgtgtgtctttgcaatgtatacaattggattatttggaacaccattttgaatgtgtatttgagagaaagctcgcctgtgggttttgagttgtggtgtaatggtgaacatgtagccacgtgaaaggccgttggatctttgttctgattcttcagtcgtcttcttgcaaattcagagaaatgtcttttaatcatttcgtttacatatcccagatccttggaaatcatgaaaaataacttgccagagtttgcatcagccctcagtaagtcatgaaccatagagaaggtcatggggccatttattctttggaccactggctacttctgaagttctggcttccttctctctaggaggagtcgtgtattcaagcttttaagttaaatgcataaaaatgagttttacttctcttctgacttgatttttaattttatgaaatgggaaataatgtttttccatttttctgttcattttgaagtgggaatttgaggtgtttgtaatgtcatgttactgttctgaaagattgacagtaaagaagacaagaaatatatgtatgtagtatgcatattagttttgtcccaccaagcctatctttgaatggcaaacattttaaaaacatctgttctagttgcacaactactctagcttctttataaagtaaacaatcttaaagtaagcaatgttggccataatttcaatattctagccttgccgagtgtgaatatattttactcagagactatgtacaaatacactaaagtggtgatggtgatcaatattgtaaagaatttattctgataaatgagaaactggatataatgtcaaaatagctattttctcaataaaaatctcaaatctcaaaaaaaaaaaaaaaaaaaaaaaaaaaaaaaaaaaaaaaaaaaaaaaaaaaaaaaaaaaaaaagtaaaaaaaaaaaaaaaaaaaaaaaaaaaaaa

SEQ ID NO: 220770 - DNA, 1000 bp, Homo Sapiens
ctcacagttctggaggcagggaagtccaagataaaggtgctagacaattaagttcctgatgaggttccaaggtgctagctgattcttcttcatggtttgcagatgaatgccttcttgctatatgttcacatggtggagggagaaaccatctctcccttatttcttattgtaaaggtactaatcccatttatgaaggttccagcttcaaatgccatcacactggagattagattttcaacatgtgaatttaatgggggacaccagcattcagtccctagtgctctgatagagtattcattaatgtcatgtatttgttaacatcttgtaagttatttgggctttgatgccttaaaagaagaccctgacctcatgatccacccgcctcggcctcccaaagtgctgggattacaggtgtgagccactgggcccagcccacctctgtagttctttggaataattttatgattaatttgattagaaactcagttctttggaataattttatgattaatttgattagaaactcagttttttttttttctttaatttttgagacagcctgggtgacagagtgagactctatctcaaaagagaagaccctaatgaaaatagtaaacctttagcaaatacacaaatgatgccccattctgtattctttttaattttaaaaataatgacacacacatacaggaagataaaaggtataaaaatatactaagtactttttaaaaaggaaaattcatgttttggattattactgaattgttgctaattactgtaatgtaagtcatatgtccttacatagttttgaaaaatgctttctttaaaaatctaaaaaaagtgtgaataactggtagtcattgctgtatcattgatgtatcactcaatttttggtaaagaattataaagatcttacctagaaactatgtaaaaaggtattaaatatattgtgatgtaagaataggataataaaaatgtaattttaaaaaaaaaaaaaaaa

SEQ ID NO: 220771 - DNA, 1000 bp, Homo Sapiens
ggcggtgctggacctgcacgtcaagcaccacagcgccttgggctacggcctggtgaccctgctgacggcgggcggggagcgcatcttctccgccgtggcattccagtgcccgtgcagcgccgcctggaacctgccctacggcctggtcttcttgctggtgccggcgctcgcgctcttcctcctgggctacgtgctgagcgcacgcacgtggcgcctgctcaccggatgctgctccagcgcccgcgcgagttgcggatcggcgctgcgcggctccctggtgtgcacgcaaatcagcgcggccgccgcgctcgcgcccctcacctgggtggccgtggcgctgctcgggggcgccttttacgagtgcgcggccaccgggagcgcggccttcgcgcagcgcctgtgcctcggccgcaaccgcagctgcgccgcggagctgccgctggtgccgtgcaaccaggccaaggcgtcggacgtgcaggacctcctgaaggatctgaaggctcagtcgcaggtgttgggctggatcttgatagcagttgttatcatcattcttctgatttttacatctgtcacccgatgcctatctccagttagttttctgcagctgaaattctggaaaatctatttggaacaggagcagcagatccttaaaagtaaagccacagagcatgcaactgaattggcaaaagagaatattaaatgtttctttgagggctcgcatccaaaagaatataacactccaagcatgaaagagtggcagcaaatttcatcactgtatactttcaatccgaagggccagtactacagcatgttgcacaaatatgtcaacagaaaagagaagactcacagtatcaggtctactgaaggagatacggtgattcctgttcttggctttgtagattcatctggtataaacagcactcctgagttatgaccttttgaatgagtagaaaaaaaaattgttttgaattattgctttattaaaaaataaacattggta

SEQ ID NO: 220772 - DNA, 1000 bp, Homo Sapiens
atgaagatgatgaccaccgtcagactgtgaagcagggcagccctactaaagacatcgaaattcagttccagagactgaggatttccgaggacccagacgttcaccccgaggctgagcagcagcctggcccggagtcgggtgagggtcagaaaggaggagagcagcccaaactggtccgggggcacttctgccccattaaacgaaaagccaacagcaccaagagggacagaggaactttgctcaaggcgcagatccgtcaccagtcccttgacagtcagtctgaaaatgccaccatcgacctaaattctgttctagagcgagaattcagtgtccagagtttaacatctgttgtcagtgaggagtgtttttatgaaacagagagccacggaaaatcatagtatgattcaatccagatatgggttaaattcctcattttacttttaaactggtggtaaagtggaaattgcaaaaaaaaaaaaaaaaaaaaactgttcattcctgggttttgtgcagtatacattttcccacaaaatggttgtaaagatttaagttattttaatttattgtggatcagaaacctagatgaaactggtcagaatctgtaaattacttagtttatatccactttgagcaggtatcaaatgatttaggatccttaaaattacattctaataattaagttatgtggaaaaagtaaggctggggaagtcgtgattaatagttttcaaagggccattttttaaaatcctctgggcattttctttcagctgtttgttagtttttgctttatttaaagcatatttaagttattttaatgtggtttaggggcaaaatgtgcagatacttcatttttgtaagatagattgtaatagatgctgtttatactaaacatgtcataactatctatacagtatatattaaaagaaagcttgtactgtatcttatttgatgatatttattttctctgccaagctgtatagtaaaaggaaaataagtcaca

SEQ ID NO: 220773 - DNA, 1000 bp, Homo Sapiens
tgtccacggaagaggagatgagaaatgcaaacaggttctcaatgtttcccagctggtatatggccctgaaggatcagatctggttttaatgaagcttgccaggcctgctgtcctggatgattttgttagtacgattgatttacctaattatggatgcacaattcctgaaaagaccagttgcagtgtttatggctggggctacactggattgatcaactatgatggcctattacgagtggcacatctctatataatgggaaatgagaaatgcagccagcatcatcgagggaaggtgactctgaatgagtctgaaatatgtgctggggctgaaaagattggatcaggaccatgtgagggggattatggtggcccacttgtttgtgagcaacataaaatgagaatggttcttggtgtcattgttcctggtcgtggatgtgccattccaaatcgtcctggtatttttgtccgagtagcatattatgcaaaatggatacacaaaattattttaacatataaggtaccacagtcatagctgaagtaagtgtgtctgaagcacccaccaatacaactgtcttttacatgaagatttcagagaatgtggaatttaaaatgtcacttacaacaatcctaagacaactactggagagtcatgtttgttgaaattctcattaatgtttatgggtgttttctgttgttttgtttgtcagtgttattttgtcaatgttgaagtgaattaaggtacatgcaagtgtaataacatatctcctgaagatacttgaatggattaaaaaaacacacaggtatatttgctggatgataaagatttcatgggaaaaaaaatcaattaatctgtctaagctgctttctgatgttggtttcttaataatgagtaaaccacaaattaaatgttattttaacctcaccaaaacaatttataccttgtgtccctaaattgtagccctatattaaattatattacatttcaaaaaaaaaaaaaaaa

SEQ ID NO: 220774 - DNA, 1000 bp, Homo Sapiens
cctcaaaaaaatacataatgacataatttagtttcatgtaatgaaactttgtaaacagaatacatacatgtgtatatgtaaagaatttcaatcaaatgaaacgttatcctattggatagactaggcaattcatcagctcacctgaaatcagccaggaggagcaaggacaagatgcgcacagggtggttttcctcatggattttgtcaaatagatgatctttgacacgattagacactcctccccacaaaggctttgaaatcataaggattttcctcatctctttatagctttcccaaaatcttttaaaaaagaatttaattaaatgacagtcttttggttacagacttaggatgagtaaaaacaagaaaatttggggagggggagaaagaagaaagggattgctgtctcccttgaattcctctgttccttagagcttgtgttacttggacggaattgccaacacccttttttatagagggttctccacttgaccttattaaggttttattgggatatgctgcagtgtttgaaatgaacatgcatcatggccccttcaggagcagaatcatagctctgaaaagagaagctccgttgtgtactgaggatatccatccatattcagctagctttcaaatggggtaatgatattttctgcatagattttcttttaaattggttctttgtttctgaagaaagaattttttttaacttcatggttttatttataataatttgtttctgaagaaatttgccgagagttacaggtcaaaaagccttgttactagtacagaatatttttatatatattccttcatgatggtgtaattttttttaattgtcctatgctttgttcggttcctgggttaagtacttgtttttaagagcttggaaaaagtgggcttgctacatctctgttcaaagagacatttgttcaatctctgtgtgtcaacgccttgttgaattggtgctttgtggttgcaataaagcattgcttcagtt

SEQ ID NO: 220775 - DNA, 785 bp, Homo Sapiens; identical to SEQ ID NO: 115367

SEQ ID NO: 220776 - DNA, 1000 bp, Homo Sapiens
ccagtttgtcagaatgaagttctggagtctcagattaatgagcacttggactggtgccttgaaggtgacagcatcaaagtcaaaagcgaagaaagtctttgaaaaaggtttcaaagtctcaagtaccacctgtattatctcactaatgtgctatgtcagccagtcaggaagttctggttaatactaagatttgtaggttataatctagttcacataaccaatagaaagtgtcctattttatatatacgcatataagattgtaattttaagatgttttgtgtctcagggtgctacattcactcttgccttaggtatactgtaacccaggttctgcctgtcgtgtataagttttagatacttttgttctttcttgctcttaaggattttaaaaacctgttaatctttttatttgtatactttcctaaaaatattcatatggggaatcctgtcaggtgtttggttatattgactatttattaatagtattagaactcattccctgaactgatgtaaatcttcatagtgtcagacatactgaccaaaaccacaatctagactacaaagtatattgttttagagtactcaaattgtattatttattaatttttttgtttgcaaaatcttaacaggaactgtattttctatattttaaagaattttatttgtcccacttttactaaacagtggcagcagattttaagttaaagaatatggaatatagtaaaataagtaaatttcttttggaatatttttagtaacaaatagccactataattctgtaggccaaattttatattgagtttagctgttttctcaaaatttagcagagtggttaaaattctgtgctgataagtaactgatacatataacataaacataacaaagttgcctagttgatgtaacagtggaaagttatctggaaatagtattttgaactttaagccaagtttaaaacattataataaaaggaataccatttgtgcaaaaaaaaaaaaaaaaa

SEQ ID NO: 220777 - DNA, 1000 bp, Homo Sapiens
aaaacaaaagtctctatattctttgcctattccaaagagctaaaaaagtctaacccaggaaagcttttgatattttgtgtttgttttcttgttcttatggttgttgttgctgtattatgattgctgttttacataaaatctatgggaactgtgaatacagacaagagagccacagtagagaggcttgtttaatgcagtaccattggagagttaacagaataatctagtagaaaaataactggttgcatgtaaaattccttccagccagaaagaaagaaagacaaggagtaagggggatttagagttatgtctcagctacacattacattgtgatactgcagctcaaattcagaatggcaatgatacatgatatcatggcctagatccttgagagggacctggctttcctttttaaaagatattttactgaagagctaaaaactggccagtgtggggttagcagatcgaataacttgaaatagaccgtgcagtattcctagcactcaatgtaatcaccctatttgtgacagagaaagggaaaaaaatataataagatcatctacctataatttgaataattttgagctatcaaaatgtctttgtaattttcacaaccgctgtccattgtttgaggatgttacctactaaactgaaaacattcattccatatctacttacacatacaccagcaacagtataaatgtaagcctaactttgcaaaattcgtaataatttagtgatggaattttttaataacatgcagtatataaatgtgcagattttatgcgtgttgacaaaatcatttttcagcttgcaaaatgggactgcaatattacatttttcacttaagcagttttttacatctacgttgttgctttctaaaatgaatgtgaatgccatcttttatgactgcaacttgccttttccattacagaaatttttgtttgatgtaatcaataaactttggtatgatatgattgataaaaaaaaaaaaaaaaaa

SEQ ID NO: 220778 - DNA, 1000 bp, Homo Sapiens
atttcactgtctcgaaatgattttcagtccttgttgaaaatgcacaagcttactccagaacagctggattgtatccatgatattcgaagaagaagtaaaaacagaattgctgcacagcgctgtcgcaagagaaaacttgactgtatacagaatcttgaatcagaaattgagaagctgggttctgtggaaaatctgatgtgccaagaagtgttccataccattctgagaactctggatacctgctcagacagctctgtttcagctaaacagtaacatctgggagggaagcttaatgtggaatcaaggatgaagtttaacacaggaatgagaagtagagcacatagctgctaagataaggctggagtctcagctcattgcaacctttgcctgccaggttcaagtgattctcctgcctcagcttcccaagtaactgggactacagaatgtaatcatcgcaaggccaggagatgcgtttggtctgtgctgcatctcaagcaggacaatggctggaacatagtagggtctccaaaaatgtttgttgaacgttgctgatggcggcatcctggagtaggaaaaagactgaagagtggaaaaagaaatcctgacatgaattctgggcaaaggcaagcagtagctgacttggaaaatgattacactatagatggcagcacaccactacctacgatccgatcaccagcctgggtttgtaagtcagagctgttggtcaggagatggcagctaatgagtaatcagtccaaactgaatggcaaattaatgtcttcattaagtgaacaaaccagcttcctccataaacaaggtcagagtatttataacccagtgtatttcataaaagcaaaaacgcatctccatttacataactttactatggagctcatgatttatctgcacaaagcatatgcaaaatctcacttgtataccgtctttaataaggacccatgccattctgatgtaattattaataaagtcacacttgataacc

SEQ ID NO: 220779 - DNA, 1000 bp, Homo Sapiens; identical to SEQ ID NO: 115370

SEQ ID NO: 220780 - DNA, 1000 bp, Homo Sapiens; identical to SEQ ID NO: 115371

SEQ ID NO: 220781 - DNA, 1000 bp, Homo Sapiens; identical to SEQ ID NO: 117887

SEQ ID NO: 220782 - DNA, 1000 bp, Homo Sapiens
attaccaactgttgtatttagaccaacttacaatatctagctcattagaagccaggatctagaaagctccttctaagccatttaagatattcttacattgagcttcatattatagaactttataggattggatattttacaatagaataatttagcctcaggactgagaatgtggaagctgaataaattagctttaaatacatcattaaaatcttatgcacaataagctcattagattctagttttctcctttagaataccaatgccacagacactacaggagataatgaaaggtatcagttgtgttgagtggagggagtttaagagaaaggacccttcccaaccagcagccagtagaaaatacaacctactcacctttttcccttctaagttctgctaaatcacatctgcctcatagagaaaggaatgttgcctttgagaactgtcttggagaacagataagcttgaaatgttctctctagagaggacatagggtttgggatcctctgaaaaggcccagaaaaatagctcagttcaaatacaatgttctaggacaattggaatataaatattgtccaaaaatataattaaaagaaaaaagtttagcactgtgtaaagtaagtgttaactgaggaagtcccaaaaaggtgctgtcactttaagttctggacttggggttctttgtatttgtaaacagcaaagcatttgtgtttgtttgtctatttgtaaagcaaccaccttccttattggaaggagaaaaaaaggggtacatacatgtaaatacttgctgcagcatttaatatgtttaattttgtgttaagctttttgttgcatcgtgaacacatttattgttaccaatggacaatgagttcattaagactgttcaactaggtcagatttttacatctctttctagcaagaagagacaagattttgtgcatttgtacaaatgttaatatcactgcaattccaatataataaagcactcaaatgcaaataa

SEQ ID NO: 220783 - DNA, 1000 bp, Homo Sapiens; identical to SEQ ID NO: 115375

SEQ ID NO: 220784 - DNA, 1000 bp, Homo Sapiens
tacatataatcatatatatgcctatatctaaacgttttccctcctttaatattgataaagttaatatattttaggatgttatgtaaatatttttgcatgtatctgtagctccatcttaatcaaatttatggttaaaagagatttgaggccaggcgtggaggctcacacctataatcccaacactttgggaggccgaggtgggaggatcacttgagcacaggagtttgagaccagcctgtgcaacatcatgaaacatcatctctacataaaaaaatacatatatacaaaaattagctgggcatcatggcacacacctgtagtcccagctacttaggaggctgagatgggaggattgatcgatcgcttgagcctgggaggtggaggctactgtgagccatgatcatgccactgcactccagcctgggcaacagagtgagaccctgtctccaaagagaaagagaaacttgagaaggcttgtgcccaaagcttgaagaaagattgtaatagcatttagttgtgttttatcatgttatcttcataacatgcattttgcatatggctcagagcagagccggatctcccaaggaagcacaaatagtttttgtcgctaacttagttatgagtgaagcctctgttcacttataacttgccagtttcattggtggaataagtccccttactcatgattcatcaatattcctatattaaaattccagtttgatgtttgtctctagttgtctgtgtataatatttccaaagctcctttgtaaaccccgtctcctttcattcagagagtcagagacggtatctcctcctcctgcctcttctattgttctgattagtctacttaaattcacttgatgctctttttattttacaagagacttgagaaatgtcggttgttcctaatggcaaactactttagctgggaaaattcatttcaacttattttaagcttgtaaaatacactgtggtgataaaataaaagagctgggtttga

SEQ ID NO: 220785 - DNA, 1000 bp, Homo Sapiens
catctgagaggtctgacatttcattatttacttatttcctagcttttctgaattaatgcactcttaacatataattatattaatcctatttgtgctagaatagttgtatctaaatcatattttaaaattatttttatttttaaaaaattatggtaaaaacatataaaatttaccatcttaatcactttgagtgtacagttcatcagtgttaactgtattcaccttgtgcaacagatctcaaggactttttcaccttgtaaaactaagattctctatttattgaacaaatccccatttcctccttccccaagtctctctcaactgaaattataattttttgtttctatgagtttgaatactttagataccttgttgccatggtttgaatgtgccccccagatttcatgtgtgtgaaacttaatctccaaatttgtatgttgatggcatttggaagtggtggggactttgtttatttatttatttttaattttttaattttatattattattattattattatactttaaggtttagggtacatgtgcacaatgtgcaggttagttacatatgtatacatgtgccatgctggtgtgctgcacccattaactcgtcatttatcattaggtatatctcctaaagctatccctcccccctccccccaccccacaacagtccccagagtgtgatgatccccttcctgtgtccatgtgttctcattgttcagttcccacctatgagtgagaatatgcagtgtttggttttttgttcttgcgatagtttactgagaatgatgatttccagcttcatccatgtccctacaaaggacatgaactcatcattttttatggctgcatagtattccatggtgtatatgtgccacattttcttaatccagtctattgttgttggacatttgggttggttccaagtctttgctattgtgaatagtgctgcaataaacatacgtgtgcatgtgtctttaaaaaaaaaaaaaaaaaa

SEQ ID NO: 220786 - DNA, 1000 bp, Homo Sapiens
cagcccaccttcccacggactggggttccctcacatgtgcacttgaacccaggacccagcatcctccacacaccgtgacaatgggcaaaatcatcccaaaccaggctgccccagccccagcccagcaacagtgaactcccttgggtcaagacagtactcaacggccactacctccacgcttcccagagcctgcggcttgtccgtgagctccgtgcacttcaccaaagcccccatcccagcacacaggacccgtgtgtatgagacggtgtcattggaagtgagaagaaaacagtaaaagtgtccagttagataagtatctttttgcacctctgagagtagaattagaagtaaatatgacagaattgaacaataaattctagaagagttgccttgattcaaacaagtataattctcaagttatcacaaaatttcccacaaaaatttacaatcagcaaaatagtttccttatttctcatgtatcattttcatataattccatggtttcactaatattatatgttacaataagcctccattagtccctcaaaacgatgatataaataagtctgtacaacctagcatagaataaaaaactgaaaccaagattcccaacgtttttcatagcagccgggcacactttggtgaccccaacgagaaccctctcggcagcagccaggagctgttcaccttccagaagcagggcctgtggcagcctaacagggagaggccacggggcccaaaaacgcaacacgtctcaaggcaaacccgagggaggaacttggtctgggaggaagagagaactcgctcctcaaccaccccagacactggagtgtcaggaaagcactgagctgttggggcacactgcccagcccggccacagcagctcagccagtcacagctccacctccaacttctacagcagcaatttttagtgggaaagaacagctcatctccccctcatgtgaaagattaaattgtaaagcaaaaaaaaaaaaaaaaa

SEQ ID NO: 220787 - DNA, 1000 bp, Homo Sapiens
cagaactgacgttaaaatatgcgaaagattcagaacctaggtttagggtacatgtttttctctgtttcatgaacttacagtgtggtttgagcactgggttcttttagccaaattccatacaaaaagaatttggatgttttccagcatttattaccttactttgctataagtaagagtgaagataggccgggtgtgatggctcatgccagtaatcccagcactttgggctgaagcaggcagatattttgagcccaggaccagcctgggcaacatggtgaaagctcatctctatgaaaaaatttgaatatacatatatatatatatgtatatttaaaaagtgaatataatttgaggcacagaagaatattcttaaaaccttttgtattatacaatagaaataaaggttttatttttattaaatgctttcctaaaatgatagtggataatagacaaagtgaaaacatttaaaaaggaagagaaacttcagcctttctaagttgatagcatgtttattaacttttagataaagatccttatagactgaaagaatgtagcctctgcattaatggtaaatggtctagaagttttcgtttccactgaggcttccgccactcgcttttttaaacttcctgctatggtttggatatggtttgtcctcaccaaaactcatgctgaggcctgagtccccagtttgattgtgttggtaggtggtgcctttaagaggtgattaggtcattgagatggattaaaggctttctcatgaggctcagttagttctggaatggattcgctcttgcaggaatggatgaattctcacaagagtgggttgttatgaagtgaggatgcttcttgtgttctgttctctttgccctcctcagttcaccatctgctttccaccatgagttgaagcagcatgaggccctcatcagatgggctccctgatcttggactcctcagcctttggactcataagccaaaataaatctgttttctttataaa

SEQ ID NO: 220788 - DNA, 1000 bp, Homo Sapiens; identical to SEQ ID NO: 115378

SEQ ID NO: 220789 - DNA, 1000 bp, Homo Sapiens
gctcccaggtgcagatgggcggccacccgactgaggtcctgtgcctcatgaacatggtgctgcctgaggagctgctggacgacgaggagtatgaggagatcgtggaggatgtgcgggacgagtgcagcaagtacgggcttgtcaagtccatcgagatcccccggcctgtggacggcgtcgaggtgcccggctgcggaaagatctttgtggagttcacctctgtgtttgactgccagaaagccatgcagggcctgacgggccgcaagttcgccaacagagtggttgtcacaaaatactgtgaccccgactcttatcaccgccgggacttctggtagaggcggctgggggagggtgggggcagggctggctgggggcttctccccactcccgccccccccttatccccctctgaagacgatgggcagaggagtgacagccgcagacacacgacagccggcagcaactggaatggcagcaattaagggtggggggcgggggttggggggttggggggttagggcagggaggggactggggaagtgcgcacacagcccacacagacaacacgcacccacacagacacagagggaaggggttgggatggggacagggtgcacagcagggcggggtaggaccccagcccctcccaaaacagcctctccttctcccatagacccctttcttctccccttccccacggtaggaacatagcgtgtttatattttatggccaaactattttgaattttgttgtccggccctcagtgccctgccctctcccttaccaggaccacagctctgttccttcggcctctggtcctctctggtcccctcctgggtttcttacgtagttgatttttcctctttagtctcccccgacctgcgcccagccccgtggcccctgcccctctcctactctctgtggcagtttcatatttgctaagacgaatttgctcattaaacattttgttgtattttactttaaaaaaaaaaaaaaaaaa

SEQ ID NO: 220790 - DNA, 1000 bp, Homo Sapiens
cagtgtaatcagttcacaagaatagagaaacaaacaaaacacatgaagaaatatcctaaaaggcctgattggaatataaataagccacctaaaaggtatattccagcatcagaaaagtaccctaaacagcttcaaaagcagagagaagaaaaaaaagtaaggaggcagatggaattgcttcatttggtagaaaaaaataatcctgggcacctctctcaaaacagaggcatttcaccagaaatttttcattcatctcatcaagaaacggagtcaaagttgaggtggcatctagtcaaaaaggaagaagagcctctgaatattcattcattcagcaaggaaaggtctccatcatcaccagttccagtagtgaaaaacagaacccaacaaactcaaaatacattacatttaccactaaaaaacagtagctatgagagagagaatttgatctcaggaagtaatcaaacagaattatcatctgggatttctgaatcatcccattttattccgtatgttcgaacaaatgagatctattaccttgatcccgatgcaccattgtctgggccttcaacccaggaccctcagtaccaaaattcacaagactgtggccaaaaacgacagctatttgattctgactgtgtcagggatccacttcttaatcctaacatggtgaaaaatagggatcgacagcaagcaatccttaagggactttcagaactgagacagggccttctccagaagcaaaaggagttggaaagtagtctcctgcctttagctgaaaatcaagaagagagttttggttcttcattttaaatgtagaaaatcaaatccttcacatttgatttgtgtcttccaaattataaaatgtgctcactggctcaactgtatttttcaaatagcctagatttacttatttttttaaatgctcattaaaaacttgtatactatgtagtaaaatgctgtacttgttctatacaataaaacagatacttcttttgtaaaa

SEQ ID NO: 220791 - DNA, 1000 bp, Homo Sapiens
ttaaatcaaaactgatctaaatcagaattattaaatgtgaggagcttttttaatacaggaaaagaaacatgtcatccacttgagttaatagttttcctacgttgatgacagccctcatgagtagcatccacatttttaaaatttcaaattggtttttctactagtagattgtgtttctagagaaagatacaaggcataggtgattgtttaggattttcctctagcctttgccattacctttttggggatgaggttcacagtagactttgagtgaccgtcccaccgtgaagtgaattctctgagctggtggtgtggtgctggaaggaaggttatttttggagccactctctccccttaaggatatttcccaagggcctgcttcaattctttgatgactttagaggtgaaaaaatatttttatggagatgatgcagaaaactccaattcaggagcccttgcgagtatatctgaagcacttatttgctaaggaaacctgaattgatagcagtactgtgctgtctggaataatgtccttgatactgagttgggaccagactggcttttatagtgacaggcaaagaggaatttattgagatcactgctcatggcatttgttgctgtaagaagtgttgcctttgattgttactaaccacggatgggtaacggtcatacattaggctagtgtttggtaggacaaaatctttttagagctttgagaattgtcatcctgttggtcaactttgaaatacaaatgtttgccctggtaattagcaatgaactgctggcagtttcttcagctgtgtatatacggatctggcttttaattgatgaatcaacttctacagaaacttttgcagggacagtgttgatgaggcagtttagcttgccagggtgatgataaagcccaggtccctgcatgtatagtgctcttctaaagaatatgcattcttgaactacttaactttttaaaaatcacaataaatttttgcactcaaaattt

SEQ ID NO: 220792 - DNA, 1000 bp, Homo Sapiens
gtggctttgccttggatattcctcttcctctatcaaggccttctcttcttctctgtgtcccacaactctggcctcatcgccctgggactcccatctgctaagatagtggctttggaggttctggaagggcttagtgaggaggccagaagtatcagggaaagttgctggtgatggggtgggcggtgtcagaagcagccactgttttcccctcttcagacactgagagattaatcagggaatgaaatccaggtggaaattatttattgtgaagcagacgactgtctgtcctgtttatgacaaacccaaatgagaattggagggactaccagtaagtggtctcttcatgctctccccatcccagtttttaggatgaaatttagagcctggccttttgtgttgcttgcaccaaatctgtatgtctcaggtgaaactcactgttccatgaatggtcatccttttttttttttttttttggaaccagcccctttcaccctttcatccgtcttttttttttaggaaaataacccttcttgcttcagcacttctccctggtccttgctgaaagacagagataaaaatccattctctgagccttgcttggttgtcagaggccatgagaggtgccagttataggtggatgtgccaagatgctggtgaacttggtcttcagctatacccaggctcagaaagggcaagagccatgctgcagcgtaggtgactttggaggtgcacttggggcccagggctttgagtgttgcgggtgtgcctgtccctccagatagtgctctgtttctctctgttgtccccctgcctggtcctctggggccactgtgctttctgctgtgtgcatttataaatgatgtgtattttatatagacctgcttgcattggctgatgctcctctaattccctgagtttgattcaaccacccttgggttgttttgctatggccttagcctttgaaaatattttaaaataaaaaacttgatttttctagtgt

SEQ ID NO: 220793 - DNA, 1000 bp, Homo Sapiens
gagctggccggcacccttcgacagggactggccaaactgagcgaggccctcagcgctctgctgccccttctaccaggaaccccagttgactccctgcctccacctctgcccccacccccacccccaccgccacctcccaggcctgtcctgcccccaccggcccccaaggtggagatcaccccagagcccgtgtccgtggtggctgctgtggtggacggggcagtggtggcagccaggggagtgatcattgccccaaggagcgaggagggggcaccccggccccccccagccccgctccctccgcacgactcccccccacacaagcggagaaaaggtttccctacacggaaaaggcgcggccgatggaaatctccgtgaaatctactatctatgatcctgcctgcaacccctctccccagcttggcgcagtcgaggggggcgatgctctctgcccatcccagctgcaccctagctccctgctccagggatgtgagcacccactccctgtgctagttagtgcctgattctctggggggggcctcagtaatgggcccccccaacccctttctctggtacagtgctgtctgcctggctgcctcccttaaccctgacttctaagccatcaatttcatgttatttattattgccctatgtggggtggggagggaacctctcgggtctgcacatctccccttccctaacagttcctgttcttgacttgaagagaattgacccgtgggggactccccacctccccaacccagactttggagcgggtgggagttgtaagacaaatcaaaatacggatgacaaagaggatatagccgtgtataccccagggagaggaggcgccgagttctgatgggagaggtacaggttgggttctctgcctaccattgctgtctctgacttccagagctcaaccccctcctttctcccagtggtgacaagatatcaataaacttatttttaatacaaaaaaaaaaaaaaaaaaaaaaaa

SEQ ID NO: 220794 - DNA, 1000 bp, Homo Sapiens
gtctcagcctcccaaagggctgagattacaggtgtgagctacctcacctggccaaaacagtttttttagaaatgaagtatattagacaacaacaaaaggaacaactaacctgaaatatataataactttgaacttaaatatacttaacaacatataccaaaaatatatgaggcaaattttagcaaaaattaaaattcttaagaaaacttcactaatatatagtcataatgtggtatattcatagaacattctcaataattgataataacagtccaaagaaagcagaaagaaggaaagcctagaacagaaataaatgaaatagagaatagaaaagcaatacagaaaaaaaattatgaaatcaaaagctggttctttgaaaagatctacaaaatggcaaacatttagctagattgaccaccccctcaaaagactcaaattactagaatcagaaacaaaagtcaagattttattaccaaacttatagaaataaaaattattagaaagaaatactatgaacaattgaatgccaacaaattagataaatgaaatggacaaattcctaggaagacacagaataccaaatctgactccacaagaaatagatgttgtgaatagagcttgctatggtatgaatgtgtcccccacagctcatgcgttggaaacttaatccccaaagcaacagctttgagaggtgagacctttaagggttactaggcagagcccccatgaatggattaatgccattattgtgggagtgggttagttatctcagaagtgggttcctgataaaaggatgagttcggccttcttcttccccaaaatctttatccccacccccacctctatctttctctctctctcttacctcctcctctcccttccttctgccatgggaggatgaaacatgaaggccctggccaggtgtggcccctccatcttccgtctgagactggaagacttcccagccttcagaactgtaagaaataaatctctcttcata

SEQ ID NO: 220795 - DNA, 1000 bp, Homo Sapiens
atttccaaaataaattacacaaatgtcacttttccttttctattccatagtactagttttagccagatctttgccaaacattctaggacattcagaaaagtcatccatggaattttggaatgccattctctctgtatctttgcagatcatgaggaaggaaagttgatgaactagtacgggatggctcagacttgtaaagtgtctaagtcacaacgctgcagagccagcttccgggtagcaatggcatggcctcagctgtgccaaggctacaactggagcttccttactcgcatctgaggcaaacacagcaaggctggcccaggccgcccacagtcaacagatgttcacgggagatggatcagcccctcttttgcttgttctatcaaggaaagagatctaaccatgggcaagggtggaacacacccggttcaggtcagggaatgagttgctctaagtgaacagtgaattcttacttctcagcctgtatcaattgtacccagggttcatgattactgtgacccactaagggatgatctttgaggaaacagacctggagggaggtaatttaaggagggaaagcgagtgggttttacagactgctttgtggcgacattcaggaacagaccattcaatggatgacttttcagtacataaaagcaagcagtaatggccaggagagagcaaagatgccctaagaatgacatcagactgaccaaatgtgccttttcaaataagttatgagaacgaatgaattggaattagagcaaggtattggacagaaccatgctagtctttgagagaacgtgtggattgggtggatgtttggaccgaatgaatggtaactttttaatgtgaaacagagaactgatatatgggctgtcatgtcaccctagggtactgtcgctctgtcatgtgtagcaatctttccaaatttttgttggtgggctgaacaaagataaaactaataaagtatgtgtggataccactagaaaaaaaaaaa

SEQ ID NO: 220796 - DNA, 1000 bp, Homo Sapiens
cttgtgttgatgagagaataatcttgggcagtctgggaaaataaggaaggcatctccttcttactcatggagattcaactatagagagttgaaacctaaacccgccttccttttatagaagctggactagagacggactgaccatcagctctgaactgtggctttttttgttcacctatgatgccatgtaccaaattcagaagctatcgttaataatttgttttataattgagtagtacaagcgaggaaaaaatacggaggataaccactatttttgtgcaaatagtatgaaagtgaagtaaaagcaatagaagaaatttctataggatctgggtttagagtgtgtatcattaataaatatacctttgctcttttcagggaaaataacaaccacccttactgatagttgggaaaagaagattgggttattttgccatatcatttagctggaagtgacatttaaaagcaccctgcatcactagtaatagtgtattttgctattctgcccttgtaatcggtgtccctgtaaaacaatccccacagattactttcagaaatagatgtatttctctacgtaagggccaggtttattttctccttttttgagatttctagaaaaaatgctgcttgcacatgttggttcttgaaaccttagctagaagaatttcaggtcataccaacatgtggataggctatagctgttcagaggtctcctgggggagcttaaaacgggggaaacactggttttcacagatgctccacatggctgtctttaaaagactcaaaacttttttttgtcctctttgttatgcttggaagctcccccccccccaacagtgtgtcgagtctttgcaaagaaacctttagatgtggttcatagatatatgaatacgtatctgtgtaaaacagtgagtgtgcagtgtgtaaatactttaaattattatgctagaaaaataaagttacataccttgctgtggaaaaaaaaaaaaaaaaaaaaaaa

SEQ ID NO: 220797 - DNA, 1000 bp, Homo Sapiens
aacctggcaagaccgcctgcccctgcccagactgaggctctttcccaactgttctgctcagtgaggacactgactgccaaggaggagcttctgcagaccctgcggacccacctgatcctccacatggcccgagcccacggctactccaaggtcatgactggggacagctgcacacgcttggctatcaagctcatgaccaacctggcgctgggtcgaggggccttcctggcctgggatacgggcttctcggatgagcggcacggggacgtggtggtggtgcggcccatgcgggaccacaccctgaaggaggtcgctttctacaaccgcctgttctccgttccttctgtcttcacaccagccgtcgacaccaaggcccctgaaaaggccagcatccaccggctgatggaggccttcatcctcaggctgcagacccagttcccctccactgtcagcactgtgtacaggacaagtgagaagctggtgaagggcccccgggatggccctgctgctggcgactccggcccccgctgcctcctctgcatgtgtgccctggacgtcgacgccgctgacagtgccacggcttttggggctcagacctcctcgcgtctctcccagatgcagtcacccatccccctgactgagacccggacacccccggggccctgctgttctccaggggtgggctgggcccagcgctgtggccagggggcctgcaggagggaggacccccaagcctgcattgaggagcagctgtgctacagctgccgcgtgaacatgaaggacttgggcctggggcttgcaggagatccgggactgtctgattgaggacagtgacgacgaggcgggccagagctgagcgtgaggacgtgcttgccgggacagcaggcagtggccacctggtacaccacactggagccggaaggcaaggacgggggactggcctctgattgtccatttgtataaataaaacattttttaattaaaaaaaaaaaaaaaaaaa

SEQ ID NO: 220798 - DNA, 1000 bp, Homo Sapiens
cgcacccggccaactttctgaaatttcaaaactgaattgatccttctccaaattagtatatactattggaaacttgtctttccctgcagtaaggctggtttccccaccccagaaacatgtaacggttggtaccatgctaagcccttgccatgctaagccctttacagtcatatcctataatccccatatcaaccttataaggaaggtgtttgtagatgatgcaactgagccttaagaggactaattccctttttctaaggcacagagctggtaaaatgtgaagtaatagtgaacctaacagtcagagacaggcagcatgctcttaactagtgctcttcctaaagttcctttaatgtccttttgagattttgagccatggaacttacttgttcacctggctaagaactcatggccactgtggaaatcttggttagggagtcaaagaaactgagcctggggcaaacgaggcttcccacactgccaggggagcctcactgtgaagtctaggctcagacaggcatcaacaaacctattcaccccaccatcatcctgatctaaccattccccagtcatcccaggaaaaccactcacagcctgacactgggctgactttcttgaagatcctcatccaattggtgtttttcagaagtgttccaatattatgaattctgtgttgtggagaaaagcaaccatgcatttactggtcaatgccttcttgtatatgtaattcaatacttttacttttaatatcctcaccttatctaatctttgaattttgtcatgtaatttattgcttcattaaggttactttttgttatacaaaataaaagctgatatccaaggcatggtgcatcttgatgattttttgtcctttgaagtatggatgatagaaaaatgtatcaggtttattcatctcatctttctgttacaggatgattaattgtacagttacatcacacgaaacatttataataaagtcatgctttagaaaaaaaaaaaa

SEQ ID NO: 220799 - DNA, 1000 bp, Homo Sapiens
attgaaattacagtagatttttaagaatataatattttgggttttctagatatgaaattatttcacctgaacatatagatcattttatttcctcttaatgtttatactgattactgttacattagctggatttttcaaaacaatgttgaagagtgatgacagacgtgactgtcttgttcttaattttcatggaagtaagaatgcaaaatattaatagggaatagtattccctattagtatgacatttacttttggttattagtaggtagtcattaacatgtttaagagtttccgctattcctgttttatagtgttattgctagaagtggttcctgaattttataaaatgccttttcagcatctattgataaaattgtatgattttttttctctttaatttgttgatgtaatgaattagaatggtaggcatttgatgtggaaccaaacttgtatttctggaacaaatactacttggtcattgtgaaataatgatttgctacatgagtggattttatttaccagtatttaatttagaattattgcattttcattccaaagtaaaattgtattttgtccttctgatgctatctttatcaagttttgttattgaagttgtgctagctttaaaaaaatatgaatatgtgagttttcaatttttttcctgtggtctggaataatttaaatagcattagaattatttgtttgttaaaagttagctaggacaaagtgtaaaacaatctaatcctgatgacacttttaatagtagatttttaatcagctttgtgatttctttaatagttattggtttattcaggctttttattaaaaaggtatatacattctctgtgacatacaaagttaaaagttctctattattgctgattgtactggttgttgcttgttgactgtactattcagatggctttatgcttttgtgtattttatgtcacctagatctaattctgaaaacattgtaataaaataattagctataatggta

SEQ ID NO: 220800 - DNA, 1000 bp, Homo Sapiens
agatgtttcaaactattcatcagcttactagtagccctgaagatattctaatggtcacaaaagatgtcataaaagaatttgcagatgacggcgtcaagtacctggaactaaggagcacacccagaagagaaaatgctaccggaatgactaaaaagacttatgtggaatctatacttgaaggtataaaacagtccaaacaagaaaacttggacattgatgttaggtatttgatagcagttgacagaagaggtggccctttagtagccaaggagactgtaaaacttgccgaggagttcttcctttctactgagggtacagttcttggccttgacctcagtggagaccctactgtaggacaagcaaaagacttcttggaacctcttttagaagctaagaaagcaggtctgaagttagcattgcatctttcagagattccaaaccaaaaaaaagaaacacaaatactcctggatctgcttcctgacagaatcgggcatggaacatttctcaactccggtgagggaggatccctggatctggtggactttgtgaggcaacatcggataccactgggtaaggcttggagtttcaggtcttccagatgactctctgtctctcccccaatccccaggttgcctggggattacagagaagtactgttctaaaagtacgaatgtcatctagctattaaaagatggagtgtgtgctttctgagccttatttaaaacagaaagctttagcttccattagaatataagctctatgagagcagggcccctgcttgtcttattcgttgttacattctccaatgcttggaactcaataagaattttttaaaggaataaagggtcatctagaattttaaaatgactttaacaaaattgacatgtgttatgaaaatatgtaacattatttaaaaattaaacatggaaaatcccaaaaaaaaaaaaaaaaaaaaaaaaaaaaaaaaaaaaaaaaaaaaaaaaaaaaaaaaaaaaaaaaa

SEQ ID NO: 220801 - DNA, 1000 bp, Homo Sapiens
gcaaaagaaactaccaccagagtgaacaggcaacctacaaaatgggagaaaattttcgcaacctactcatctgacaaagggctaatatccagaatctacaatgaactcaaacaaatttacaagaataaaacaaacaaccccatcaaaaagtggtcaaaggacatgaataaacacttctcaaaagaagacatttatgcagccaaaaaacacatgaaaaaatgctcatcatcactggccatcagagaaatgcaaatcaaaaccacaaggagataccatctcacaccagttagaatggcaatcattaaaaagtcaggaaacaacaggtgctggagaggatgtggagaaataggaacacttttacactgttggtgggattgtaaactagttcaaccattgtggaagtcagtgtggcaattcctcagggatctagaactagaaataccacttgacccagccatcccattactgggtatatacccaaaggactataaatcatgctgctataaagacacatgcacacgtatgtttgttgcagcattattcacaatagcaaagacttggaaccaacccaaatgtccaaccatgatagactggattaagaaaatgtggcacatattcaccatggaatactatgcagccataaaaaatgatgagttcatgtcctttgtagggacatagatgaaattggaaatcatcattctcagtaaactatcgcaagaacaaaaaaccaaactctgcatgttctcactcataggtgggaattgaacaatgagatcacatggacacaggaaggggaatatcacactctggggactgttgtggggtagggggaggaaggagggatagcattgggagatacacctaatgctagatgacgagttagtgggtgcagcgcaccagcacggcacatgtatacatatgtaactaacctgcataacgtgcacatgtaccctaaaacttaaagtataataataaaaaataaataaataaataaataaat

SEQ ID NO: 220802 - DNA, 857 bp, Homo Sapiens
atggtaattggaaatctgagctcacagtgacgtgacccttaggagacccagagccaatgcgtggattagtccctcctcctagttgcagtctggtagttgtcgctggccgtgtgacggctcgctgttgccctgaaggcaggcgagccagctgcccaggaaaggtggaaagtggtagaagctgacccctgagccctggcaggtctttaagtgcgtttgtgcagccgatttcaaggctaagagagaaagactgcctctgatccctgaaggaagaaaaaaaaaaaaaaaacaggaaaaaaactcaacatggaaaatgtccccaaggaaaacaaagttgtggagaaggccccagtgcagaatgaagcccccgctttaggaggtggtgaataccaggagcctggaggaaatgttaaaggggtttgggctccacctgccccgggttttggagaggatgtgcccaataggcttgtcgataacattgatatgatagatggagatggagatgatatggaacggttcatggaggagatgagagagctaaggaggaaaattagggaacttcagttgaggtacagtctgcgcattcttataggggaccctcctcaccatgatcatcatgatgagttttgccttatgccttgaatcttgaggttaataatcataaaatccctgctttctaaattcgcatttttcctggtgtacctttaatgtgaaccttttggcattcttctgcaattttctgattggagattgcattttgacctagtctgtaagtttttctgtcagaagaggactttcatcaactttcatggaaagatgtttattgcatactgtaaagttaataaagcaatttaaaagca

SEQ ID NO: 220803 - DNA, 1000 bp, Homo Sapiens
tggaaagttcaacaaaacttacagcccacctcaaccaactaccccaacctatatttatttaatttcatcttatttccttgtaaattgtgtcaaatcctgtttttgaaaagcagcatagactgacaacttttcactatcatcttatcgaaggcattttggaaaccggggtcgtatgtcccacctaggcttgctttgttactgccacaaatacctccagttcttaccagtgatgttattatgcattcaacctaattcattcatctggaaagaaacagttttttaaaaagggaaacctcacacgtaaatggctcagggcagcctggccttggtggaatgagcatgagactggaagctgaaagaagcaagttttaatcttgtcactaaatgagtgttgtttgacacatcatagcctctctgggcctcggctcctcatctgaagagaagttgaacttaactgctaagttgctctggctctaatgtttcatgaggctgtggagcgtgatatagatgcggaagaggttagaagaccaggctgccggcccagctgtcctgtgcctgccacatctggccataccaaatccatcgcatgcttcaggaaagggaggggatgctgtgacagcaaactcagcccaggagcttgttggggaaggagaaagggcaagtccctcgtggtccacagcaggcaccccccaagcacctcgataaccagtggcaggtaggctgaagtgaaggaagcctctgtcaggaggtctggcgcccagtgacagacaagacagctgtgagggagctggggcagccctggctaaaggaatgtctgagtaacttgtgaaactggaagcctctgcctctgaatgcattccaagacctggtgcaaatggatgtccattcattgttttgtatcagtgttcacttagatgtcttcttgaaaacttgtttgtggaataaatgtctaaaataaatggctcccactggtttctgccataaaaaaaaaaaaaaaaaa

SEQ ID NO: 220804 - DNA, 1000 bp, Homo Sapiens
gggaaggagacgaagtcacactcatctgctctgcccgcggccatccagaccccaaactcagctggagccaattggggggcagccccgcagagccaatccccggacggcagggttgggtgagcagctctctgaccctgaaagtgaccagcgccctgagccgcgatggcatctcctgtgaagcctccaacccccacgggaacaagcgccatgtcttccacttcggcaccgtgagcccccagacctcccaggctggagtggccgtcatggccgtggccgtcagcgtgggcctcctgctcctcgtcgttgctgtcttctactgcgtgagacgcaaagggggcccctgctgccgccagcggcgggagaagggggctccgtgagtggcctgctatctgcaatgaccaccatagcttaaccccatccccaccctcaaccccaagctcaacccataacctcaaccacatcttatcctccaccccacatcccaccacatccacctccatccccaacccatcctcatccccaactacagccccaaacccagccccagactaatccacagccatccccaactcatcctcatccccaactgcagccccaaacccaacccagggccatccccaaacccatccccaagccaaactcaacaccatccccttccctaatcacctctcctgcccctagctcagcctcatccccaactccatgcctgtctccaatcccaaccctgcccccaatctcccctcaactccaatccataacccccttcaaaccatcctcaactaagctcctctccagccctggccacatccccatcctcccccaacctccagccccaacacccatcatccccctgagctcacccttaactccaatttatcctccaagcctatctctcaccatccagccctcacctagccatttcccaaccctagtcctccaccgtcccgaagccaacttcacccatgtccccatccccaatcttgtccccattcctgactcc

SEQ ID NO: 220805 - DNA, 1000 bp, Homo Sapiens
tatacattcttcaatgcatatgttgctcaaaggtggcaagttgtcctgggttctgtgagtcctgagatggatttaattcttgatgctggtgctagaagtaggtcttcaaatatgggattgttgtcccaaccctgtactgtactcccagtggccaaacttatttatgctgctaaatgaaagaaagaaaaaagcaaattatttttttttattttttttctgctgtgacgttttagtcccagactgaattccaaatttgctctagtttggttatggaaaaaagactttttgccactgaaacttgagccatctgtgcctctaagaggctgagaatggaagagtttcagataataaagagtgaagtttgcctgcaagtaaagaattgagagtgtgtgcaaagcttattttcttttatctgggcaaaaattaaaacacattccttggaacagagctattacttgcctgttctgtggagaaacttttctttttgagggctgtggtgaatggatgaacgtacatcgtaaaactgacaaaatattttaaaaatatataaaacacaaaattaaaataaagttgctggtcagtcttagtgttttacagtatttgggaaaacaactgttacagttttattgctctgagtaactgacaaagcagaaactattcagtttttgtagtaaaggcgtcacatgcaaacaaacaaaatgaatgaaacagtcaaatggtttgcctcattctccaagagccacaactcaagctgaactgtgaaagtggtttaacactgtatcctaggcgatcttttttcctccttctgtttatttttttgtttgttttatttatagtctgatttaaaacaatcagattcaagttggttaattttagttatgtaacaacctgacatgatggaggaaaacaacctttaaagggattgtgtctatggtttgattcacttagaaattttattttcttataacttaagtgcaataaaatgtgttttttcatgtta

SEQ ID NO: 220806 - DNA, 1000 bp, Homo Sapiens
gctggacctggagcagatcgagaacaactgaggctggtgggggctggtcggggccatggctgccgcctgcacctgccctggggcacagagtaggtttcctgtgagctggtcggggccacggcccggcacctgccctggggcacagagtaggtttcctgtgagctggtcggggccacggctgccgccggcacctgccctggggcacagagtaggtttcctgtgagctggtcggggccacggctgccaccggcacctgccctggggcacagagtaggtttcctgtgagctggtcggggccacggctgccgccggcacctgccctggggcacagagtaggtttcctgtgagctggtcggggccacggctgccgccggcacctgccctggggcacagagtaggtttcctgtgagctggtcggggccacggctgccaccggcacctgccctggggcacagagtaggtttcctgtgagctggtcggggccacggctgccgcctgcactgccctggggcacagactaggtttcctgtgagctggtcggggccatggctgctgcctgcacctgccccggggcacagagtaggtttcctgtgagctggtcggggccatggctgccgcctgcacctgccccggggcacagagtaggtttcctgtgtgctggtcggggccatggctgccaccggcacctgccctggggcacagagtaggtttcctgtgagttggtcggggccacggctgccgcctgcactgccctggggcacagactaggtttcatgtgagctggtcggggccatggctgccgccggcacctgccctggggcacagagtaggtttcgtgttgcttggaacattaaggcgtaattttgattcagtttttcctaaagaagcattttgcatttttatggcttttgcagttcgggagaaagcttctctattttggatgcatttcagaagggcgttctattaaacatgaatctgcaaacagaaaaaaaaaaaaaaa

SEQ ID NO: 220807 - DNA, 1000 bp, Homo Sapiens
ggacagaacctgtgggacaagagcgacgtctcatccgttcaggttcctcacaaaatgagagtcaggaagatcagggtgcagacctgatttcccacgaagggctgaaagcagacaaccggagggagagcagcacctgggccaatgaggtagaagacagaagaccacagtgtacttctgccctcaacctcaccccctcccacctacatcctccacaccccctgaccaccttcttcagaaacgtaataggaatcaagatcccccctggcctggttgctatgggaggcacagtggcctgatggagcctgaggcaggtgtgggaagatgtggattgtctaactggaggttgggagtccagggtgcagaaggagaagcttggagtgcaggatttggtggtatgtgtgtggcagtaggcactatgttctaattgccagtttttttttcttcttcctttttttctctagctaaacaagcactggccttgagataagcaatgctgaagcacttgcagctcacctattaccataaactgactgagccctccctacacaagccgtaactactgctttgattggacaagagactgatttcagtagttttctcttgataagagaccactggccgtgggcgggttctggacagtttacagaagctatgcacttgattgcctttgtgtccctgcttcaccttttgaagcatagggcctaattataatgtatttaaatgttgtctccaccccaaagtgaacatgggttgcatgtaacaggcatgtttactcagcatgcatgcagcaggatcccttcacaaatattcagagctccccctattccctgttgaatatgtatatgtggccagccagatcaacgtaaatcactattcgccctcccctccctggaaacctacttttcgggtttcagcaggaagctatgcctcccagtctgtcagaatggccacttgcaggctgtaaccctttataaaaaaataaaatctcctttctaaattt

SEQ ID NO: 220808 - DNA, 1000 bp, Homo Sapiens; identical to SEQ ID NO: 115389

SEQ ID NO: 220809 - DNA, 1000 bp, Homo Sapiens
ctcggggtccctgggcgccccggactgccccgaggtgtgcacgtgcgtgccgggaggcctggccagctgctcggcactctcgctgcccgccgtgcccccgggcctgagcctgcgcctgcgcgcgctgctgctggaccacaaccgcgtccgtgcgctgccgccaggtgccttcgcgggagcgggcgcgctacagcgcctggacctgcgcgagaacgggctgcactcggtgcatgtgcgagccttctggggcctgggcgcgctgcagctgctggacctgagcgccaaccagctggaagcactggcaccagggactttcgcgccgctgcgcgcgctgcgcaacctctcattggccggcaaccggctggcgcgcctggagcccgcggcgctaggcgcgctcccgctgctgcgctcactcagcctgcaggacaacgagctggcggcactcgcgccggggctgctgggccgcctgcccgctctagacgcgctgcacctgcgcggcaacccttggggctgcgggtgcgcgctgcgcccgctctgcgcctggctgcgccggcacccgctgcccgcgtcagaggccgagacggtgctctgcgtgtggccgggacgcctgacgctcagccccctgactgccttttccgacgccgcctttagccattgcgcgcagccgctcgccctgcgggacctggccgtggtttacacgctcgggccggcctccttcctcgtcagcctggcttcctgcctggcgctgggctctgggctcaccgcctgccgtgcgcgccgccgccgcctccgcaccgccgccctccgcccgccgagaccgccagacccgaaccccgatcccgacccccacggctgtgcctcgcccgcggacccggggagccccgccgctgccgcccaagcctgagcggccgcggccgcctggagcgctcgaagcttcccccatgcctttgccctccctttacactgtctgccggcgtcaacaagcgacacagaccgaaaa

SEQ ID NO: 220810 - DNA, 1000 bp, Homo Sapiens
cctaaaaaagaatgagattcagtcatttgcaacaacatggaaggaactggatatcattatgttaagggaaataagccaagcacggaaaggcagacattgcatgttctcacttatttgtgggatctaaaaatcaaaacaattgaactcatggacatagtaagtactagggggctggggggggagacagggcacgggtaatgggtacaaaaataggcagaaggaatgaataagacatactatttgatagcacaacagggggactctagtcaataattgtacatttaaaaataactaaaagaatctaattggattgtaacacaaaggaaacatgcttaaagggatggatacccactctccatgatgtgattagttcatgctgcatgcctgtatcaaaacatctcatgcaccccataaatatatatgcttattatatactcacaaaaatgcttgaaaataaaaataaaggaactactgaaggtcaggtcagagtggaaatgtaaaaatactaattagagaataatgtgaatacaacaggaatcctgttggtattctatttatattgtaagcagcagttcaattgttttgaaaaagtaatttcaattttaatcactgaactaaagaaatgggcaaggctgacttccgtaatataggttctacctaaccatctctaacaccgctgtcaaggaggaccagtgttaaggtacattactaacaaccacacaaatttttaaaagaaaagaacactcttagcagcctatggtactttgaaatgaaatattgcctctcattctcacttgtgttgccattccaaaagtatgaatttgctgaggtttatattctgggtattatataaccattggttctgtttggcataaccctattaaatggtgcgcagagctgaattacctacagaaactttctggtttaattagcataaattggtataaatattagtgagcccatacttctgtgatataattaaaccaacttaatgattctc

SEQ ID NO: 220811 - DNA, 1000 bp, Homo Sapiens
ctcttatcggccccactcacaggagcttcaggcttcggtggccctgtaggacaaccctggggtgtcattggagagaagctgacggggttaatggcgggtgacaggtgaaagagaccccggaggggtggggccggtgtgtgtggctaagctgagtcccaggcacagggtggattggaatttatgggtggcagagctagagctaggccctgcccttacctaggtcctggcttcgaggtccactgttctgtcgcgtcttttgacgcatcggtggaagaactgaatttcaggatgctcacaaacctgcagctggaagctagacttccaaaccttagtttaaaaaagcaactctactgaaatactaaaataaattgccgacggaattagggtgatttcttgttcacggtttcatttaaaaatgcacctatgttatttacaggaaaaacgttttagtggtgctagagctacaagaataaggtaaacagagggatgctgctagaccaggagtaccttacccagtctgggataggaggaggtcggggaagccctccctaagcaagacacgtgagctgagtttgaagaaaaagttaaaaggaaggtgaagtgcgggagagaaacagggaagggaatttggagcagagtgaacagcatatgcaaaggtgtggaaatgtggaaatgcatggcctgttaaagctgccttaagaaaatatgttgcctggggctgggcgcggtggctcatgcctgtaatcccagcattttgggaggccgaggcgggcggatcgcttgaggtcggagttggagatcagcctggctaactaacatggctaaacccttctctactgaaaatacggagattagccgggcgtggtggcatgcgcctgtggtcctagctattctggaggctgaggcgggagaatcgcttgggcctgggaggcggaggttgcagtgggccgagatcgcgcctttgcactccagcctggaagacgaaacaaaactccgtctc

SEQ ID NO: 220812 - DNA, 1000 bp, Homo Sapiens
aattagcaatatgtttaagtagttacaagcctttccttcttttcttgtgacagtttgggttgaatttctatcgtttgcagcctgtcactgtaaggcacaaacatgatcacgcaagatgcgatagtagatttaagccagttgtttttaagtttgtgtttaaggagaaactaacaatgaaaacggcctcgttgacggaggaaaagttggaatgcagcctctggtgctgtttgagcgatccctctccccggggcctggccgcgcgctgctgtgttctggaagggctcattgtacagtcaaggcggcagggccttcttctgtcacccatgctggagtgcagtagcatgatcacagctcacggtagcctccaccttctgggctcaatcctcctacctcagccttccaagtagctgggactacaggtatgcaaccaccatgtccagctaaattttgtactttttgtagagatggagtttcaccatgttggccagactggtctcaaactcctgacctcaagtgatccacctgcctcggcttcccaaagtgctggggtcacaggcgtgagacaccatgcccagcctgcccttcctttttaaacctttcctgtgcatagtgaagaataccatgactagtttggtgttactgcctttgtttgtgctgaagtaccagcatttttacccactattgtatttgcaccgttacagcaaatgtcaccatgttagtattcacgttaaaatagtttggacctgggcgtctgagggccccactttgggaaccgttgaaataggtacttaaacctactatatatcatatcttgtcatctacaagatttttaaaaaacatgatttcagttaattttttttgtaatttttacaatatggttttgaggggtttcagtccagagcaacaacatgtattttatttagcttatgctgaagtttactagataaatactaacctaatagaatgaggtcctaaatctttttttgcagtttctttagcc

SEQ ID NO: 220813 - DNA, 1000 bp, Homo Sapiens
atctctggctattaaaaaacatcaagatgagaattaaaggcatatcctgatatacttgcctgcttgcacatgaggctgggagatcccatgcctgttgaagttaactctagccctggcctctattgatcttttgggaatgagggctgatttgaaggtgctgttgcaggatttcatttagctgctgccagttcaagtgacctgtccccagggctgcagctgtatccacctgattgcagtaggtgagggctaacagcagaatttaaagtggaccctgggctgtggagcaaagtgactatccatttggacttttggataatgtggcaggagtcccagctgtttaatttctagtcacattttccagaaagttgttctaagttgagattactgacaagatttctcaagggcaggaccagatatgtgagagacttctagttcagagctgacccctctaagcctctgacacttaaacacgagtcctgctgtccccagcacacaactgcactgaagccttgttcctctcggctggtgtagagctcatctgcatgttgtgtgcagataccagtagcctccctgcttgaataggcctctcctaggctaggcaggtgttcagaggcatgaaggtctgggcaggggaagggcgtcttctgaaatgggagttaccaggtttttaaatgctgctattgttttatttaccatttaaggtcttttctattatatctgagtaactagtcagtttttcttacagtgctcatagcagttgtatttgaattgtattttcagtgaaatttgttttacattgccatttaaaattggcctttaacagcttcccaactggcttatatttttttttaatgaaaacataacccatgaggctcagatgctgttgaagaaataaatggtatgttgctgctgacagtagtgcttgcctattgtaacagcattggttctgctgtagcctcggtgaccatttaagttgaataaatctgtcattttcacccac

SEQ ID NO: 220814 - DNA, 1000 bp, Homo Sapiens; identical to SEQ ID NO: 115390

SEQ ID NO: 220815 - DNA, 1000 bp, Homo Sapiens
cccctgtggggactctttcagacatctttggaaacctgcatcttgactcattgccagaggagtcagatgtggccactgattctatcccaagagagatcttggtcacaggaacctgccatttgaagtgtgtgtgttacggcattgggaactttgccacctgcatcgtagctagaaaccagctaacgtttttgctgcttttgttggaaaagtgccagattcccagaagtcactgttgggtatatgaccctctgtttagccaacttgaaattgaagtccttaacacccttggtgtgactgttctcagtgagaacgaggaagggaaacggagtattcgcggggagcctaccatcttttacatgctccattgtgggacggccttgtacaacaatcttttatggagtaactggtcagtagatgccctttctaagatggtcatcattgggaacagtttcaaaggacttgaggagaggttgttggcaaggattctgcagaaaaattatccctacattgcaaagattttaaaaggactggaggagcttgagtttcctcagacttcacaatacatggacatatttaatgatacctctgtccactggttccctgtgcaaaagctagaacagctctccatagatatttgggagtttcgggaagaaccagattatcaggactgtgaggaccttgaaatcatcaggaacaagagagaagatccttctgctactgactgaactcgttgtgaggtactcagtgttggctgaggtagaagctgccaccagagactaaagggaaggctgctatggaggaactacagagaactcctttgccaggaaagaacatcaacttggctgtcctgttttgaggacgataccccacatgaggacttggtataaagattcctgccctacgtggcattgtcccgttttacatccttccctcatgacctggcctgatgtggagtagctcctgagtaaagaagttacccttttgaaaaaaaaaaaaaaaa

SEQ ID NO: 220816 - DNA, 1000 bp, Homo Sapiens
aactgcatagagcgatcaaccccatatgcatagatttccatattgtggacatttcctataaacggaattgcacaatacgtgagcttttgtgactgacataacacttttagcacaatattttcaagattcatccacattgcagccttacccacagggggaaaccgcattttctggtttcagtaacaccgggtgttttctccttccttccgtctttccttccttccttccttccttccttccttccttccttcctcccttcctcccttccttcctcccttcctcccatttctctcttattccttctgccctctctctttcatatgccttaggtgcatcctacgtcctgcgtctttttggggaatcctcgacaggtgctggaaaattgtgttattgtaattatttaccggtatctctctttcatggttctccatcagttgtaagcatctattggtttatcccaggtcactaagtatattttaattagctacacctgtttttctttatacacttgtttctggagtatagggtcgcatactcataaacccagtgtaactcagaaacgcatctaatattccaatagacccatcataacgttgaaaaatcataaatcaaaccaacttaagtcacgatttggcgctggatatgggctccatcaattccattgtattcaataatgctgtacaccattaacaatggcagactgattgggcgtggatgtggataacattataaaaatcagttattagagggatactttaacctgacggaagagctgatctaatggtattagtacagtgatgattatgtgagatgttttgagacagagtagtacatttgtgtatgagattctgtggcttttttcacttagtaggaacctttgtgtgtggaaaactgagaaaattgctttgtgctgtagagtctggcattcgttgtagattaaagcttatttttctggatgtaaatcttattcaataaaatactactctttataataaaaaac

SEQ ID NO: 220817 - DNA, 1000 bp, Homo Sapiens
cagagaacctctactagggcagtgcaaagggaaaatgtggagttggaacccctacacagagtccccactggggcactgcctagtggagctgtgagaagagagctgtcatcatgcagaccccagaatgacagatcctctggcagcttgcaccatgcacctggaaaagctgcaggcactcaatgtcagcccttgagagaagctgtgggaaatgaaccctgcaaagctacaggggtggaactgaaaaggccttgggaacccaccccttccatcagtatgcctggttgtgaaacatagaaagtcaaatgaggttattttgcagctttaagatttaatgacttccctgctggtttcagatttgcatggggtctgtagcccctttctttttacagctttctcttttttggaacaggagtgtttacccaatgcttgtactccccttgtatcttggaagtaactgttttttgaatttacaggctcataggtgaaagagactagccttgtctgagatcagcctttggactttcgacttttgagctaatgctgaaatgatttaagactttgggggactcttgggaaggcatgattgtattttgaaatgtgagaaggacatgagatttgggagtagtgatgggctgaatgacatggtttggatctgtgtccccacccaaatctcatgttgaattgtaatccccagtgttggggaagactggcatgttgggaggtgactggatcatgagggaagattcttcataactggtttagtactattctctcactgctgttctcatgatggtgagtaagttctcatgagatcttgttgtttaaaagtgtgttgcatctcgcccccacttggtcctgatcctgccatgtaagactcctgctccagctttgccttttgccacaagtaaaagctccttaaggtttccccagaagcatatgcttctatgcttcctgtacagcctgcggaaccatgagccaattaaacctttttttgaaaaat

SEQ ID NO: 220818 - DNA, 1000 bp, Homo Sapiens
gcagagactttcatttctaccaccagcttcaaacatcatttagttataaggggacatactcagtaacttctgcctagacacaaactctaggccttcgaatgagacagaaatactaccatatttttgaccatcagagtaaatctggttttctgtaaactagaagagactgaaaaatggtttgtaacaatgtgcttcaattaggacaggaagctgatctgtaaacgtctactgattacacaatgtaaaccggatggatttgaaaatggtaaaaatcaaaactaaaaacatcaaggtcctgtttcagtcactgcaatcaaccctgaccaactgtgataattaaatatcgctcaagtgaatgttcaaacactgaaacatttagaagacaagaaagcaaaacacagctacacatattgcatttaggatgcagaatagaaggtcactactcaaagcatttgtcatttaaaagaaagtcataatttattataagctttcagaaaaaagaatataatttcattttcaacactagcaaaaaggaggcagctgcctttgctacatgacgcattaggtgggccattttactaattacctgattttagaaagcgccaaaggctatggaagcctattaatggttccgctgaatctctgcagatgtgtttgttttctaaatcctttgccaaccaataattcccatgaggactcttttagtctatactgacaaaattattaatatgctgttgatgccagactgtgtttgttatagttgattctcccatccaagtacaagaaatgtattgaaataaaaactgctcagcatatcttaaaaatagtagctacatataaaattttagctacatgaaagactttaatatttccaacatacactgttttctctttctcttcttgcattgtttttcaaaacgagttgcaaaactatgatcactaatgtgttaggaaagaaaaaaaactagttgcaaaacattacaacttagctcaccttcgc

SEQ ID NO: 220819 - DNA, 1000 bp, Homo Sapiens
actgatgaaaggaatggcagagaagcttccgataatcttgcagtgcaaaatctgaaggggtcattttctaatgcttcaggtttgtttgaaatccatggagcaacagtggttcccattgtgagtgtgctagccccggagaagctgtcagccagcactaggaggcgctatgaaactcaggtacaaactcgacttcagacctcccttgccaacttacatcagaaaagcagtgaaattgaaattctggctgtggatctacccaaagaaacaatattacagtttttatcattagagtgggatgctgatgaacaggcatttaacacaactgtgaagcagctgctgtcacgcctgccaaagcaaagatacctcaaattagtctgtgatgaaatttataacatcaaagtagaaaaaaaggtgtctgtgctatttctgtacagctatagagatgactactacagaatcttattttaaccctaaagaactgtcgttaacctcattcaaacagacagaggcttatactggaataatggaatgttgtacattcatcataatttaaaattaaattctaagaagaggctgggtgcagtggctcacacctttaatcccagcactttgggaagccaaggcaggaagactgcttgaaaccaggagtttgagaccagcctgagcaacaaagcaagaccccatctctataaaaactaaaaaaattagttgggcatggtggcacatgcctgtagtcccagctactccagaggctgagatggatcatctgagcctcaggaggttgaggctgcagtgagctgtgactgcgccactgcactccagtctgggacaacagagcaagaccctgtcttaaaaaaaaaaagaaaaaaaaaatttttttctaagaagctgtcctacaaagttgagctttgttagtttttcatgtgtaatatattataaatttatcttttgggatataataaatgctttcatatacctgcaaaaaaaaaaaaaaaaaaaa

SEQ ID NO: 220820 - DNA, 1000 bp, Homo Sapiens
cacaaatatgacctctctcctgaagtcacatggaatgaattgcagttatccaaatcatagagacgtcatatatctttgtggggtggttctttttggaatgctacccttgctgcttttaatcctgcagattcaaatgtcatctcccctttggtcatgccttccatggtctgttgttctatgacccaaactgcccttttaaaaaagcagttttcttctgactcctgagcagtttgtactgcgtgggtcatagtaattctggggttgttgtcattgctgatttaaattaccttaactattctgagctttttgaaggaatagtgtcttgtactcctgagctcctagtatactctgatgtctagccgaccttaagtaaatggagtgagcgacatgtaaatgtctttatggtttgacattttatgaatcttgagcattggaaaagtggctggtatgactaaagaactgaatttttattttttatctaatttgaattgcaactgtggacagtgtagctgtagccccggacttgttctgtggattacagaatacgtggacattgatggttttctctttttactgagcagtaaggaaataaaagctgaagctctctggcccattacatttcatttaactgcttgttttgttttatttattatatatttagctgaaagctaagtccaacaaaccatttttaaagatgtgcctgccttggacaacagtgaaagcaagcgttaatgagtttggatttcaaaaaaaatgcataatgaattttagggaggtgagattccattaaactgttacaggagctacatagttaaatatatcagaacttgaatgaagaataggtctgtgtgatacaaatgaacccagcctaaatttctgtcctacaagttttcacttcctggaaacacttgattggaggagctctaagcatcatatcttgagttatagaaaacaatcacaaagtaagttttatcctgaggaattataataccaacatttt

SEQ ID NO: 220821 - DNA, 1000 bp, Homo Sapiens
tatgtattttgccacaattttttaaaatgcagagcataggtacaaagaaggaaaaaaagggggcaaggtccattttattgagaaataaagaacaaagggttcaattcagagaggattggattttaaaacgtaatttagattagggaaatgcaaatgaaaaccataataagtaagataccacttcacatctgttaggatggctattttaaaacaacaaaaacaacctgaaaataagtgttggcaaggatgtgaagaaatagatacccttgtgcattgctattgggaacgtaaaatcatgcagcctttgttgaaaacaatgtggtggttcctcaaaaacttagttatcatatgatcccgcagttccacttctaggaatatacccaaaagaattgaaagcagggactcaaagtgatatttgtacaccagtgtttgtagcagtattattcacaatagccaaaaggtggaaacaacccagatgtccatgacaagaggagtggataaacaaaatatggtgaatatgtacaatggaacataattcagctttaaaaaggaatgaaattctggtacatgttataacatagatgaaccttaaaaacattatgctaagtgaaataagccagacacagaaggaaaaataccagatgatcccacttatatgaggtacctagaatagtgaaattcatagagacagaaagtagaaggatggttgccaggggctggaaggaggaagaacagggagatactgcttagtggatgcagagtttatgttgagggtgatgaaaaagttctggagatggatggtggtgatggctgcacaacagtgagaatgtacttcatactatggaactctgcacttaaaaatggttaaaatggatgtagacattttatgtctattttgccataacaagaaagtaatttgggtgtattttagagattttagaaaatactgtaagcacaagaggaaaaaaattaaaatcattcgcaatcaccaggtagagac

SEQ ID NO: 220822 - DNA, 1000 bp, Homo Sapiens; identical to SEQ ID NO: 115392

SEQ ID NO: 220823 - DNA, 1000 bp, Homo Sapiens
atttggcgacctactgcggccgccaacccgtcccagccgtggtgaggagcttggtggggctgagggggacaccagcagccctgaccctgccggcaggagccgacctcgctacacaagagatagcaaggcctactcgatgatactgctgcctgccgaggaggaggcaacgctgggtgccagacccgacaagcggcggcccctggagcggggagaaacagaactggctccatcctttgaacagcgggtacaagtaatgctgcagaggataggcgtcagccgaggcagcgggggtgccgaaggcaagaggaagcaaagcaaagatggcgagatcaagaaagctggctcagatggtgacattatggacagttccacggaggcccctcccatctcgatcaagtcccgcacccactctgtgtctgctgacccttcctgcagacctggcccagggagccaggggcctgagtctgccacctggaagacactggggcagcagttgaatgcggagctcaggagccgtggttggggccaacaggatggtccaggccctccctcccctggtcaaagcccaagtccctgcagaaccagcccctccccagacagcctgggcctcccagaggacccttgcttgggccccagaaatgaagatggccagctgaggccgaggcctctctcggcagggcggcgagcagtgtctgtgcatgaggaccagctccaggcccctgctgaacggcccctgaggctgcagcgctcccccgtcctcaaacgcaggccaaaactcgaggcacctccatccccaagcctaggatctggccttggaaccgagcctctgcccccacagcccacagagccctccagccctgagcggagcccaccctccccagccacagaccaaagaggcggcggccccaatccctgatcctctcctctcctgccgcatgagattattttattaaaaaactcaaaggaaaaaaaaaaaaaaaaaaaaaaaaaaaaaaaaaaa

SEQ ID NO: 220824 - DNA, 1000 bp, Homo Sapiens
agatccaggtattgtgggcatatgtaggtctcctgtccaacccgcaagctcatgtatcaggagttcgattcctataccagtgccagtctatacaggattctcagcaagttacagaagtatctttgacaactcttgtgaactttgtggacattacccagaagccacagcctccaaggggccaacccaaaatggactggaaatggccattcgacttctttcccttcaaagtggcattcagcagaggagtattctctcaaaaatgctcagtctctcccatccttatcctgtgcctcttactacttggagttctcaacctagagactatgtgaagaaaagaaaataatcagatttcagttttccctatgagaaactctgaggcagccacttatcttggctaaatagaacctcacctgctcatgaccagagagcatttaggataatagaggacctaactgaaggaatccttgtatatgaaaggagttattttagaaaagcaataaaaatattttattcatcatagctctctgctttgggctctgcaggccaccagatacacatgaggcccctacttctcaagctgggaaggccaagagccttccttcagcctttctggttatgttacacctagctgaatgtttacaaggtctggatccatcagccctcaggcacagttgggccaagcagaaagagagaaacacttctgctgtcaccttgaatgaactcaggaatagcttccctctggactgtagaggagctaactgtttggaacagaaaactgctggctgttgattttgtctggttcctttgccaacatctgggcacaccctttgcccagacacgagtggggaaagcagttctttctcctcagtttccaaagtaaatggggaatcccagctttcttttctactagcaaatgaccctaccatttatttctgcctttttcttccgttcattgtgaggaaaaataaaactggttgagaaaaaaaaaaaaaaaaaaaaa

SEQ ID NO: 220825 - DNA, 1000 bp, Homo Sapiens
cctcctgatggctctgaccccaggatcgagtccagggacctccctgaaaggcctcagtgccgcccccaccggaagacctttatgccatcattagtggttaagaagcaacgagcaaaaaacctttctgtaggctgagacctctcggtgcacctggtgaccctgggtggaggggacttgctgtgaagtcttcctcgccctctgccctcttgctgcttctccacattgccaggaaaagctgctgacgcctgccctcctctcttgagtcgagggctgaatctttctcctctaagcagtctggtcaggaaccttggtttcttgagaggcccccaagatgccgcagctccagggctcttcctcctcaccagaaatccctgggcttccacaatgtgaactcactcattgtcaggtgtccgtggagtgtttttggcatggtgacctgtctgggcccagcatgttgcagatgtgtatttatgcgcaatggtatgcatatctctgtgtgactgtcagtgttgcaagctggctggatccaaccatctcttctgaaataatgcatccaaagggttgatattctgggggaggtcactgcagaaggatggaactgacctttattccccagtgggcagttactgagctttcctcctcagagccatgctggcagccctgggacagagaacggtgtggctttggctgcctctgcatggaatcttgccccggactcctgaagactgcacaaggaatgaggaagatcagggacaacctgggaactgaataactttcaaagccagtgctcagcttctctgctccgtactagcgtttacaggtcttaattcaaaccagatgcctgtactagtttttagaccccaagtcaacctttctgagccacagcttcccgctgggaataatgatgcctgccctatctacctcacagacttgttatgaggataaagtgagattaaactgcctcaaagtgctttgtaaaaaaaaaaaaaaaaaaaaaaaa

SEQ ID NO: 220826 - DNA, 1000 bp, Homo Sapiens
taataaatatcatttgtatggatttttaaataatcgaatactattttatatatggaaaaaaatgaccattttttcacttttaggggaaaatgcaaaagtgtaatacataaattgtcacaaattatacctgaaattgattacaaatacatttgaaaaacatatgcctctactcataagtatttttttctatttagacttgaatgataatctgttttttgatcagtatatggctttggaattcaatcatgtctgatatggtagtatttcactaccattttctgacttttagcttttattttcacctcaatgtgatttaagcagaccaaaatttctaattctgctaattctgaaggggaaatagacaaatcttaaaagctgcctgaaatcaaacttgatttaactcagtaagaatgtgaattatttgttctacttgggtggtttaatttaatcgttctgaatatgaacaaaaggttttggattttctaaagatgcagtgttgtttctgttcatcagggttaatatttctaactatattgcttgtaggtgaccccattctggatttgtttggtttggtttggttccagttaaaagagaggacaggaactaaatggggctaaccacttcaggtgcagcttgtgcgagggtagatggttcctgcacacagaagttaccacaggggtcaggttactttcttcaaatagcagatttcagtactttatcctcattgtggaaacaagccaaaccaaatgaactctggaaaacctaaaacaaatgtacattttcctttgtgtatgtttccgtggtccaaatggcaatataaatccagtctttattctccctttgttgtatttatgctgaatcttccctttgccttttcaggatttaggcctgtaagaaactatgcctgattctgtaaaataagtgtaaagaattatatgtacatctctggattttgtgatgaaatattaaaaatattgagcaagttgttgaaaatgcaaaa

SEQ ID NO: 220827 - DNA, 1000 bp, Homo Sapiens
aacgttggtctgaggcttgagggatggagcaacattttcttggctgtgtgaagcgggcttgggattccgcagaggtggcgccagagccccagcctccacctattgtgagttcagaagatcgtgggccgtggcctcttcctttgtatccagtactaggagagtactcactggacagctgtgatttgggactgctttccagcccttgctggcggctgcccggagtctactggcaaaacggactctctcctggagtccagagcaccttggaaccaagtacagcgaagcccactgagttcagttggccggggacacagaagcagcaagaggcacccgtagaagaggtggggcaggcagaggaacccgacagactcaggctccagcagcttccctggagcagtcctctccatccctgggacagacagcaggacaccgaggtctgtgacagcgggtgccttttggaacgccgccatcctcctgccctccagccgtggcgccacctcccgggtttctcagactgcctggagtggattcttcgcgttggttttgccgcgttctctgtactctgggcgtgctgttcacggatctgtggagctaagcagccttagatagcagcagaaggctttttggattctcctccttgaaaagattctcagttaccaaacgtctccacctagaaaataaaaatacattaagatgtgctttcattgctggttgtcagtttttaaattctctttttcccttatgtttctttcttgtttcgcgtcgcttattactttcagtttccttgtattttaaatattggtatttcattaaatatttcattcgtatctgttttcactttgagaaatctattttacgattgtagaattcttagagtttttggcaaatttaaaatttgtttttttccattgtattttaaaatcttattcctactatttttctaattattgctttttaaatgtattgtttgtttacatttaattttaaaaaaaaaaaaaaa

SEQ ID NO: 220828 - DNA, 1000 bp, Homo Sapiens
ccctgtgcacatttggaagctaaaatgtacatcgttgtctgaaaaaacccaaccccaaaaccttcatctgattggtgagctgaagtctgtccttgcaccatgttatcatctgtttctcgtgtccgcctggttgaggaggacccacgagtgctgccgaggtgtggagggctggtattgagttgtggacatcactgttgaccctacctcacgtgccgagactctcatgtcacaggcgtgccttgctgcccccctgcagcactgtgcaggacgtggaccagctggagctgctgcccagcacagaggagagtcgccgcagatgacctagctgcggtgtgagagagcatggcccagacaagcagctgggttggcttctgagaacaggacttaccctgggcttcaggaacatctgatggctgaggttagtgtgcttggaggctgcaggacgaactgtcgatgtttcttagcagagatggtcacagagggcagcagggacaggactggaagggacctgcagcctgcagaccccgcctggcccccgctggcttctggctggtccagtgatgggcaagtgacagaccttccccaggctctgcttccagaactctaatgggaaactgggcctgtctacctttagaagtcttcgattctcagagagcatttgtctaatacaataaaaactggcattaatacaaacctcaaaaacgtgagcgtatcttccaggcttcatggattcttgacatgtaattgttttgttcagaaaagtttatagaattcacataattctgtataaactatggagatccacagtacttttttgtttttgagatttaaagttctaagggattgtcaatagatatcaaaatattaatcattggacaaaggcttttccaaaaattgtgggtttttttcttctgttgtatccatttgagtcctgcatgctgtgaaatgctgagaacagaagcattaaattggtttttctcgggaaaaaaaaaaaaaaaaa

SEQ ID NO: 220829 - DNA, 1000 bp, Homo Sapiens; identical to SEQ ID NO: 115395

SEQ ID NO: 220830 - DNA, 986 bp, Homo Sapiens
ctacgaatggtttagcgccaggttccccacgaacgtgcggtgcgtgacgggcgagggggcggccgcctttccagccgcgccccgtttcccaggacgaagggcactccgcaccggaccccggtcccggcgcgcggcggggcacgcgccctcccgcgcgcgcggggcgcgtggaggggggggcggcccgccggcggggacaggcgggggaccggctatccgaggccaaccgaggctccgcggcgctgccgtatcgttccgcctgggcgggattctgacttagaggcgttcagtcataatcccacagatggtagcttcgccccattggctcctcagccaagcacatacaccaaatgtctgaacctgcggttcctctcgtactgagcaggattaccatggcaacaacacatcatcagagatctttgaagactctgattctctgagactgaggagagatgtcttaccagcagcagcagtgcaagcagccctgccagccacctcctgtgtgccccacgccaaagtgcccagagccatgtccacccccgaagtgccctgagccttacctgcctcctccttgtccacctgagcattgcccacctccaccatgccaggataaatgccctcctgtgcaaccatacccaccctgccagcagaagtatccacccaagagcaagtaacatcactagaattcatcaggaccatgaaacaacaagatccagtggctcttcttactcccaggactccatcatcttcccttcagctgtagtgggaggctgcatcttccctaacctctgtctggcttgagcgttgacagagaaaaggcttagttctgaaaaccgatatgttgttggaagatgagcagccagatcattgcctaatctcgctttgctgtctgtgatgtagatggtggttcctatcctgagagcaagtgtgtttattcttttgcttctccccaataaagcacatgtttcatggtcaagcccaaaaaa

SEQ ID NO: 220831 - DNA, 1000 bp, Homo Sapiens
tgctttattaccaacagtgtgtaggtttttgtacatatggaaatttgacacaaaaaaatagggaatttgtatagagaagtttccctcttataaaaggactcccatttgattgttcgaaactataaaatgcacttttactttaccatatctgaaatgacaaaatatcgccctttggaaaacctgactctttgcacgtgtaattcccagagtctacctcagttaaccaggcttagttttaggcaggaatgaattgaattaaattcagttcatcatctatgcagatttgtttcttttaagcacatccttccctcctgctgttgccctcctcccattaacttttctttttaatcttgaaattgtttaaaatattccatctttctttctctagcaaagtgtttgtattccaaataaggcctctgtgaaatgtctgaattacttttcccgtctttgttatggtcagcttcattatttggatgtattgcattcaaagcagcagttccaaacataacacacatctattttcttagagttttgtaaatacaaactaacctgatgacattaaaaattgtggatcctacatgttcctatgttcattctctaaaaacctgagtaactttatgaaaacacacaaacctggaaaaacatcacatttttgtcacatttttactgacaaatgtatattcatatgatggtacggcagcagggagtggcccccagttaacatggctgtgagtggacacagtgtctcgcaggatcactgcatgttatgatggcttgtaagtgcgttgttaagacttttgtttcagtgtttgtctcccagtatttgaacctaatttaaagaaaaagacgtttccaagttgtatttattaaatgtgtttttccttaccttttgtgctgctactttgctaatctcattagcttagctgtgtttgtgcataggttatatttggtaataaatttatagagtgttggttgtcaaaaaaaaaaaaaaaaaaaaaaa

SEQ ID NO: 220832 - DNA, 1000 bp, Homo Sapiens
tgtcagtgccaaccagcctgtcctggtggctgtgaaaatgctccgagcagatgccaacaagaatgccaggaatgattttcttaaggagataaagatcatgtctcggctcaaggacccaaacatcatccatctattagctgtgtgtatcactgatgaccctctctgtatgatcactgaatacatggagaatggagatctcaatcagtttctttcccgccacgagccccctaattcttcctccagcgatgtacgcactgtcagttacaccaatctgaagtttatggctacccaaattgcctctggcatgaagtacctttcctctcttaattttgttcaccgagatctggccacacgaaactgtttagtgggtaagaactacacaatcaagatagctgactttggaatgagcaggaacctgtacagtggtgactattaccggatccagggccgggcagtgctccctatccgctggatgtcttgggagagtatcttgctgggcaagttcactacagcaagtgatgtgtgggcctttggggttactttgtgggagactttcaccttttgtcaagaacagccctattcccagctgtcagatgaacaggttattgagaatactggagagttcttccgagaccaagggaggcagacttacctccctcaaccagccatttgtcctgactctgtgtataagctgatgctcagctgctggagaagagatacgaagaaccgtccctcattccaagaaatccaccttctgctccttcaacaaggcgacgagtgatgctgtcagtgcctggccatgttcctacggctcaggtcctccctacaagacctaccactcacccatgcctatgccactccatctggacatttaatgaaactgagagacagaggcttgtttgctttgccctcttttcctggtcacccccactccctacccctgactcatatatacttttttttttttttacattaaagaactaaaaaaggaaaaaaaaaa

SEQ ID NO: 220833 - DNA, 1000 bp, Homo Sapiens
tttcaggggtctgaaaacaaatgctacgaccaccttgctttggtggcttttctgaacaggcattgtgagaagagatgttctggccaggtgaaagtggactttatttttaggtaggtttttcagtttagaaaggtttcctttgcttatcccttgaggacttctgtgctgctgcttctcctccatcttgctagttaacagaacaggggcagaagtgacaccaatgctctcggccatgcctgccttgggaagcactaccgggccccactgtttagaatcttagatggaaatgtacacaaggcattgacacacgcctgcgggagtgacccagtgcttccctcccatgggactcagggtcagcgtgggaaggcagctggcagggacaggagccccgcccgcaaggtggactgagcctcacttccacacaaaaccagagtcccatctgccccagagcgctcgctctcctccccttccttccgctcaatgcagcctgacacgcctttgaccagaactgcaacatttcaaacacaaacccagatctgttgggaaatcctaattaaaaacgttgcattcccaggtggcacaatcacatcctgcctaaaacttctggcccacatcccaccacccagatgttgaaaagaaacctttctctgcttaacaccaaaacctgcacttcaaggtttctttaggggacaaagaaaaaaaaagtacacacatgcagagttcagcctacatgttcattgaggaaaaagagcgtggcttattcatctttcaatcttttgattgttggcattatgattatgattatgattaattactctgacctgacaggaattgaagaagagactatatgctggtgctctgaaatgatctacccaactctgtcatctgtaacaaccagtgataactctcttgtcttgtaaaaagggtttgtacataacttgtacatggtttcattttgtatttttcgcagattaaaaatttatgtatttgtgttctaaaa

SEQ ID NO: 220834 - DNA, 1000 bp, Homo Sapiens; identical to SEQ ID NO: 115401

SEQ ID NO: 220835 - DNA, 1000 bp, Homo Sapiens
tgggcagaggagaattcaagactccttcaagagcgtggcgtggcttatattaatgctgactcatctatagaaggaaactacactctgagagttgattgtacaccgctgatgtacagcttggtacacaacctaacaaaagagctgaaaagccctgatgaaggctttgaaggcaaatctctttatgaaagttggactaaaaaaagtccttccccagagttcagtggcatgcccaggataagcaaattgggatctggaaatgattttgaggtgttcttccaacgacttggaattgcttcaggcagagcacggtatactaaaaattgggaaacaaacaaattcagcggctatccactgtatcacagtgtctatgaaacatatgagttggtggaaaagttttatgatccaatgtttaaatatcacctcactgtggcccaggttcgaggagggatggtgtttgagctagccaattccatagtgctcccttttgattgtcgagattatgctgtagttttaagaaagtatgctgacaaaatctacagtatttctatgaaacatccacaggaaatgaagacatacagtgtatcatttgattcacttttttctgcagtaaagaattttacagaaattgcttccaagttcagtgagagactccaggactttgacaaaagcaagcatgtcatctatgctccaagcagccacaacaagtatgcaggggagtcattcccaggaatttatgatgctctgtttgatattgaaagcaaagtggacccttccaaggcctggggagaagtgaagagacagatttatgttgcagccttcacagtgcaggcagctgcagagactttgagtgaagtagcctaagaggattctttagagaatccgtattgaatttgtgtggtatgtcactcagaaagaatcgtaatgggtatattgataaattttaaaattggtatatttgaaataaagttgaatattatatataaaaaaaaaaaaaaaaaaa

SEQ ID NO: 220836 - DNA, 1000 bp, Homo Sapiens
acgagaacgaggaaccagcctgtgaggatgcggatgaggatgaggacgactatcacaacccaggctacctggtggtgcttcctgacagcaccccggccactagcactgctgccccatcagctcctgcactcagcacccctggcatccgagacagtgccttctccatggagtccattgatgattacgtgaacgttccggagagcggggagagcgcagaagcgtctctggatggcagccgggagtatgtgaatgtgtcccaggaactgcatcctggagcggctaagactgagcctgccgccctgagttcccaggaggcagaggaagtggaggaagagggggctccagattacgagaatctgcaggagctgaactgagggcctgtggaggccgagtctgtcctggaaccaggcttgcctgggacggctgagctgggcagctggaagtggctctggggtcctcacatggcgtcctgcccttgctccagcctgacaacagcctgagaaatccccccgtaacttattatcactttggggttcggcctgtgtcccccgaacgctctgcaccttctgacgcagcctgagaatgacctgccctggccccagccctactctgtgtaatagaataaaggcctgcgtgtgtctgtgttgagcgtgcgtctgtgtgtgcctgtgtgcgagtctgagtcagagatttggagatgtctctgtgtgtttgtgtgtatctgtgggtctccatcctccatgggggctcagccaggtgctgtgacaccccccttctgaatgaagccttctgacctgggctggcactgctgggggtgaggacacattgccccatgagacagtcccagaacacggcagctgctggctgtgacaatggtttcaccatccttagaccaagggatgggacctgatgacctgggaggactctcttagttcttaccttttgtggttctcaataaaacagaacttaaaaaattaaaaaaaaaaaaaaaaaaaaaaaa

SEQ ID NO: 220837 - DNA, 641 bp, Homo Sapiens; identical to SEQ ID NO: 115403

SEQ ID NO: 220838 - DNA, 1000 bp, Homo Sapiens
cagctctcttctgtcagctgaatgttaaggatggggaaaaagaatgcctttaagtttgctcttaatcgtatggaagcttgagctatgtgttggaagtgccctggttttaatccatacacaaagacggtacataatcctacaggtttaaatgtacataaaaatatagtttggaattctttgctctactgtttacattgcagattgctataatttcaaggagtgagattataaataaaatgatgcactttaggatgtttcctatttttgaaatctgaacatgaatcattcacatgaccaaaaattgtgtttttttaaaaatacatgtctagtctgtcctttaatagctctcttaaataagctatgatattaatcagatcattaccagttagcttttaaagcacatttgtttaagactatgtttttggaaaaatacgctacagaatttttttttaagctacaaataaatgagatgctactaattgttttggaatctgttgtttctgccaaaggtaaattaactaaagatttattcaggaatccccatttgaatttgtatgattcaataaaagaaaacaccaagtaagttatataaaataaattgtgtatgagatgttgtgttttcctttgtaatttccactaactaactaactaacttatattcttcatggaatggagcccagaagaaatgagaggaagcccttttcacactagatcttatttgaagaaatgtttgttagtcagtcagtcagtggtttctggctctgccgagggagatgtgttccccagcaaccatttctgcagcccagaatctcaaggcactagaggcggtgtcttaattaattggcttcacaaagacaaaatgctctggactgggatttttcctttgctgtgttgggaatatgtgtttattaattagcacatgccaacaaaataaatgtcaagagttatttcataagtgtaagtaaacttaagaattaaagagtgcagacttataattttc

SEQ ID NO: 220839 - DNA, 1000 bp, Homo Sapiens
aagtagacgtttcagtcattcttttcaaacaagtgtttgtgtaccttttgccaagctgtgggcatcgtgtgtgagtacagggtgctcagctcttccaccgtcattttgaattgttcacatgggtaattggtcatggaaatgatcagattgaccttgattgactgtcaggcatggctttgtttctggtttcaatctgttctcgttccttgtaccggattattctactcctgcaatgaaccctgttgacaccggatttagctcttgtcggccttcgtggggagctgtttgtgttaatatgagctactgcatgtaattcttaaactgggcttgtcacattgtattgtatttttgtgatctgtaatgaaaagaatctgtactgcaagtaaaacctactccccaaaaatgtgtggctttgggtctgcattaaacgctgtagtccatgttcatgccaaaaatggctgggaacgtttgctttatttacattcagtcagcgttgctttcagatcacactttatccacacaggaaagccagtcagcctataatgaagtagttattaaaataaatgtaatgaatatgtctacaaagtatagtttagtggtttattttgctaaaatgcacatatatttgatataatttagtttgagaagttcagctagtttttctcctttgtttgactttgtcaatttctatctggtttttaagggtctgagcttagcttgtgcatgcaaggttttgggtttttttattttttttttgagcacagcttttcaccttttaatttgttgggtatttttctcttaataagagaaatattggccatcgatttttacatataatacaagtgtgtttttccagtacattggttcctgtcccctctctgtgaactgtttgagtattggaacagtatgtcttcaataattcaatgttactttgagatacatgtgttaatatacccttagttattcttgaaataaaaccagtctcttacgcttgcagtgg

SEQ ID NO: 220840 - DNA, 1000 bp, Homo Sapiens
ggagggctgtcttgcctcacactcctcacagcctacttccccttccccggggctgagagggtgaaagtgtgtggggaaggagaggactggtttcctgggttctcaggggccaggaggagtaacagaaccaggtctgctccccaccttactcggatggcctccctgcccctctgctggcacagcctgggcaaggggagaaggtggtccctgcagaggggctccaggctggtgagagcccccctgctgtcaggaccagattttcccagccatccagcatgctgcggggagaaggggcagaggctcacctccctcctggggccttttgttttggatcctggggatggtgagaatggaggttctagaaggggtaaggccagaacccagggatccaggagtcggctctcagctggagcttccataccttctgggctccctttgctgaccaccagcccaagggagctaagaccaggagggggctgggcgctgtcccttctctttcccaggagccctgccaggggctgtgggcctacaaggcttccaggggatgccatccagcctgtaggaaaccaaagatgggaagtggctcctagggggctgactcttccttcctcctcctccccagtaccacatatactttctctccttctatctccagggccccaccaatctgtttacatatttattatcctatgggggcctgagcaggattgagggagccaggggaggggcaggagtcccagcaccatcggttcatagtgtgcttgtgtgtttgttttagatcctcctgggggatggggatggggccaggctcagtgtactaggcctctctgtgctgagccccaggctcccggccccttacccactctctccctgtggctggtctggttctcatgtaaacccactccttgctttgtctccctggatatggatttcagttaagtattttgtaacccgttacactgtgtgtccttgtgtaaataaacttgtttctggcagtgcc

SEQ ID NO: 220841 - DNA, 974 bp, Homo Sapiens
gctgcctattgcggcctgcggtgatcaacgaggcccggggagcgcgtccccagtctgcgcgccggtcctgcggcagctggcccaagacccggagccgaaaggaagtgttggagcctgaggtcgctccgcgccgctaggaggacgctgtgcctggcctgggacctccgctcccgcccaccgccctggagccgctgagggacgtccacgtgggcctgtccccgccgagccgcggccctgtccgcctggcgctgctctcgggccactacctctactaccactacggctgcgacggcctggacgaccgcggctggggctgcggctaccgcactctgcagacgctgtgctcgtggccagagggccagcccgcgggcgtacctggactggccgccgtacaggcggccctggaggacatgggcgacaagccccccggcttccggggctcccgggactggatcggctgcgtggaggccagcctctgcctcgctcacttcggagggccccagggacgcctctgccacgtaccccggggagtggggctgcacggggaggtggagaggctttactcgcacttcgcagggggtgggggcccagtcatggttgggggggacgcagatgccaggtccaaggccttgctgggagtctgcgtcgggtcaggcacggaagcctatgtcctggtattggaccctcactactggggcactccaaaaagccccagtgaactacaggctgctgggtgggtgggctggcaagaggtgagtgcagcctttgaccccaactccttctacaacctgtgcttgaccagccttagctcccaacagcagcagcgcaccttggactgaggacgaagttacagaactgagattctcgggtcccagacacgcacctatgtacctcccactggtgtccctgcaaagcctggcgcttttgacatcaataataaaagtggcagggctgagccaaaaaaaaaaaaaaaa

SEQ ID NO: 220842 - DNA, 1000 bp, Homo Sapiens
atggttctatcttgatttgcctttatgaaagctactttgaccctggcaaaagcattagtgaaaatattgtaagcttcattgagaaaagctataagtccatctttgttttgtctcccaactttgtccagaatgagtggtgccattatgaattctactttgcccaccacaatctcttccatgaaaattctgatcatataattcttatcttactggaacccattccattctattgcattcccaccaggtatcataaactgaaagctctcctggaaaaaaaagcatacttggaatggcccaaggataggcgtaaatgtgggcttttctgggcaaaccttcgagctgctattaatgttaatgtattagccaccagagaaatgtatgaactgcagacattcacagagttaaatgaagagtctcgaggttctacaatctctctgatgagaacagattgtctataaaatcccacagtccttgggaagttggggaccacatacactgttgggatgtacattgatacaacctttatgatggcaatttgacaatatttattaaaataaaaaatggttattcccttcatatcagtttctagaaggatttctaagaatgtatcctatagaaacaccttcacaagtttataagggcttatggaaaaaggtgttcatcccaggattgtttataatcatgaaaaatgtggccaggtgcagtggctcactcttgtaatcccagcactatgggaggccaaggtgggtgacccacgaggtcaagagatggagaccatcctggccaacatggtgaaaccctgtctctactaaaaatacaaaaattagctgggcgtgatggtgcacgcctgtagtcccagctacttgggaggctgaggcaggagaatcgcttgaacccgggaggtggcagttgcagtgagctgagatcgagccactgcactccagcctggtgacagagcgagactccatctcaaaaaaaagaaaaaaaaaaaagaaaaaaa

SEQ ID NO: 220843 - DNA, 1000 bp, Homo Sapiens; identical to SEQ ID NO: 115409

SEQ ID NO: 220844 - DNA, 1000 bp, Homo Sapiens; identical to SEQ ID NO: 115410

SEQ ID NO: 220845 - DNA, 1000 bp, Homo Sapiens
cctgcctcaacccactgctgtacctgctcttcaacccccacttccgggatgaccttcggcggcttcggccccgcgcaggggactcagggcccctagcctatgctgcggccggggagctggagaagagctcctgtgattctacccaggccctggtagccttctctgatgtggatctcattctggaagcttctgaagctgggcggccccctgggctggagacctatggcttcccctcagtgaccctcatctcctgtcagcagccaggggcccccaggctggagggcagccattgtgtagagccagaggggaaccactttgggaacccccaaccctccatggatggagaactgctgctgagggcagagggatctacgccagcaggtggaggcttgtcagggggtggcggctttcagccctctggcttggcctttgcttcacacgtgtaaatatccctccccattcttctcttcccctctcttccctttcctctctccccctcggtgaatgatggctgcttctaaaacaaatacaaccaaaactcagcagtgtgatctatagcaggatggcccagtccctggctccactgatcacctctctcctgtgaccatcaccaacgggtgcctcttggcctggctttcccttggccttcctcagcttcaccttgatactgggcctcttccttgtcatgtctgaagctgtggaccagagacctggacttttgtctgcttaagggaaatgagggaagtaaagacagtgaaggggtggagggttgatcagggcacagtggacagggagacctcacagagaaaggcctggaaggtgatttcccgtgtgactcatggataggatacaaaatgtgttccatgtaccattaatcttgacatatgccatgcataaagacttcctattaaaataagctttggaagagattacacatgatgtctttttcttagagattcacagtgcatgttagtgtaataaagagataagtcctacagta

SEQ ID NO: 220846 - DNA, 1000 bp, Homo Sapiens
atctaaatgacctgacagaagaaaactgttaaaaatggatattattggaggggatttaaaacagtgggtgtgaattatcattctgatggaaagaaaatagcaaaacaatgtgttacaagtatttgctaataaacagtatactgccagcttctaattgctttttgatgtatgaaaggcttatataattttcttttcgttgggtgacttttgccagatgagaggaggtggcacagtggtgagtgcagggcacagtcctagccttctgtgggtatacttttggagttgtgacttggctgtgagggcagaagttgaagttgggatcactgtgactttgcacatggaaaaatgcagattgcaggcataattcatctctgacattagagaaaaagctgttatagcacaatttaaattttgagagtttgctgtgtttttttttcacataaaagaggctgattattctttttagtttaattttatatcctgtaattctttggatggttccaagattcagaaaaaattcagtaaatgcaccccgtaaattgctaccctttcctttattttcatacttagatctgctgtacattgtatatatatataatttttaaaatgcagaaagaaaataatttccctaaatataattgcaaactgatttcttttacttttttgtgtgtgggggtgggagctgtatctgaataagtggcattcagattagggtcttgaaaaataaacccagaatctttaaaagaagcaaataaactaatagacgcttattttccaaaatttaaatttaagctagaaatgtaaatattcaattaatttgttaaaagtacttttataaagttaaaaaaaatccaaccaaaattttagaaagtcaggctcttttagaaagaaagctacacccatttcctcaaataactgttccgaaaatttatatggtggaatgcgccatgtataaactgtgaattgtattgacaaataaagtttgtaattaaagtcagca

SEQ ID NO: 220847 - DNA, 1000 bp, Homo Sapiens; identical to SEQ ID NO: 118772

SEQ ID NO: 220848 - DNA, 1000 bp, Homo Sapiens
ggcccagctcctccctctgaaggtggtcacattctgttgactctccatactcagcctctcctccagaaacagatctgttccagaacattccagcactttctatctggcctccttgtccccacactacgcccccccaccctcgccagggcttcctctagtgacactgttagagctaatctctgagacagggaaggcattactcacttaaaacccaggctgagtcctggccacctgctggattgtgacataggaggtggaatccactgaactgctacttctgcacaggctccttctcctggggctgtacccaggcccagccctgatggctcaccctgtcaggcaccagctgctccctcctgggctctcacccacctgcacatcctccttcctagcatcacattacctgcgtgtttccccagacaaaagcacttcccattcttgaaccttgcctaccctgggctgagctgacggcaatagatttaatgacagtgactcccaggaagggggtcctgtgactttgcgccttaataagaacaaaaggtggaattggtgacctaggaaaactgttgaattctaaaaagaatgaagttagtttctaaccctagttaatgttccttttttattttttgagtcttgccctgtcactcagggtggagtgcggtgttatgatctcagctcactgcaacttccgcctcccgggtttaagcgattctcctgggtagctgggattacaggtgtgtcccaccacacctagcacatgggcatatttgtaatagagacaaggttttgctatgttggccaggctggtctcgaactcctggcttcaagtgatccacccacctcggcctcccaaagtgctgggattacaggcatgagccactgtgcctggcccctttatttgataatttacacatacatttttgtccaaaactcttctttatttcaagatgatgtttctgtggctatgtgtggtatgtggtataaatctcaatctatggtc

SEQ ID NO: 220849 - DNA, 1000 bp, Homo Sapiens
ctgttgagtctgttgtgactgtcttatgaatcaatctgttgtgccaaccctttctgagattcagagaggtccagctagaaaaagtggcagttttaaccaccaacgtagaagcttttttttccccacaagaccattgtactgcaatacttgagtatttgtgtagcaaacagcctcttaggttggagagtattgatttcaaataggaagttggtagactaggtgtgaggatgaaataatgaccttgatttttgggtgtgtattgcagaagcctcgtcgctttcaagtcacatcatatatgcgatctggcctaaccatggagatattggttatcagtttgcagatgaatacacagttctatccaacagaaactgtatctttctgtttgtcagaagttctccgttagttcctgtattagtcaaggttttccagagaaacagaatcaatatatattggggcaggggggcggtggttattataaggaattggctcacgtgattatggaggcggttaaatcccaagatctgcaggataagtcagcaagatggagtcccatgagagctgatggtttagttccagtctgatggcagcaggcttgacgccaaggaagagatgatgtttaattcaagtccgaaggcaaggaaaaagctgatggtcctgtccaaaggctattaggcaggaagaattctcttagggcagagttagctcttttgttctattcaggccttcaactgattcagcaaggcccgcccacatttgggaggacagtctgcattactcagtctactgatttgaatgttaatgtcattgagaaacaccctcacaggaacactcagaataatgtttgaccaaatagctgggcatcttgtgacccagttaagtggatacataagattaactatcacagtgactcagtggaattttttgtttgcttttgtacagttttaaaataaaagtttggtatttgtgttttaaaaaaaaaaaaaaaaaaaaaaaaaaaaaa

SEQ ID NO: 220850 - DNA, 1000 bp, Homo Sapiens
tatcttaaatgtttatcttataattaaatgtaatttgaaatgctctaatgtattttgcagataaaacaactataaacaatattaggcaactggatgtttactagtgtcggactagcaatagaaatgcactttaaatatatatttaaggggaaatgcgtgcctggaaatacttcttttcctagtgaagttttatattgacacagagaaaagaatacttaaaattttgagtgatgtctactggcttccttgtaagtagtgattgatagcatgcggctttgacttgcaatacaaatcattacgattttatagttatcagaacattacgtttctttataaagaccctaaggtcactcttctttttgcaacttaagggaaaaaatattctcaagggaaaatactttttgaaatttatcaccattttagtgtttacatttcaataaatagttcacttcaggtttgggattgagattagttgcaatatatttagaagctcctacatgacagcacagatcactgccatctgctgaactgctaaagtgcttggtgccatgttgagaaaacttacccaagaatggataaatatgggtgaaacattactgagaatgcctcacgttagcaaatactatgaaaattcttgtttatatatcaaactgatttattttacaaaaaaaaaaaattcaccccaagatttatttagtttcccaagtgtatctgattaggatttaatttagagtaaacttttctggggacacctgattgcatgaactgaagtatacaataacacaaatattacagtaaacataaatggtgtcattaacaaaattattcctaatgcagatttattctttcaggaaatgcactttatttggaatactagtttatcatgaaacaatgacttacctacctcacagggttgttgtgaggattaagatgtttgttaaaatcttgactaccttgaacatgctaataaaaaaacatttttctacctcttttatttgca

SEQ ID NO: 220851 - DNA, 1000 bp, Homo Sapiens
gatcagaatttttaagagttatctttcagtgaaattttataacagtttcagtgaatagagaaaaaattctgaactgatcataatgagttaaaagttagcttttcacttatgaatcatgggagtgttaactgttaactcttgccgtatcaggagactgaaagttcatactaatttacaaactttgtaaagactggtgctgttcattcatattgggaagaaccctttcttttgtgaccataggaccatttttcaaaatgcgctttcttcgtagaagaaatgttcagtttaattagctttggattttaacatgtttttctgaatgaccagatgtaggcttagccagtttattttctctaatttaatggataataaatattaagctcttggttaaatgtttttcagccattgaaaatgttatgaaaaagccttgaatatgcatgctgctttcatttttataaactttttattttttaactatagctttattagtaattccaaaatgctgcaatgtagctgatttcctcactcagacagctggctttgtgggtggcttttttcatactactgttaacttttttaaaaaagaagcaatgtaaagaccgtaatgcactaagctttttttttttcttttacacgtttaaaaacttcttaaagcactctgtaatataatgattaaattgctcccttttataaacattgctaatgtggtctgagttttgtttgacaataattttaatgttctcaaaatttgaaatgtcaagtattagaaatgaagcctttgaatatagttgtttcccttgcaatatgttaactctgtgtagctgtatataactattaatttccctcatctcttttataggcctgataaaactcttctctgacgtttgctagcttttaaatatatttatttgacagagcaaaagaaccctcttctggttgattgtgaccttgaatacaaaataaaagtagtgattagtagtttaaaaaaaaaaaaaaaaaa

SEQ ID NO: 220852 - DNA, 1000 bp, Homo Sapiens
ctgacttcagtaattaagtctccagctactcttttggctaagacatctttggtttctgccatttgccccagtaatcctccactgccaagtagcacttcagtgtttcatttggacccacctgtcaaaaaattgttggttagcccagaaggagccattttgaataccataaatactccagcatctaaggtttcttcactctctccatctctctctcagattgttgtatctgccagtcgaagtcctgcgtctgtcttccctgcttttcagtcgtcgggcttagagaagcctgacagagctgcatcttgaatttagactaaaagagccagtttttaaataatggggcattgttttgactcccataaaaattttcaatgtttattatactgttgaaagcatactatacattgtgtgtgtgtgtgtgtgtgtgtgtgtgtgtgtgtgtgtgtgtgtgtgtgtgttttaatgtatcttttcattagcttgcaacaaggctttgttttcttggggagggaaagatctgttccatttcacttactgttctgaggagggtttcaaggttctgtgtttaaagtcaggatttacctgtctgtagaacataaagtgaacaaagtttgaatagtttagagtaagctagccttttgcacatttacattgacatgtttcttcttgaatttggactgttgcagcatatctatgatatggtattcagtgtcattagtgaaatcttatttttgtttctgtaaaaaaaaaaatacatatatatatttatgcattgtgaaaaatgcagtccatgatgtaaaattgtacatattccagaatccctaacaacctgtactaaatatatgtacaaagaactatgctgtcttatttatgttttgtttacataatgtatagttttttaagtattttagtaattttggaccagtgaactgttagcaacaatgcagaagaatctgcatgtaataaactgagttgctgtaaaaaaaaaaaaaaaaaaaca

SEQ ID NO: 220853 - DNA, 1000 bp, Homo Sapiens
ttaatccatcttagtacctgtcattgacatcctcccctccctgagtggatcgatccaacataacccccctcttcttccgcctatggcgcaccccactggcatggctatgctgggtcttccagggaaacgcctcccagcccggcattctgtggtctgttccagcaggacgtggccttttgggaggaaaaaccggtcttgaccagggctagtccattctggctttcaggctcagtcacttggtcaccagtccccagtcctggacctactgctactgtccttttatccggtcctccctcgctgtcctcttcagttgcctttgctagggaccggcctgtccctttactacctaagtcatcgtcagttcgcccaacttccctccaaatctgcccctcacggtacgcagggatcgcccttccttcctgcctttggactggtccaggtcctcctccgccctccttcacgcaaaggcctcctccagggggactacctgtccctcagcccagaggtccccctgtccaagcggggtattccaccaggccatatgacctacccacccgacaactgaagggggcgtggatgagctctgtgactctgaatgctactttataaatcgactgtcagcgttttctaattaaaggagctctggggtaaagatcttaagaacgtgtctgagaaccataatgtgcgtctgcaaaatgtcattgaaattaggaaagaaggccggacacagtggctcacgcctgtaattccagcactttaagaggccaaagcaggaggactgctggaggccaggagttagagaccagcctaggcaacacagcaagaccgcatctctacgaaaaatgaaaatattagctaggcgtcataccaaacgcctgtagttccagctacttgggaggctgaggcaggaggatcccttgagcccaggagttcaaggctgcagtgagctgtgatcctgccactacactccagactgggtgaaagagcaagactccaactc

SEQ ID NO: 220854 - DNA, 1000 bp, Homo Sapiens
tcagcaagctgggggagctggctgtgggcatgaagtcagagagccggaccatcggagagcagtgcagcgtgtgtggggtcgagcttcctgataacgaggctgtggagcagcacaggaagctgcacagtgggatgaagacgtacgggtgcgagctctgcgggaagcggttcctggatagtttgcggctgagaatgcacttactggctcattcagcgggtgccaaagcctttgtctgtgatcagtgcggtgcacagttttcgaaggaggatgccctggagacacacaggcagacccatactggcactgacatggccgtcttctgtctgctgtgtgggaagcgcttccaggcgcagagcgcactgcagcagcacatggaggtccacgcgggcgtgcgcagctacatctgcagtgagtgcaaccgcaccttccccagccacacggctctcaaacgccacctgcgctcacatacaggcgaccacccctacgagtgtgagttctgtggcagctgcttccgggatgagagcacactcaagagccacaaacgcatccacacgggtgagaaaccctacgagtgcaatggctgtggcaagaagttcagcctcaagcatcagctggagacgcactatagggtgcacacaggtgagaagccctttgagtgtaagctctgccaccagcgctcccgggactactcggccatgatcaagcacctgagaacgcacaacggcgcctcgccctaccagtgcaccatctgcacagagtactgccccagcctctcctccatgcagaagcacatgaagggccacaagcccgaggagatcccgcccgactggaggatagagaagacgtacctctacctgtgctatgtgtgaagggaggcccgcggcggtggagccgagcggggagccaggaaagaagagttggagtgagatgaaggaaggactatgacaaataaaaaaggaaaagaaaaaaaaaaacagaaggaaaaggaaaaaaaaaaaaa

SEQ ID NO: 220855 - DNA, 1000 bp, Homo Sapiens; identical to SEQ ID NO: 115428

SEQ ID NO: 220856 - DNA, 1000 bp, Homo Sapiens
ctctgcctgctcactgtgaggccccgtgtagccccctctctgagcttttggcctctgacttcctgagtcggcccccttccttgtctttgtctagggccagatatcctaagatatctctcactaactcctcctggtgcagggacccggctgtaccaccggacctgggcctcatgccttctcagccacagggaggggctgcaggcctctcctcccttccacagcagtcccctttgggcttggtcggcctccttcccagtttccactcccctaatgtcctccctgcacctgccttgcaggccccttcaggagtgaccactggcattgcccctatcaactctgacccaccttgtagtagcgggcagtgtcagggacggggccaaactcctgagtgacggcattgcgcacggagttggccttgccgttttcaatgttgatggcaccaatgagcaggttgttggagatgttatccaagtgcccacggaacttgagccaggggccagcagctgagatgtggtcagtggtacacttccctttgaccttgggtggtaagtagagaggacagaggtcagggcatggccctggaggggtggatgacaagccctccagaggcaggcagcaggccccggggcccaggaggggtgacagaggggtgagaggcaggcaagtcttcagacacgtgttctgtggtcctggtgcttccaccctaaggccacatgggctcaggccaggccttcatcccctcaaaggcctctggctgctcagtctcccttatggggcagaggccgcccaaagttgggacaggtcaatgttcgctcacccttcaggcctcagctgcaagatcagccacagacctcatgctggacacaggagcccaggacatgcctgggtcctggctgatgactgattagtctcttctgtcacaggggtgcctggagaccccttaataagcagcataaataaatatctgacacagattggaggcctctggccacaccaaaaa

SEQ ID NO: 220857 - DNA, 1000 bp, Homo Sapiens; identical to SEQ ID NO: 115430

SEQ ID NO: 220858 - DNA, 1000 bp, Homo Sapiens
tgttttattgtttgtatgaattttaatttgaaaacaaggaaacaatccaaaagcagaaaaaatagcttttcttaaaattttcagtgctacattttccctctgaggtccatagagatttgaatgtataggagattatccgaaaacagctattttgattaaaaaatatatctcccaggattcaaccaacttaatgatgaagtactattgtctactgctttatacataaaagggaactttttatctgcttgtaaagggatttttatgtgtatttctgcataatcagatgacttctattgtgttttctactgatgaaattctctgtaaaatgtctttttcttacattatccaacaggcataaagaataacagtaaagacttttgtgtttgtaatactacctcttttatccctgcactactgttttattgcaaaaattctatattgtcactgtattttttccatagaatataaattttgttcttgtgctaaagctggtagtttatgtagcagacaaaatatacaaataaaagaagagactgattttgctgaaagaattatatataatcaagaagttacatattgttctttaaatatgatactgaattttaaaagcaaacgaaattcaagaatcttatctaacagcatagcagttgcttatggcatacaaggctaaaattaattcagctatttaatcttaataattattatgtagttaaaaatctttgactttaatagtgttttacatatacaaatagctgaagtaacattcctataattttaatctgacattggttagatcaagaaaacattgttaataagactgtagaatttgtaattattgctatttttcatttttaataacaaagtaatgtgtcttattttctaagaaaatggagaactttggtgtactttaatacatacaaaaatctttgtaaaaataccttaaaatgtaccaatattttctttgcatatattaaatgaaagactataattatgaaatgtt

SEQ ID NO: 220859 - DNA, 1000 bp, Homo Sapiens
ttgatttcactgaattctacctagatttttatggacattggattttaaagaggaaaacactcattttcttagtaagatattggtgatacatagctatgccattgatttccatactcctgagctttggggagggagacagtggccaagtagcaggcagaataagatcatcactcatgtcctgaatcaatcacactttccttctcggattgtgtatatgctctgccacttcctacatattacatcctgagtttttaagtaaagtggatcttagccagatttgagtctaatggctgattcatcggcatagttcttggcgttaacatctcagtgtcctctttagttctctttgaggattcatgtcattgagggcctttgtgcctccacttgtctcagtatgaggaagaactttggtgtgagggcggagctatgtgaagggttgctgggttgggggattagttcatatggtccccatgccatctatttacttttggagagaggggactttgagtgggtgggtatggatagatgttcctcaaggaaaccctgctggctaatgggcactacatctgtgtattactgtgattctctctgtaagctccccatgtggccaaggacccccctcctaccagggcacttcctgccacctcattgcactggtctcaaccattcagcctgctgctgctgcaccatgttgggctgcggtaggatagggaaggggttctgttgattgctaaatgttgcctaactttatttccctctcccacatttcatgcaagggagcggacctaacacatgacttgcattctcttcctatgttcagaaactccagggcttgcccacgtgtatgtatgagtgaccaatggagcttggaattctttatctatatgatctgtccgaaaatgagatcttttgtactggaatttgtgatgtagttgatcattcagagccaaacgcatataccaataaagacaagactgtcatataaaaaaaaaaaaaaaaa

SEQ ID NO: 220860 - DNA, 1000 bp, Homo Sapiens; identical to SEQ ID NO: 115415

SEQ ID NO: 220861 - DNA, 1000 bp, Homo Sapiens; identical to SEQ ID NO: 115433

SEQ ID NO: 220862 - DNA, 1000 bp, Homo Sapiens
agggctacatttaaaatttgtatttgtttttcttacttagtgaaggttgtgttttttttcatattcattggccatgctatattcattcttttgagaattgctcattcatattttttctgttgcttgcttggagaatttgctctttttttggcatataagttcttaagaatgtccgtcctttgtcatatattgtaactttttttagccttatttgtcatttaacatagtttgtggtatttcagtatagaagttgttttctttaggagtctacctttgtgtatgtgcttgaaagtatttttgtaatccaagaatggataaatgtccttattttcttctagtattttcttatttcacttttacacctatctttaaaaggaatttaaattttgtttatatacattaactaaatcagtacaagtttggggtgaaaaggaaatttttaatccatctcaaatgtatttggttatattatataaggtagggatttgattttatttcgaagaatttaccaattggttcagtatgtgaaaccaccatttcccctctgattagtaatgctatttttatagaatattaaattcttatgtgtcttttgtgtcttaggccaatttctgggccttctgggttttttctacactgtcaataattatcgctttaattggtgttaatatttggtagtacacaggttctcccttgttcttttaaattttgtgaaatataacttacaaataagtacttaaaacagagcttaatgggtaaagcaacagctgtgtaatcacaaactagatgcagaggaggtcttgccagcactccaaaatctctgtgtgtcccctcttgacactcactgtttcccccagagctaactatcctgacgtatggtaattctccctctgtccttttaagaattattttaccagttatgtgtataacaatatggtttacattttgctcacttttgacttatataaaaatagaataatactaaaaaaaaaaaaaaaaa

SEQ ID NO: 220863 - DNA, 1000 bp, Homo Sapiens
ggagtgcagcagtgctatcacagctcactgcagcctcgaactcccggggtcaagcaatcctccctcagcttcccgtttctgaggttacagcccaaagtctcctcagcaacacttcctgtgagactacaggaatgaagggtgcctgtgtgatcagtcagatcaatcagcacatggaaactgagaaagacagatttaaagtccaaggagtttttgttgcaagttgtgcacatgttagatgcttcatttacaatataaccacagctggaactgaaaagaaacaaagacaatgataaaatgtgatgccctaagctacaaatttcatctgtagcagaaaaagaattgtcactaaaaactctacgacagtgtgtggaaaacttactgagtgttcagtgctatgcggtctacaagacagtcgtaaaaaacagtaaaacacactttctacgcagccattctcaggagtcatctgaaactgcgtacaccagtcctctgcctgccctccttccctccctctgccaagccctcgaggtccatcccagtctcatttccttgctggggccctcccttctcgtatcccagcctgcagcctttctctcttggaacagcagcagagtgcacgcctcaggactgactggtgctgttgcatcagctccttattctcacctccctggctgggagttctgagggcaggaactgtgtcttgtgcctggaaagcacgagttcaacagctgctcactggatgggcctgcacggggccttctctacaaatacagaaagccttgcaaggctggccgggtagcacccagatgctattaacactgctggtgatacactctcctctctttcagtgatttatgctattccatatttctgaagcaagccttactttagcaattttaaacagggaaactaattcaaatttctcaaataggggaaatgaactgaagatagtggtttcttatctagccacagatcacttggtctagcaaattttagatgcttt

SEQ ID NO: 220864 - DNA, 1000 bp, Homo Sapiens
ctagtatcatagctttacttataagaaaaccctgggcaagtcatctgcttattctcatcagtaaaaatggagagggttggcctctgctgcctgcctcagaggactgttgtgatgatcaaaggaaatggtacacattctgggggaacaagaagcacacccagagaaaacaagcctcatcagttcctccaaaacagaatggaaagagttacaccttctgaaaaagccctcagcaccaatcaataaggtcctaggttggagagaaactaaagctggtcttcagaagccttttcacagaatcaagagtgaaaaataagtaaatgtttgggtgaccactttttcatcagactaactatatcttgggttttagttgggtctcaaaatgttccccagccagaccctttctaatttccttttgattaagatctttggtggactatagcactaaatttgtttaagcagtatgaggcataaaattgtgactatgtttctaaagtcggccctgatgcattgggtttggaaatgaccacaaatattcctgttttcctgagtgtacccttcagggtccagctgtccaaaacagtgttgataggagttcatcatagctgctttgggaggaagccagattctccttatcttttagctttagatcgtggaatccaggaagtagaacaatgtctattgttgctaaagaaagaaagaaatgggccgggtgtggtggctcacggggagtaatcccagcactttgcgaggccgaggtgggtgaatcacctgaggtcagaagttcacgaccagcctgaccaacatggcgaaaccctgactctactgaaaatacaaaaattagctgggcatggtggcatgcgcctgtcccagctactcaggaggctgagacaggagaattgcctgaacccaggaggcggaggttgcagtgagccgagattgtgccactgcactcaagcctgggcaaaagagccagactctgtttcaaaaaaaaaaaaaaaaa

SEQ ID NO: 220865 - DNA, 1000 bp, Homo Sapiens
ttttctaaaactgaggaactaaaactagaagatgtggatgaggaaattaatgctgaaaatgtggaaagcaagaagaaaactgtgggagatgatgaaagtgttcctacaggttatcacagtaaaacagaaggagcagaaagaaccaatgatgatagctcagctgaaactattgaaaagaaagaaaaagccaacctagaggaacgggccatttgtgagtacaatgaaaacccaaaaggatacatgcttgatgatgcagatagcagttcattagaaatcctagaaaacagtgaaacaacaccaagcaaagacatgaaaaaaacaaagaagatttttctgttcaaaagagtcccctcaataaatcaaaagattgtcaagaataacaatgagccgctcccagagataaaatccataggagaccagatcattttaaaaagtgataataaagatgccgaccagaaccacatgagtcagaatcatcagaatatcccaccaacaaatacagagagaagatcaaaatcctgtacaatactataaatatatatttatgttttcacagtcaccaagtgtattgtaatgtatacttgaaaaatgttataacttatgaagtaaagtttctgatagtagtctttaaaagatataagacttaatatgttttattcagcttctataagtgtgaccagttttgatatttatttatgctaatatttttaacaagtcatttcaaaatatgtgtatctcaaattctccctaaagtgttgtggccttaactgttcagtattgcaataaaaaatatatttttatatgtggaaaattgaaataagatatttcctagtttttactaaacaattttacttctttataattttataaggcaatatttgcaatcttacgacactgtaacagtttttgatgtatttacaatttttacaaaactgaggtaaaattgtttataatgaacatattttaataaactatatctggtcagttccaaaaaaaaaaa

SEQ ID NO: 220866 - DNA, 1000 bp, Homo Sapiens
tcaaggatgccatatgtatattttaaaaaaatttctaagggaagtctaaaaaacataaattataatattacccaaaataagatgctacttttcacctaaccaagtcctgcctcatttcacactttaacctcctaagtatattcataaccctaccaaaagttgttttctttaaaaaataagaaactttagggccagcgcaatggtgcaagcctgtaatccctgcactttgggaggccgaggcaggtgaatcctttaaggtcaggagttcgagaccagcctggccaacatggtgagacacactcccccacccccgcccagtctctagtaaaaatgcaaaaattagccgggcgtggtggcgtgcacctgtaatcccagctactcgggaggctgaggtaagagaatcacttgaactgaggaggcagagattgcagtgagccgagatcctgccactgcacttcagcctgggcaacagagtgagactctgaccaaaaaagaaattttgcagctccaaggcttgaagtcatttatgttgccaggggtaagagcttggttgaagggctaaaagactagaaactactgaagatgcccttcttactgtcagtaaagctgctggagacaaaagaagttgttctcgctgctagagtggtaatttgagaatcatcagtattcctatgtgacaatccaaaattactggttttcatttgacttgtaaatgacacccatcatccatctgcccacaaacctggccaaatgtgatacaacctgaaaacctgatggactaaaggagtactatttaacaattgattgcctttgcactttattcaggttgtttcttaaattttggtagacagatccatttgtatatgtgtgtgttatatctagtttatggctatagagaaggtttaaaatactacagtgtccttccctcaaggttaaattagaagctgcctgccttttagttgtttcttgcctttaataaaatgttatcagttcccccaga

SEQ ID NO: 220867 - DNA, 1000 bp, Homo Sapiens; identical to SEQ ID NO: 115444

SEQ ID NO: 220868 - DNA, 1000 bp, Homo Sapiens
ctgctccagactctggcatgtacaagactcatctggaaaatgcctctgacactgatagatctgagggcctgtcaccctggcccaggtcaccagggaatagtcccttaggggatgagtttccgggcatgttcacttatgattatgacacagctcttcaatccaaggcagcagaatggcattgctcacttagagacttagaattttcaaatgtggacgttttacagcaaacaccaccatgttctgctgaagttccctcagatcctgataaggctgccttccatgaaagagactcagacattttaaaataagaatctttcattaaggaaatattcacagctctaaacaatattcttttaaagatcatggcaggggaaaactaaagccttcacaacaagatcctgaaggagacaacatgaattccaaccaagtggacactgatgcaaatgagggttttgtgggcccacttgagggcgatgattctagaagggttataagctaaacacacttgttaacatcctatggggatgaacctgctcttcagtgtgaaagagaaagaggggaatattttgagatcattccaagaaccatgcaccattattacaagagctccaaacaaaaccagttcactgagaacacaggagtacttcatcaataggttggggtaaatattcagaagagaatctgttgcagttagacgaagtggttctaactttccttctcaaatacagacctggagcaatctgatgggatttggctctctgaaaagaacagctttaggatgacaaagacaaggatgttcaacttgatcatcaaagagaattcaaatgacattttttcatacatattgaagcacttaagtggaaatgctggatagattttaatgaattctgaacacacactagcacaactttttggaggctgatcgtgaaactgcaaaattggaaaagttctgagtaaatataaatgtttttaaataagttatgttaaaaaaaaaaaaaaa

SEQ ID NO: 220869 - DNA, 1000 bp, Homo Sapiens
gtggaaccatgtactagttcctgggaattaaaatagcgtggttctctttgtagcacaaacattgctggaatttgcagtcttttcaatgcagccacatttttatccatttcagttgtctcacaaattttaacccatatcagagttccagaacaggtaccacagctttggttttagattagtggaataacattcagcccagaactgagaaactcaacagattaactatcgtttgctctttagacggtctcactgcctctcacttgccagagccctttcaaaatgagcagagaagtccacaccattagggaccatctgtgataaattcagaagggaggagatgtgtgtacagctttaaggattccctcaattccgaggaaagggactggcccagaatccaggttaatacatggaaacacgaagcattagcaaaagtaataattatacctatggtatttgaaagaacaataataaaagacacttcttccaaaccttgaatttgttgtttttagaaaacgaatgcatttaaaaatattttctatgtgagaattttttagatgtgtgtttacttcatgtttacaaataactgtttgctttttaatgcagtactttgaaatatatcagccaaaaccataacttacaataatttcttaggtattctgaataaaattccatttcttttggatatgctttaccattcttaggtttctgtggaacaaaaatatttgtagcattttgtgtaaatacaagctttcatttttattttttccaattgctattgcccaagaattgctttccatgcacatattgtaaaaattccgctttgtgccacaggtcatgattgtggatgagtttactcttaacttcaaagggactatttgtattgtatgttgcaactgtaaattgaattatttggcatttttctcatgattgtaatattaatttgaagtttgaatttaattttcaataaaatggcttttttggttttgttaaaaaaaaaaaa

SEQ ID NO: 220870 - DNA, 1000 bp, Homo Sapiens; identical to SEQ ID NO: 115446

SEQ ID NO: 220871 - DNA, 1000 bp, Homo Sapiens
taggaacctttattttaacttttaaaaacttttgtttctcttttttcataaaaacagattatatgctactcactataacaaattgtttattctgaatctgtggttaccaccatagtaaaaaagtgtctacaaactgctttagttagtgtggggttttcttcttaaaaactgttctctatagcattaaatataagaatccaggaaaccaatatttaacaaataggcaaatattagaaagatgccccactatatgcaaattctgtatgttgaatcaagcagtagataattaattgtctcctactatcttcttagagttggaagagtccttgaaaatcaggcagtcaagtgtccaggactattcagtaattttctcaataggaacactgtcagtcagccagcccaagctgaaatcctgtacttctactaatagcatctctgttatgtcacagaacagtccagttgtagtctaggcttgcactgaagaccacctctctgtaacgtttgccttctagccccacttccaccctctagaaccaggctgattcagtccttcctgtctatgattgccagatatttgaagactgatagcctgtctcttcctatgtcttctctccaattccactgatgatcatagagtataatttctagacccaacaacattctcttctgcccatttactcttaacaaaagaaaggggctgtgcgccatggctcacgcctgtaatcccagcactttgggagaccaaggtgggtggatcacctcaggtcagaagttcaagaccagcctggtcaacatggtgaaaccctgtctctactaaatatacaaaaattagccgggcgtggtggcaggtgcctgtaatcccagctacttgggaggctgaggcaggagaatcgcttaaacctggcaggcagaggttgcagtgagcagagatcacgccactgcgctccagcctgggcaacaagagtgaaacttcgtctcaaaaaaaaaaaaaaaaaaaaaa

SEQ ID NO: 220872 - DNA, 1000 bp, Homo Sapiens; identical to SEQ ID NO: 115447

SEQ ID NO: 220873 - DNA, 1000 bp, Homo Sapiens
aaagccaaggagtgggggcggggactgggctgagggagaacagggtctctggaaccgtggaagccaggctggtctggcaggagcacccactccccgcccgctggaaggaagcctgtccccaggacaggactctggtggccctgctgctgctgcattggtttccctgtcacaagtcaagctggaggggaggcggcccacgtccagcctgtttgcatcacctggctgtggggactgaccctgcattggtctttgtcccactagggtgggtttcctgcagcttctttggctatgaagaaaagcacccccagggctgtgtccttggtgtggtaggacagttgtccctgacagtcacccagacaggcctgcatagcaccccagttacacagacagatttccacagcactgccttaccattgagcacatagttaaatctagggaaatcagtgcccagacatcaaagctagaaatgaaacatggtcagcaggagccttgcatgggcttctcttttgctggagcaagccaaaataataggaacggttttacattcctagtgccaggacccatctcgggtcgacaaaatctgaagacaagttaagggaacaggcagctgtttgaatagatcaattggatagtctaaggcagctctctggaccaagctgtaaaggagatacaatcgaaataatcactccggtaccacagtagacaggccttgaaggcactgggccccttttaatcggacttagcaagcattttttttgcctctgaccttctccttggaacaaaattagttaccagtagacttaggtgattgctgtactgcatgtaggcacataaccccaacctatataaacagtaagaaaattgtagcactttgagttggtctgctggaattatctccagccttctccctgtatccagttacagtgataaactcccttctttcctaaaaaaaaaaaaaaaaaaaaaaaaaaaaaaaaaaaaaaaaaaaaaaaaaaaaaaa

SEQ ID NO: 220874 - DNA, 1000 bp, Homo Sapiens
gcagaggccaggtgtctctgcctgccccctgccacgccctggccaggacggctgctgtcaccttggtcaccactgctagtgcagtcattcatgctcatgtccccagtgtttacatgtcctttggatgccaagatagcagctggggggaggggtgggagtggagggttgctgggaggtccaaagcactttggaggggtctcgggccaggtccccagcagcctggatggctttacgtggcctccgatacccttataccctgccctgagctgaggttctgggtgggcctccagccccatgactagtgctcctgccctcagagccgaccccagcctctgccaggcacatttggctattcctccctaggggcaggatgaagggctgggggactgcccagtgttacttgtcaggctgtgctgcccagccctgtttatctgtgtaattatttttgtaaacattgtattctctgtggtcgccacctcctcgcccccagcctcgggttcagtctgtcttccaggcctgcttgcacctcactgggctgctccggggtctctgcccctcattccaggcctggctgtcaggcccagccagcaggggcccgtgacccagcagcctgcccaaagcatttgtttctgggggatggggtgggggctgctccacaggaggtttgagcccagcaccctggggaaggggaccctgcacgacacccccttgccctccctccatgaggctaaaggcccagtcttcccaaatgtgctgccctcgttcatgtgccaaatggccccagcccacatgcccctcccctctctggagtgggagccccttctgaagtgtctgaatccctgaagtgttcatttgtccgtcctctgtgcagtgacagccccggccaagccacctctaatcctctgtagcaataacggtgcgccgcccatccctgcccattgtgcaccactaggattttaaagtccatagattttaatgaaatttctattcctgtctctga

SEQ ID NO: 220875 - DNA, 1000 bp, Homo Sapiens
acttgcgttcacacaaaaacctgtatacgaatgttcatagcagctttatttgtaatggtcgaaacctgtaggcaacccatatatccttccttaggtggttaaaacaaattgtggtttatgtattaccatggaatacttgttactctgcaataaaattgacttattgatatccataacaactcaaataaatttcaagggaattaatgctgagtgaaaataatcacaaaaggccatattctgtatgaaaatattcatataacattctcaaaatgataaaactatagagatgaaaaatggattaatggttgccaaaggttagggatggtgggaggaaaaatggggagagggttggatggaactattaaaaggtagcaccagaaaggtctttgtggtgatggaacacttgtgtatcttgattgcagtggtggttacacaaatctataggtgctatacctatacacacatactgtaccaatgttgatttcctttttcattttatgtaagatgtaaccatgaggggaaagtgggtgaagggtgctatctttgcaacttcctgtgattctatcatttcaaaataaaaagtaaaaaccaacaatggcaacgaaaacccaaaactaaagagctgtaaccaactaaagtgtgtgaaactgatttgaaaaaaagttataaaatacatgttttaggacagttgggaaatttgaatatgactggttattagatggtattagggaatttttgttgattttcttacctgtgacggtggtggtagtttgaagaatattcttaatcttaagggatgcatgttgaagtatttggaatgaagtgttctgatgtttacaactttcaaaaaaatgattttaaatatgtattgagagatcaggcaaacatagcaaaatgttcattgttgagtccacatggaaaatacgggtattcaatgtgccatactttcaactcttctgtactctgatattttcaaaataaaacatttgaggggaaatta

SEQ ID NO: 220876 - DNA, 1000 bp, Homo Sapiens
cagatggtggcaaacatctccctcaactgtttccctgggccagtctttagggagcctagggacaagggcccaccctcccccttccacgtgtgccaaatcagcacctgaagtgaggcatttccagcaagcaactccacagacccgagaaaggaagggctctagtggaagagctagcatctcaccaccccaggtcccctggcctggtccagggcagccagctgcatgtgaccattctgttgccagctccccacacatccctcctgtcacccaggctccaagacattcgaccaactagactgaaaatgcaggcatccagctttgggagaccctgtgtgtgccacaccagggctaagctctcccagtgccctagcaaggtctttttttttttttctctccttattctactctacagtcttttgacagtattcccaaacgaggttgacacagctccagtccacaccagcataccaggcttccttcccagggcagtttagaggaagctccttctgggcaaggtcaggcggtcctccttccctctctccttcccctttgtcccagcctcaactgactctggctgtgggaggtgtggagggtccttaggcttccctccccaacctggcctccaccaacacccctaacaggaggcccgtggaaggctcagcctctcctccgcatccctcctccttcctgcctatcggagggagccagggtcccctaggctgaccctgaatcctcttcctcccttcatgggaggggggcaggaatccagaggaggatgaagccagcgggaccacatggcttggtggcttggacaaacaagctcagggaggaaatgaggaggcggcggctgcagaggaatgcaaccctgttgggcacagaccatgcaatctggggctggccctggggccagctgggtcctgtcctccacctgctcaaccgtgcttccaccaaccagaggaaacccatttactagtttttctaataaatcaataatgctcca

SEQ ID NO: 220877 - DNA, 1000 bp, Homo Sapiens
cccatgttccattaatgcctccatctcctccatcacaagttatacctgcttctgagccaaagcgccatccatcaaccctacctgtaatcagtgatgccaggagtgtgctactggaagcaatacgaaaaggtattcagctacgcaaagtagaagagcagcgtgaacaggaagctaagcatgaacgcattgaaaacgatgttgccaccatcctgtctcgccgtattgctgttgaatatagtgattcggaagatgattcagaatttgatgaagtagattggttggagtaagaaaaatgcattgataaatattacaaaactgaatgcaaatgtcctttgtggtgcttgttccttgaaaatgtttggtcattctagtgttttgctttcttttccttataataaatgacccttttcctccataacttttgatttctaaggaaaatattagcatacatttcaaactaaatgttttacagtggcttatcttttttttccccctgaaaagactaatttggtcaaataaaccactaagtattaagcatggacagctgttgttagagtagcagattcagttttttgatatatcttaattgtgtactttgtgaattttaatttaaagaaagcaactgaaattgaaatcttgagggcagctgtgtctactaatgagccttattccatttcctgatgttttaaaagaagaaacactgccttgattatacgaatacactcagaaagtacatttagcttgtagtgttgaattctcttaaaggaatgcttgaattttttcattattgttttattgtttttatatacttgccttatttgaatgtttagcagtatccccttcccacttatatattgtgtgatatgattttgcttgcctataggagttaaaaacttttccatgtgaaatactctgacttaaacatacatgtaacttacataactgttaagaataacagtctgatttaataaatggttcattttaaaagttaaaaaaaaaa

SEQ ID NO: 220878 - DNA, 1000 bp, Homo Sapiens; identical to SEQ ID NO: 115454

SEQ ID NO: 220879 - DNA, 1000 bp, Homo Sapiens
tcggagctaaaggagaagttgttcagggaacgactgagtcagctgcggttgcggctggaggaagtgggggctgagagagcccctgaatacacggagccccttggggggctgcagcggagcctcaagattcgcattcaggtggcagggatctacaagggcttctgtctggatgtgatcaggaataagtacgaatgtgagctgcagggagccaaacagcacctggagagtgagaagctgctgctctatgacacgctgcagggggagctgcaggagcggatccagaggctggaggaggaccgccagagcctggacctcagctctgaatggtgggatgacaaactgcacgccagaggcagctccaggtcttgggactccctgccgcccagcaagaggaagaaggcacctctggtttctggcccatacatcgtgtacatgcttcaagagatcgacatcctggaggactggacagccatcaaaaaggctagggcagctgtgtcccctcagaagagaaaatcggatgacaggcggacccacaggcccctcagggtctgcccagccaggctcctgtggtgctgctgggccctcccactccatctggcactggcctggactcctcctctgccctcctcgaggcctgcacagctgtggccgtggagctgacctgaccaggcaaggctgctgtctccatccctgagccgcctgccacctcccactcctgaagatccatctcttggggctcccctgacagagaagacagccgaagtcaaagccacatcctcttgctgatgttggatgcaggctgtccggcctcagggccagggagccagtttccactgtgcgggaactctgagtcagacgtgattatctgggggtctgtccaccctggctggatctggaggcaagatgccaggccccccaggtgttctcagggcagttcttggtgtctgcttctcagattccaaggactggaattaaaacctttcctgggactctggaaaaa

SEQ ID NO: 220880 - DNA, 1000 bp, Homo Sapiens
ggccacctccccaggccgtggctgcccacacaccccaattagctgaattcgcgtgtggcagagggaggaaaaggaggcaaacgtgggctgggcaatggcctcacataggaaacagggtcttcctggagatttggtgatggagatgtcaagcaggtggcctctggacgtcaccgttgccctgcatggtggccccagagcagcctctatgaacaacctcgtttccaaaccacagcccacagccggagagtccaggaagacttgcgcactcagagcagaagggtaggagtcctctagacagcctcgcagccgcgccagtcgcccatagacactggctgtgaccgggcgtgctggcagcggcagtgcacagtggccagcactaaccctccctgagaagataaccggctcattcacttcctcccagaagacgcgtggtagcgagtaggcacaggcgtgcacctgctcccgaattactcaccgagacacacgggctgagcagacggccccgtggatggagacaaagagctcttctgaccatatccttcttaacacccgctggcatctcctttcgcgcctccctccctaacctactgacccaccttttgattttagcgcacctgtgattgataggccttccaaagagtcccacgctggcatcaccctccccgaggacggagatgaggagtagtcagcgtgatgccaaaacgcgtcttcttaatccaattctaattctgaatgtttcgtgtgggcttaataccatgtctattaatatatagcctcgatgatgagagagttacaaagaacaaaactccagacacaaacctccaaatttttcagcagaagcactctgcgtcgctgagctgaggtcggctctgcgatccatacgtggccgcacccacacagcacgtgctgtgacgatggctgaacggaaagtgtacactgttcctgaatattgaaataaaacaataaacttttaatggtaaaaaaaaaaaaaaaaaaaaaa

SEQ ID NO: 220881 - DNA, 1000 bp, Homo Sapiens; identical to SEQ ID NO: 115457

SEQ ID NO: 220882 - DNA, 1000 bp, Homo Sapiens
gtgccatcaaggagaacaagtgcctcctgctcactttcttcctgctgctgctgctggtgttcctgctggaggccaccatcgccatcctcttcttcgcctacacggacaagattgacaggtatgcccagcaagacctgaagaaaggcttgcacctgtacggcacgcagggcaacgtgggcctcaccaacgcctggagcatcatccagaccgacttccgctgctgtggcgtctccaactacactgactggttcgaggtgtacaacgccacgcgggtacctgactcctgctgcttggagttcagtgagagctgtgggctgcacgcccccggcacctggtggaaggcgccgtgctacgagacggtgaaggtgtggcttcaggagaacctgctggctgtgggcatctttgggctgtgcacggcgctggtgcagatcctgggcctgaccttcgccatgaccatgtactgccaagtggtcaaggcagacacctactgcgcgtaggccgcccaccgcccgcttctctgccaaaaggacgcccacggggagatggccgcacccacagctgcctttcccaccaccagcctcggtgctctgccccatgctgggaggagggagggagggacaggtgcctggagcccccggaaccctgtttctggaaggccctagctcaggtggcttcagggcctccggaccccccctgggaggggtggccacgtgctggctgcggaacccagggcaggggtgggaggggcctccagcactttttatatttacgtattctccaaagcagtgttcacacgggagccagcctgtggcccccagcctcctggaaaacaggttggcgctggaggagccgggtcttggcatcctggaggtggccccactggtcctggtgctccaggcggggccgtggacccctcacctacattccatagtgggcccgtggggctcctggtgcatcttaataaagtgtgagcagcaaccttgaaaaaaaaaaaaaaaaa

SEQ ID NO: 220883 - DNA, 1000 bp, Homo Sapiens; identical to SEQ ID NO: 115463

SEQ ID NO: 220884 - DNA, 1000 bp, Homo Sapiens
acagttcctggttcctcttgtgtttgacactaagaaaatagcaagagtgtgaaatctcagatacttatgaaatctcacagatgtaaggactcaagtgtagaagaaaatatccccttcttacaaaaagaaatgtcaatttatggagtttgtgggaaatagggcaagaattcttatgcttatgagagccaagtagtcagtggaagagagtagagctcaaaactggattatcaccttagcaacttagaatagtttgaaatagaaaaaaagtatttaatttggatctggatctgttaagatatgcacagtctattttttgtatagtattggaaaataaaaatgctataatttgggtatgggttcttttgtatacattacctgcccattgaggaaaggggcaagtccattatgcaacttctctccaaacccttcatattctggatatgatacttaaagagccatgagcagctacattctgcctatcagaaggcatttattaaatgactgcttgctgaagatgtgtccaaagagatcctacattaaggtcatttgtcagaatgatgtttgtgtttgtttagagttggctgacctccaactcctggggtcaaggaatcctactgccttagcttcccaaatagctaggactataggcatgcacccggccatgtgttttatttatagctcttaaagcccagatgaagaaatcacatttttgcccatagtgaagaaacatttggccattgattagtccttattttcagtgactgtcctgttttcattagattagagagaccctgtgtgggccacagttaatataaaccattatcacttttaagtaaacctgcacatcttagatttcataatttccttattgttctgactcaaaatgaactaagagcttttcactttttgtttgtaagttctcagagagtcgggtctgcaagtgcttttgcctgccaggattttgtactcaaataaatgctatttggcaactaaaaaaaaa

SEQ ID NO: 220885 - DNA, 1000 bp, Homo Sapiens; identical to SEQ ID NO: 220884

SEQ ID NO: 220886 - DNA, 1000 bp, Homo Sapiens
agtgtttaaatttggcagttactcgccatgtatgtcagcatagaaaaggaaatgtttttaccttatctcctgtatgtatgatagaacttaaaagaaatgtgcatttgttttcatagccccagcagagaaaatcctcttcatagattaaatgtgctgctgtggacaggagggaaaaaaaaaccctctacatattgaaaggcaccaaatgtaatatctgacactgttaagatgcccaaaagagcaaagttgtagtggagatgcagggtcatttccccatgccatccacagtgtttgttagtgagtccacggctgacttgcagtgataaagaaaagcatggagctgtgtctgcagacaatggtggctgcatctgtaagtggcttcagaggcagcagccctggggaaattgatgggtgtggcagtggacctgtgaagagggagaatctagccttcagcctgtccagtgttaaccactagagaaactgagctttatatccttttttaatgcctgtgaattttagcatattgaaacattagagcaaatactcaggggatttttcattaaacatccctcagataatttagctatatatcattagaaagggaaagctatcatttttattttaaaactaaacaaggccatcttataaactgtcaccaaagtcttcccttttttattgcatgtgtgccttgaatttcataaaacattaattcacaatgggggtcagaatgtactcttgttgaaacacttcttgtaccattttatgttcatattatgtttgagagggtaaaaatgtatgagcagcttaactgaagtagaactattcatgatgcttttcacacattgtggcataagatgtaaagtttgtaattaatgttaatttctgtgcattttaatattcttttataattattaatgttaatttctgtgcattttaatattcttttataattatgagcattttaataaattcatttttacaaacaaaaaaaaaaaaaaaa

SEQ ID NO: 220887 - DNA, 1000 bp, Homo Sapiens
atcccagaaggtgaagaagatctggcaaaagcaattcagatggcccaagaacaggctacagatactgaaattttggaacggaaaacagttcttccttcaaagcatgcagtacctgaagtaatagaagactttctctgcaatttcttgatcaaaatgggaatgaccagaactcttgattgctttcagtctgaatggtatgagttaatacagaaaggagtgactgaacttagaactgttgggaatgttccagatgtctacacccagattatgcttttggaaaatgagaacaaaaatttaaagaaagatttgaagcactacaaacaagcagctgagtatgttattttttaaatgacattttcttctttttcttttggactaaataaaagagttgagtgaagctgatatatgtaatataccagagccttaatttttgaaaactgaatttttctagttgtaaagaatgtgagaggcttcattagcaaattaattaaacagatgatcagaactatcacaattataacttaccaacaagaagggaatgcaggtagttgtttaggagatggtacattttttatataacattcacttccttgtgtatttgatagtcttttcatggtttataacattttctcctgtaaagataggctaatttctgaaataataattaaatttatagaaagccgagaggaaattgctagtttattcctggtagaggaatttctgtatttgaaaattctccagaaggaataatataaactgtggactttgggtgataatgatatgtaggttcgtcagttgttaacaaatgtatccctctgttgggggctattgataatggggaaggctgtgcatgtgtgggagtaggaggtgtatgggacatctctgtaccttctaatcaattttgctatgaacttaaaactgctctaaaaataaagtttattaaaaaaaagttaaaaaaaaaaaaaaaaaaaaaaaaaaaaaaaaagaaaaaaaaaaaaaa

SEQ ID NO: 220888 - DNA, 1000 bp, Homo Sapiens
actgcctcatccccagaacctccccttgtagcatgatctctgcccattctcctcggccccttagctgcctggagctcccatctgaaggtgcagaagggtctggatcccggagtcgtcttagtctgccccccagagaaccccaggttcctgaccccctgttgtcctctcagcgcaggtcatatgcatttgaaacacaggctaaccctgggaaaggtgaaggactgtgattaggaccacagccctgggcaaaggggaccagcaagttgtcttgaatctccagggttcctgactagctgtctcctctgcagcatgagcagctgtagtgcccaactctataggctttggccctccagcttctctctttgactgtgggaggcactgccttggttggtttacctgaacttgtctccgacacaaagcacttatctcttaggagattcccaagaaagtcaacaagatcttgttcccagggagtgggtcattggccaaagggaacataaggtaggcagaaaacttaaaagagtttgttaaagtgaagactggagaaattcctcccttcctctgagctgtgaatctctcttcatgaaagccaaaggtagagacagggaggacagggccaggttagggccttccacacacaaacacttctagagttgcccattcctgttatgttcttggaccctaagatacctcctgtcccttttaaatccagattaagagaaacgtccaggaagagctctttgaagccctcaatatttgttggagggactggactcctctccagctccccaccctctgcctccagtcaccatgtgcaagagaggtcctgtacagatctctctgggctctcctttctcctttggaataacttgttcctatttcaggaaagggaaatggtgtcactcaggccctgggactgcttctccagccaggctggggccacaggtcccactctagtgaaggtcaatgtctcagaataaaagctgtatttttacacata

SEQ ID NO: 220889 - DNA, 1000 bp, Homo Sapiens
agggaaggaagaccagaactggccatcctcttttataatccattagtagcaccatggctcatttgaaatgaaaatattacacttattccccacccaaccgcagtgaactttctaggtaattgttttgaaaacaatttttgtatctgtgaaagtctttgctttttctttccaccttctagaaaagtctgctaccagtttccttactgaatacagccatactcagcccctctcgcatccagcccgtcagggtcagggtcagggtcaggctccctcaagacgagcaccgcattgtctgccctcttttgcgtaggatttttctctcagacccaggggacattgccttggacttttctctacaaatgccctcagatgtaagaccagaaatgattctgcttgtggaactcgtggctttctgtcctattttccttttatgtgagccctgcaggttgcctttggcgcccacaccagttctgtcttcatgtcgctgcatcgtgaagccccatttgcctttagtccctgctttgtgtgtcttcacttccacagccagtgttgcccctcagggcatactttgctggtgaacgggctgtagagtcttgagtatgttattggcctaagtgggcatgaggccccagcatccgactccatctgccaggctgcagggcacagcagcactggcatagacaggcacgctctgtcttccaacgtgcaccagccttttcttacatattttgcctgtttttaaaaaatacgaggagagggtgcagatggatactgtgccctcaccctcctaagccaggtaatatattgatgtgcagacttttaagaaatcttagtcttatcacaaatatcaagtaatttattttttccattttcaaatgcaaaagttagcctaggaagcctcccagtcatcctgaaggaccttttgactttgcttttataattctgttaaaaattgaggaggggattaatgagtacaatgaaaacaaaacaaaacaaaaaa

SEQ ID NO: 220890 - DNA, 593 bp, Homo Sapiens
ggggtccttccgtgcgcgttgatatgattggccggcgaatcgtggttctcttttcctccttggctgtctgaagatagatcgccatcatgaacgacaccgtaactatccgcactagaaagttcatgaccaaccgactacttcagaggaaacaaatggtcattgatgtccttcaccccgggaaggcgacagtgcctaagacagaaattcgggaaaaactagccaaaatgtacaagaccacaccggatgtcatctttgtatttggattcagaactcattttggtggtggcaagacaactggctttggcatgatttatgattccctggattatgcaaagaaaaatgaacccaaacatagacttgcaagacatggcctgtatgagaagaaaaagacctcaagaaagcaacgaaaggaacgcaagaacagaatgaagaaagtcagggggactgcaaaggccaatgttggtgctggcaaaaagccgaaggagtaaaggtgctgcaatgatgttagctgtggccactgtggatttttcgcaagaacattaataaactaaaaacttcatgtgtctggttgtttgaaaaaaaaaaaaaaaaaa

SEQ ID NO: 220891 - DNA, 1000 bp, Homo Sapiens
aaaattagaacatcgttatttttttctacttgcaatggaaaatctattttgcttttttgcttctaggaaaatattctgattatgatatgtgatatgttggctactcaaagtcagaacttttcaaagtaatcagtaaattgaatcaacagaaaaatattcattaactcggggatgcattaataaagtttttaaattcaaaatgtatagaaaaatcaagcttagtaatactttaatattattctaccaatgtattttttttaattaagacttctgtatgcagcagggcatggtggcacacctgtagtcccagctactagggaggctgaggcaggaggattacttgagcccaggaattcaagcctgggcaacatagtgagtcctcatctcctaaatttaaaaaacaaacaacaaaaacttctacgtgtggtaaagggttaactcagcaagcttgggttgcttaaaccttgcacattccaaagaaaggtctgaccccagtgctgacctttgactggctactgggaaatgagctctgagcccctggataggaatgtttctgtttgcctgaggcctttgaccatgccagatagtttatgctaacaatgtgatttatagtgaatacctgttttcctgtgtctaagaccctgggctgcactgtattaatttgaccttgggtatttggggagctgagactgagtagctgaagtgagtcacataagcactaaatgcttacctgactgacccccagtaaaactctggacatccagacttggatgagcttccttgggtggcaacacttttacgtattgtcacacaccattgctggggggattaagcactgtctgtaaaactccactgtgaaatgacaactggaaacttgcacgtggtctctcctgattctgctctattcaccttttccctttgctgattttaatctccattcttttgttgtaataaaccataatggtgaataaaacaaaaaaaaaaaaaaaaaaaaaaaaaa

SEQ ID NO: 220892 - DNA, 1000 bp, Homo Sapiens
agagtctcctgataaagatggtcttctgaagcctacctgtgtaaggaaagtttctcttccaaataaagccttagaattaaaggacagagaaacattaaaagcagctcagatgttcccatcagaatccaaacaaaaggatgatgaagaaaattcttgggattttgagagtttccttgagactctcttacagaatgatgtgtgtttacccaaggctacacatcaaaaagaattcgataccttaagtggaaaattagaagatttcaggccgggcactgtggttcacgcctgtaatcccagccctttgggaggcagaggcatgcggatcacgaggtcagcagatcgagaccatcctggctaacatggtgaaaccccgtctctatgaaaaaatacaaaaaattagccaagcatggtggtgggtgcctctagtcccagctactcgggaggctgaggcaggagaatgtgagaacccatgaggcagagattgcagtgagccaagatcatgcacctacactccagcctgggtgacagggccagactctgtgaaaaaaaaaaaaaaaaaagaatttatttattgtggcactattcacaacagcaaagacttggaaccaaaccaaatgtccaacaacgctagactggattaagaaagtatggcacatatacaccatggaacactacgcagccataaaaaatgataagttcatgtcctttgtagggacatgaatgaaactggaaaccatcattctcagcaaactctcgcaaggacaaaaaaccaaacactgcgtgttctcactcataggtgtgaattgaacaatgagaacacatggacacaggaaggggaacatcacactccggggactgttgtggggttggaggagggatagcattaggagatatacctaatgctaaatgacgagttaatgggaacctgcacattgtgcacatgtaccctaaaacttaaagtataatattaaaataaaaaataaagaaaaaaaaaaaaaaa

SEQ ID NO: 220893 - DNA, 1000 bp, Homo Sapiens
gatcttagatggagcatccagaagccccacccttcatactggccagagtggcccctgccagcgcctctctggagtgtcattaagctgaaagtgtttgccttacctctgcagtaggatgcattactgaagtggcctcttggtcacctagctctgaattttcctggctccagaaagaggctgtggggcacaggtcccccacaatgaggctgtgaaggggagagaggcaggcctgggccaggcacaggaggacaactagggcttctcaggagctgtctcagccaagagtcacacacttgatacctaaaatggcttcaggaatcttccaagactgaagacttccccaggtgtggtctagggcctgcctgcctcagagccatgagcagagccggtcaaaaggcttcctagggaatcctaccccagacattaaaatagactcttggtgctggcaggtggctggaatctgcgtttgtagccaagtgctcttcctgtgtgactcagcaaagtgggggtgcatttggggaacacccggggctggggcctgagtcctccacccaaagccaggtttgattcttgcattcccctccctgccttccatccagacaggcccaaagatgcaagaggcgttgatcagcccatctccatccatgcctgttgcctcagagagggccgacggcttttaaaatgctgttgccatagcaacagcatccagccagtgggtaccacaggcagggagccacagaaactggggtgctgggatggaaactgacttgtgagagaccacagctactgctagaaggaaggggggcaaagcgggcacaggtaatctaagaatacttgggcgggaggagtccccaaggttaccttgtgcatccctctgtccccagaaagaactgtaccccaacaatctctcccctcactgcatcccctggggaagaagggaatgcagaaatgaaatgtcataatgagtaacaatgtataaaaatatcgaataataacagct

SEQ ID NO: 220894 - DNA, 1000 bp, Homo Sapiens
atattgaactctagcttcaatctagttcctactaatccatgcaaaagttattaactgataagcccaatcttgttcagcacgttcttctaaatgcctgacctaaataacttctgcttggttaacttgtgttcattctcaccttagcctcagtgtgaaagtaacacttaccttctgtgcaattgtcctttgtacaactgaagactgttaataaattcaggtctcacctccatgtctgaaaaggctatagtagctattcatggagatgggaatttgtctaattacctagccagagtttgcatatttaaggtaatatattcagctaccgtatcttttattcatagtgcctgttttccagcctttgatcagttttgtagttcccgtggataaactccaagatctaaagatcctctttcagtagcatatactaaaattaagtttagtgctcaaaaccctggtaacctacactggcccaaggttacagtaggtaattcaccgtctcacattagacaggccaatgcatcccttaggagctgccccactctcctctcacctaccaaaggattttctcaggtgtggttccaagcgataaagttctactgtctcggcttcctgctggtaattcgctttcagattagcaataacactgagctgatctctagggttaagaagagaacattgaactcattttgtcgcatgtacccacaggcttgaaacagaaaatgatgtaaacttttgtggcatacattcacccattttcccaccatatctttactatcctgtgttgatttttttttcaaattacaaagacaatacatgttctttgtgggaaatctgaaaaatactaccaaatagaaaataaaaatcacctgaattccaccacgaccacattgtttaaaaccacatttctgggttttaaatcagtcagtggctgggcccaaaggcacttttgggtaagataagtgaagaaatgcccacaaggccaaggtgtcacttaaaaaaa

SEQ ID NO: 220895 - DNA, 1000 bp, Homo Sapiens
ggcaactcctttgcaatgcagctggcagcgacatccttataaaaacatgtgctaaagctctgtcctctgttagaggtgccttttaggaatacggggagtgaaggaaggccggcaggcatctccatgcaactagatggtttgtttgtttgtttgtttgtttgttgttcattttgttgtgttttttgagacagggtcttgctctgtcgcccaggttgtaatgcagtggcgcaatctcagctcactgcaacctctctctcccgggttcaagtgattctcctgcctcagcctcccaagtagctgggattacaggcacccaccaccatgcctggctaatttttgtatttttggtagagacagggtttcaccatgttggtcaggctagtcttgaactcccaacctcaagtgatctgcccgcctcggcctcccaacgtgctgggattacaggtgtgagccactacgccccggcccaactggatggtttttgattgaagcctagaacatctgtagagacaaactctacccagtcttttctagaccctcaactatctccagtgttgttgtttaatcgtagccggatcagggagtgagtcttttaggcaaatgttggattatatatcaaaggaaaagcttagtttcagagaggaggaagggaaagagatgtgagggaagcatttcatcaaccagctacgtcccccttagaaggatcactgcagcaggtcaccgagcaggagtccctctgagcgtcccttctgtctcgttctgccctagctggcagcatatgaaccaggcatgatgcagcaggagcagtgaatctggagtcagccacttggcaccctggtttcgctgagaacaaactctgagatcttgggtgacttctcatcactctggacctccattcctgtgaagtgacaggtgtggaccctgagggtgcggtggtgagcacactgtctcctgctggcattcaccccactcatgctggaaaggaagatccagatcgtac

SEQ ID NO: 220896 - DNA, 1000 bp, Homo Sapiens
aaatgatcaaaaaagataagtaccacaagaaagtttttttgtttggttggtttttttgtttgtttgtttttttcttgagactgagtctctccctgttgcccaagttggagtgcaatcttggctcactgcagcctccacctccccggttccagcgattctcctgcctcagcctcttgaatagctgggattacaggcgcccgccaccacacctggctaatttttgtgttgttagtagaggcggggtttcatcatgttggccaggctggtctcgaactcctgatctcatgatccgtctgcctcggcctcccagagtgctgggattacaggcatgagccactgcgcccggccaagaaagtatgtttttagaggtgtgtgtaagtgcatttgtattacctatgaacaaaattacctgactcttgtcccaggaaagctgtttcgcattttcgctttttgattggtattatccagttctatgtagttcatattattgttctgtctgactctcagaaattacttcttcacgccagtgtcttgttgcatgactttgatgtcacctataggaatacacctcactgcacgtaagtgggtatcttactgtataaaaggtctacatggctttaggttttaggacaaatgtgtagatttatagaccatttctgttggccaggacacagattttgagagctgtgtgtatatatatataatcatgtttgtatttttttcctgaaagttatcaattgcttttgtttaaaacagtttgttttagaggtggggtggggatgtatataacgaggaaaagttatatgtactttaaagtatgtcaagttcttactagtttcctgtactgaaggttcaattttttttatataagtttacttttcacctgctctattctttgtggggaaaaaatgcatctagaaaaacatagtttaaatactgtatataagataatgaaagttagtaacgtccattatttaataaagtttgtaaagtacaaggt

SEQ ID NO: 220897 - DNA, 1000 bp, Homo Sapiens
tgttgagtgtatactggtacaagcacttggaaaagttagtaattgctaaagctagaagtttgcatactctatgacccagtcatttcagtcctaggaatatattaatcagaaatgcatacctgtgtccaccataatttgttaatagctccaactggaaactacccaaatgttcattaatagtagagtggataaattgtgggatattaacacaatggaatcctttttgcagtgagaatgagcatagcactatggacaaatcctgcaaacataatgttgaaataaagatgccaaacacaaaagagcacatattgtacaactaatgcacataaagtccctaaacaggcaaaatgaatctatgttcttagaagcaggattaatggtatacttgtaggacagaagagtagtgaccagaagaagattctaggaagctagcaatgctggtgtcatgccagacccctagtgactccaatagtaatggcactgtgtccgagagtccaaagaagatgcgtagacagcgaacaagacttgggtttattgggggaacttatatatagggatggtccagtggtagtaggctggacagaagaaccactactgtttgtaaaaagcatgcagtttatatagcattttcatttagcacactccacctagcaacctccatttaacccaaagcaaaggaccttgatcccctatattgcctgtgttgtaagggatgggctgggggttcagacgtcattcatagataaggagtgaaactcagggttagtcgctcctgtttccttagtttgggattctgagcacacattcgttttagatcacagggtcgttctcaggatatggttgttactgctgtcaggtgcatcctctctatagcggggtactggctacagtttttgttcactagtgataattgttagagctatgcccttaatatatgtcttgtgtgtattatacttcaataaaaagttaaattttaaaaaacccaaaaaaaaaaaaaaaa

SEQ ID NO: 220898 - DNA, 1000 bp, Homo Sapiens; identical to SEQ ID NO: 115472

SEQ ID NO: 220899 - DNA, 1000 bp, Homo Sapiens
ctgaaagtaaaattttctaagatttaataagggaagatactattcaaatcattttcttaggatagcatctttacatacaatgagaggattgtacaagcattaatctcatattccaacatccagttacttgatgtgatccaagtaccctggtctttttgaagcagttaaaatctaattaattaactttgggagtcttcactattcaattgatcctcatcattgtcctatttgcatgactccattttttcctccactatatgagttttctttgtcagggggagaggagtgggaagagtcacagaatctcatattcacatcttaattaaattgtgtgaaattagtcttttgtggaaattctgtaggcagtatgattttgaaaagctaaccaatgataattagcattttagttaatactaaatgcataaaattataacccttgaaattaatttggtgctggcagttctggtttagtcatttttaccagtagttagtagtattaagacctgcagtatatgcactttttgagtagctgtcaaataattgtagttgagaaacaacttgtttattctcacaattcagattttctattcagttttgtctcaaatagtaagttattgtgaacaatttaataacggccctcctgttctagtttgcctaatattttagttaagatttagtgttttaacctatttttttaagtttattttttgtattagattttatttgaataagttatgtgggtttagtaattgacctatttattcattgcttcactaattcatccagattagttttaagtgtgtatatgtatttgctcaccagatcattttcttgggaccttgaactgtgaatgttttgtcctaaccatttaatattttctaggtacttgctgcaagttcttgaactattttaccagctttaactttggggctcttagtttcttttctccagattcttgttattttattttatccaaataaatatttaggtgttctaagaa

SEQ ID NO: 220900 - DNA, 1000 bp, Homo Sapiens
tttgagaccagcctggccaacatggtgaaaccctgtgtctactaaaaatacaaaaaaaattagctgagtgtggtggtgtgcgcctgtaatcccagctactaaggcaggagaatggcttgaacccaggaggtggaggtcgcagtgagctgagatcgcgccagtgcgctccagcctgggcaacagagtgagactctgtctaaaaaaaaaaaaaaaagaaaagaaaaaagaaaaattgaagaacataacttttctacttatgaaatagataattttttaaaattgtttaaactcctggaaattaagtgttattttttattactgcagttgagagataccttttcagaggaaaacaagaggctaaattccatgttaagagctaagtagtatttttttcttaacaattttgccaaaatttcttctactggaccaaaaggaaataaatctacaataaatctactttctaaatattatttaagatgggaaatgtcttttataggtatattctgtataatacccttaattagatgaattatcccttatcattccaaaaatgaaatgctgtgttaaatatctccagggcaaagtggtatgttgactgggacaaacgttagaaattgtattgttcattgcacttgttgccctgttccccaagcttgtcaatgtttagagatactattcgggttgctaaagccattattcatagaaaatttctgcccctacagaagtgtgtgcatgggccttggaaaatctacatgtgtatatctgagtagcgaagcacagattcactctaattgaaagcagcagtttggttttgtaaatgtaattgcaattgacactttcttttccctttcagttattattttttttaaaggacgttatgagaaggcactatgaaaagcctaattggaatagcattatgaaccatgtaatgcatgcccatgcacactgtgatttgcaaacatatgtccgctcttcaataaatgttacggctttcacagcg

SEQ ID NO: 220901 - DNA, 1000 bp, Homo Sapiens
ggagaaggtggcccaaagaggacccaccccactgttccagggattccagggggaacccgggctggggcaggaaaaataggccgaatgattgctgaggaaatcatggaaatccacaggataagagggtcatcgccttctagctgtggctccagcccattgaacatcacgagtacgcctccccctgatgcctcttctccaggaggcaagaagattttaaatggagggactccagacattccttccagtggcctactatcaggccaggctcaggagaacccaggttatccatattctgatagttcttctattcttggtgagaacccccacataggtatagacatgattgacaacgaccaaggatcaagtagtcccagtaatgatgaggcagcaatggctgtcatcatgagcctcttggaagcagatgctggactgggtggccctgttgactttagtgacttgccatggccgctgtaaacactacatgttgctttggcaacagctatagtatcaaagtgcattactggtggagttttacagtctgtgaagcttactggataaggagagaatagcttttatgtactgacttcataaaagccatctcagagccattgatacaagtcaatcttactatatgtaacttcagacaaagtggaactaagcctgctccagtgtttcctcatcattgattattgggctagctgtggatagcttgcattaattgtatattttggattctgtttgtgttgaattttttaatcattgtgcacagaagcatcattggtagcttttatatgcaaatggtcatttcagatgtatggtgtttttacactacaaagaagtcccccatgtggatatttcttatactaattgtatcataaagccgtttattcttccttgtaagaatcctttactataaatatgggttaaagtataatgtactagacagttaaatatttttaataaatgtttcccttgttctataaaaaaaaaaaaaaaaaaa

SEQ ID NO: 220902 - DNA, 1000 bp, Homo Sapiens
tcttttaattttctggaggaaaaagcaaagcaaaagaagcagtggatattttaagactaaaaaggaaaacaaaaaaaggagatagagcaggccagacgtggtggctcaacgtctgtaatcccagcactttgggaggccgaggcaggtggatcacctgaggtcaggagttcaagaccagcctgaccaacatggtgaaaccctgtttcaaaatacaaaaaattagctgggcgtggtggcgggcacctgtaatcccagctacttgggaggctgaggcaggagaatcccttgaacccaggaggtggaggttgcagtgagccgagatcacgccattgcactccagcctgggcgacaagtaaaaaactccatctcaaaaaaaaaaaaggagatagagcaaggaacagtaagaaaatagttgggtgcagtggctatgcggtggcactataggaggctgaggcgggcagatcacctgaggtcaggagttggagaccagcctgggcaacatagacccctatctctacaaaaaatttgaaatatgaaaaattagccaggtgtagtggtgtgcgcctgtggtaccagctactcaagaggcgaaggcagggaagattgcttgagcccaggagtttgaggctatagtgagctgtgatcatgccactgcactccagcctgggcaatagtgtgagactctgtctcaaaagaaagaacatggccaggcgtggtggctcacacctgtaatcccagcactttgggaggccgaggcagtcagatcatgaggccagtttgaaaccagcctggccaacatggtgaaaccctgtctctactaaaaatacaaaaattagccaggcgtggtggcatgcccccgtaatcccagctacttgggggtctgaggcagaagaattgcttgaaaccgggaggcagaggttgcagtgagccgagatcgtgtcattgcactctagtctgggcgacagagcaagactccgtcttggaaaaaaatttaaaaaaa

SEQ ID NO: 220903 - DNA, 1000 bp, Homo Sapiens
cttataggtcaggagtttccaccttttcccttaaaggaagcgcttggcagcttctctggtgtgtctgagtcgccagcatcaccactgtcctgttctggggccattcttaagtaaaataaaagcttcttggacccaagcaccacatcaccgcgatggctggtctgatcaccgagatggctgctgagtgcctggcaggcagggtggcgtggatggcccgaaacgctggacggagggagggttgatgtcccagcaggacggctgctcagaacagcacagaatcaaaaactcatgaatggtttatttctggaattttccacttagtatttttggactgtggctgaccatgggtaactgaaaccgtgtgtaagggggactgttgtgaggggctgtgcacaaatgcttcccagctcttgagggcctggacgcagtgacccgtgcactcagggtcttggccctgataccattctgtaaccaaaaggaaccagggccaggccagagaaggtatcagatgagctagagagtgaagaattgctgggatgaggagacttgttgaaataacacggggggatgggaaggagcatacggtggccagcctgggcagtgtgagcgtgaaaataaacaggctgggcgcacggctcacgcctgcaatcccagcactttaggaggccaaggtgggaggatcacttgaggctaggagttcaagaccagcctgggcaacatgggtgaaaccctgtctctacaaaacaagaaaagtcagccgtgcgtggtgtcacccgcctgtagtcccagatactcaggaagctgaggcaggaggatcacttgagccagaggttaagtctgcagtgagctgtgattgtaccactgctctccagcctgagcaacagagccggaccctgtctcaccaaaggaaaaaaaaaaaaaaaaaagaaagaaaattaattattgtaatgggctgtagccctcagaataaattgatatccagtagtctataaaaaaaaaa

SEQ ID NO: 220904 - DNA, 1000 bp, Homo Sapiens
aagcactaaagcaatatgctatggactattcgaataaagctcttgagaagggactgaatcctctgaatgcatactccgatctcgctgagttcctggagacggaatgttatcagacaccattcaataaggaagtccctgatgctgaaaagcaacaatcccatcagcgctactgcaaccttcagaaatataatgggaagtctgaagacactgctgtgcaacatggtttagagggtttgtccataagcaaaaaatcaactgacaaggaagagatcaaagaccaaccacagaatgtatctgaaaatctgcttccacaaaatgcaccaaattattggtatcttcaaggattaattcataagcagaatggagatctgctgcaagcagccaaatgttatgagaaggaactgggccgcctgctaagggatgccccttcaggcataggcagtattttcctgtcagcatctgagcttgaggatggtagtgaggaaatgggccagggcgcagtcagctccagtcccagagagctcctctctaactcagagcaactgaactgagacagaggaggaaaacagagcatcagaagcctgcagtggtggttgtgacgggtaggaggataggaagacagggggccccaacctgggattgctgagcagggaagctttgcatgttgctctaaggtacatttttaaagagttgttttttggccgggcgcagtggctcatgcctgtaatcccagaactttgggaggccgaggtgggcggatcacgaggtctggagtttgagaccatcctggctaacacagtgaaatcccgtctctactaaaaatacaaaaaattagccaggcgtggtggctggcacctgtagtcccagctacttgggaggctgaggcaggagaatggcgtgaacctggaaggaagaggttgcagagagccaagattgcgcccctgcactccagcctgggcaacagagcaagactccatctcaaaaaaaaaaaaaaaaaaaa

SEQ ID NO: 220905 - DNA, 1000 bp, Homo Sapiens
agtggcgaggagggcctggcccctgacagtgaggtgggcaggaagagctaccggtgcgagcagtgcggcaagggcttcagctggcactcgcacctggtgacgcaccggcgcacgcacacgggcgagaagccctacgcctgcactgactgcgggaagcgcttcggccgcagctcgcacctcatccagcaccagatcatccacacgggcgagaagccctacacctgccccgcctgccggaagagcttcagccaccactccacgctgattcagcaccagcgcatccacaccggagagaagccctacgtgtgcgaccgctgcgccaagcgcttcacccgccgctcggacttggtcacccaccagggcacccacacgggcgccaagccgcacaagtgccccatctgcgccaagtgcttcacgcagagctcggcgctagtcacccaccagcgcacccacactggggtcaagccctatccgtgccccgagtgcggcaagtgcttcagccagcgttccaacctcatcgcgcacaaccgcacacacacaggcgagaagccctaccactgcctcgactgcggcaagagcttcagccacagctcgcacctcaccgcgcaccagcgcacccaccgtggcgtgcggccctacgcctgcccgttgtgcggcaagagcttcagccggcgctccaacctgcaccggcacgagaagatccacaccaccgggcccaaggccctggccatgctgatgctgggggcggcggcggcgggggctctggccacacccccacccgctcccacctaggaggccaggaaagggggagcggggcgcccagggccactggaacagccccactggagtcaaggctccgagggaggagagaggggctcgggaagggagctggggcggtgagggcatggggtgaggcatggcgatgggggagggcgagggcgagaaagggcaggcactctgcgaattaaaggccttggacttgaaaaaaaaaaaaaaaaaa

SEQ ID NO: 220906 - DNA, 1000 bp, Homo Sapiens
agaagtctaaaaaaccatcacagtctatgagagcctaaggagatgtgacacctaaatgtcacatggtatccagagtgggactctggaacggaaaaaggcattaaggaaaatgaacaaaatctggatatagtatggagcaaagggttaccttccagttcaacatttaccttggaagaggggaccatctacttgaccgctgagcccaacactctggaagtgcaggatgacaatgcttctgtgcttgacgtctatttataagtgaaaatggtgatcacctaagcacatggatgagacgtgagcacagttatggcagagaagtttctccgcaccagaattatccacagcaacttggctgagccccactacacacagagaaatcatcaacctgacttaagagttttcaagatgtcaacttcaggctgatcagcagatgggatgtgaaaaatactaccctattctatcatttgctgttgcttgctgaactgtgaagaactgcatgaactatatttaagctgctttctgtaccattgccaatcacctttttggagttggaagtgctattttcctatggacttttgcattatttcattgtgcatgcatccagtgattatacataagcaacatatgtaatctgcttatatatttttaaaaatccatccacacacatggtaaattaagtataaattcttttgcaaaattatagttcatgtcattgaaagtttaaattggtttcatttaaagatcaatatactaggtctgccttcactttatagaaaactagcttctataaagatttttttcactgtttactagtgaaatgagaaaagcaaagctatttataaaaggccttatgtcgtgtacatacattgtctttgaaatatttgtgatctagtttattgcttgtaaaagagaaattatataatttatttagtaaatactactgtaaactatagttttgtgagagaaataaaatattttgttcccaaaaaaaaaaaaaaaa

SEQ ID NO: 220907 - DNA, 1000 bp, Homo Sapiens
agccgaaaagccaagtggaattcatgtgtttgctgttcttctccatgctcacctggctggcagaggcatcaggctgcgtcattttcgaaaagggaaggaaatgaaattacttgcctatgatgatgattttgacttcaatttccaggagtttcagtatctaaaggaagaacaaacaatcttaccaggagataacctaattactgagtgtcgctacaacacgaaagatagagctgagatgacttggggaggactaagcaccaggagtgaaatgtgtctctcataccttctttattacccaagaattaatcttactcgatgtgcaagtattccagacattatggaacaacttcagttcattggggttaaggagatctacagaccagtcacgacctggcctttcattatcaaaagtcccaagcaatataaaaacctttctttcatggatgctatgaataagtttaaatggactaaaaaggaaggtctctccttcaacgagctggtcctcagcctgccagtgaatgtgagatgttccaagacagacaatgctgagtggtcgattcaaggaatgacagcattacctccagatatagaaagaccctataaagcagaacctttggtgtgtggcacgtcttcttcctcttccctgcacagagatttctccatcaacttgcttgtttgccttctgctactcagctgcacgctgagcaccaagagcttgtgatcaaaattctgttggacttgacaatgttttctatgatctgaacctgtcatttgaagtacaggttaaagactgtgtccactttgggcatgaagagtgtggagacttttcttccccattttccctccctcctttttcctttccatgttacatgagagacatcaatcaggttctcttctctttcttagaaatatctgatgttatatatacatggtcaataaaataaaactggcctgacttaagataaccattttaaaaaaaaaaaaaaaaaaaaaaaaaaaa

SEQ ID NO: 220908 - DNA, 1000 bp, Homo Sapiens
tgcctctctgcgctctccgacggtctgggggcgctgcgccctcgcgccccggcggcccgcggcggcgtgtcacgtgcctcaccgctgctcctcctcctgctagtgccctccccgcgcttggccgccgcagccccgcgccggcagctcggggactgggagcgctcgcgcctcgggtatgccgcacccccggccgggcgcagcagcgcgtggaggtgctcaccgggcgtcgccgctgccgccggcgcccttccccagtaccacggcccggcgcctgcactcgtttcctgcaggagagagctaagcttgtctgctggatccctgcagctggagcgcaaaaggagagatttcacctcttctgggagcaggaaactctacttcgacactcatgccttagtgtgcttactggaagacaatgggtttgctactcaacaagcagaaatcattgtgtctgcattggtcaagatcctggaggccaacatggacatcgtctacaaagatatggtcaccaagatgcagcaggaaatcacttttcagcaagtaatgtctcagattgcgaatgtgaaaaaggatatgattattttggagaagagtgaattttcagccctcagagcagaaaatgagaaaataaaactcgaactacatcagttaaaacaacaagtaatggatgaagtgatcaaagtccgaacagataccaaattagacttcaacctagaaaagagcagagtaaaagaattgtattcattgaacgaaaagaagctgctggaattgagaacagaaatagtggcattgcatgcccagcaagatcgggcccttacccagacagacaggaagatcgaaactgaggttgctggcctcaaaaccatgcttgagtcacacaagcttgataatattaaatatttagcagggtctatatttacgtgcctaacagtagctctgggattttatcgcctgtggatctaataaagtgtctatttaaagtgaaaaaaaaaaaaaaaaaaaa

SEQ ID NO: 220909 - DNA, 1000 bp, Homo Sapiens
tgaaaactgatgtgtgtagaatgaaagaacacatggaagatagagtaaatgtggcagatttcagaaaactagaatggcttttcccagaaacaacagcaaattttgataaactgttaattcaatatcggggattttgtgcttacacgtttgctgcaacagatggtcttctccttccaggaaatccagcaattggaattttaaaatataaagaaaaatattacacattcaatagtaaagatgctgcatattcatttgcagaaaatcctgaacattatattgacatagttagagaaaaggccaaaaagaatacagagttaattcaactattggaacttcatcaacagtttgaaacatttattccatattctcagatgagagatgctgacaaacattatataaaaccaattacaaaatgtgaaagtagcacacagacgaatacacacatactgccaccaacgattgtgagatcatatgagtggaatgaatgggaattaagaagaaaagctataaaattggctaatttgcgccagaaagttactcactcagtacaaactgatcttagtcacttgagaagagaaaattgttcccaagtgtaccctccaaaggacactagcacccagtccatgagggaagacagcactggggtgcccaggcctcagatttacttggctggtcttcgtggaggaaagagcgaaatcaccgatgaggtcaaggtgaacttaactagagatgtggatgaaacctaattacagacaacgttttaaaatagatgctactcaattatgaacaatagcaagtacttaaaggtatattaacatctatacaaattaattttgtaggggtggcacattcattggttgtgtgactgtttattgggttgccatattttataaaactgttttctgtaacacatttttcattctgttgaaattgaaaaataaaactgtccatttatcttttaaaaaaaaaaaaaaaaaaaaaaagaaaaaaaaaaaaaaaa

SEQ ID NO: 220910 - DNA, 1000 bp, Homo Sapiens
gatcagatggcattgccagggccacagccaactgctgatcgccagcaccacctgagatggcatctcttgttttaaatagatgcactaaccctgaagattaaggccaaaggggcagactgactagagaagtataaggtctgtctctgaatgccatggtgcccacctatgagaccctgaggccgcaggacaagaagaacaccattctagagggcttccagccctttcacaaggtggacctgtactgatagagaaacacactctctaagaagtgcttactcacccttttccaaaggagcacaggtgttggccatcagaagacacactggagcgcatgggcctcttcactgtgtgccaagctcagtcacctctgattcagcccctgagggtgtctgctgccaggtgccctcagggtaggagagtgggaagtacacgccaagctggaaagtgtgttctgaagaccctcctcttgccaagtgccttgcccattgcaaccttgtgtgtgaattctaatgggtttgaatgggggtcagggtgcatggggaagttgctctgtggacctttgggacacaggaatcttggacttactggcaggggatccattctgaaagcaccatcctgtcaactgtgttattgaggacatttcttgatgtgagtatagtctgggtggctatttactgcccactatagaaattgtttgactatgtagtggaccatgtatatatgataaattatctattttaaacacagctggggtatgagttgtgccctctatatagctgtgtgaacttggctaaatttcttatcccctaatgacctcagactccatgtttgtgtaaagacgacttaacttcccatagaattcttgagggtaaaatgggataatgaatcttgccagttctagaaactgtaaattgctacacaaatgctctgtgttgacattcatgctaaagccagtctgcattttcaaaatgaaaatttcttcaccaaaaaaaaaaaaaaa

SEQ ID NO: 220911 - DNA, 1000 bp, Homo Sapiens
tttattagtgtcatcatgagaagcccaataagcagtatgccctaacagttagtaggccaggctctggagctaagctgcatgggttcaaatcccagctccaccattcagcctgcagagaccatgagcgagttacttaagccaggctctggagctaagctgcatgggttcaaatcccagctccagcattcagcctacagagaccatgggtgagttacttaagccaggctctggagctaagctgcatgggttcaaatcccagctccaccattcagcctgcagagactgtgggtgagttacttgagctctctgtgccaatattttctcacctataaggtggaggtgaaaataaactctataacatgacaagaactacttcacagtagttgcagtgaggattcaacgagatgaacatttagtacttgggacacagcagtggcccagtgtaaatgggctacttgtcataagccctaagtcacaggtcaacaaactgagaggcaaaagcacttggttgagcttgtgtatctagtgagtatggattcagggaccagattcccagccccacgaactgctaagcaaccccacctcctaaacacatgagtgccgattaacttcacagaaaaacacacaaggcaaagttcagcgaggtgaaattctccaagctataaagatcagggaagacttcctggaggaattcacccttgagcaaaatcctaaaggatcaatagtagctggcaaaaagaagcaggaggaagcgcattctaggtagaggagacagcctggacaaaggtctgagggaggaaggagcacaaggagtgcaggacactttcatgagtgcaggacactttcataactgcatgaacttcatagagatgggatcctttagcatgttctctgtgcacatgcttgaccatgttctttcacatgctttttgccacttgatctttccagcaactcagtgagagaagcaaaaaagtaagttgcatccaaaaaaaaaaaaaaa

SEQ ID NO: 220912 - DNA, 1000 bp, Homo Sapiens
ctgcctattttttacaaaacacgaagacagtgtgtaacctcgacattttgaccttcctttatgtgctagtttagacaggctcctgaatccacacttaattttgcttaacaaaagtcttaatagtaaacctcccctcatgagcttgaagtcaagtgttcttgacttcagatatttctttcctttttttttttttttcctcatcacaactaagagatacacaaactctgaagaagcagaaatggagagaatgcttttaacaaaaaagcatctgatgaaagattttaggcaaacattctcaaaataagagtgatattctggatgtagttattgcagttatctcatgacaaatgaggcctggattggaaggaaaatatagttgtgtagaattaagcattttgataggaatctacaaggtagttgaatataataagcaggtttgggcccccaaactttagaaaatcaaatgcaaaggtgctggcaaaaatgaggtttgagtggctggctgtaagagaaggttaactcctagtaaaaggcatttttagaaataacaattactgaaaactttgaagtatagtgggagtagcaaacaaatacatgttttttttttcttacaaagaactcctaaatcctgagtaagtgccattcattacaataagtctctaaatttaaaaaaaaaaaaatcatatgaggaaatctagctttcccctttacgctgcgtttgatctttgtctaaatagtgttaaaattcctttcattccaattacagaactgagcccactcgcaagttggagccatcagtgggatacgccacattttggaagccccagcatcgtgtacttaccagtgtgttcacaaaatgaaatttgtgtgagagctgtacattaaaaaaaatcatcattattattattatttgcagtcatggagaaccacctacccctgacttctgtttagtctcctttttaaataaaaattactgtgttagagaaaaaaaaaaaaaaaa

SEQ ID NO: 220913 - DNA, 1000 bp, Homo Sapiens
cgtgagcccggactttctgagcgagggcagctccagctacaattccgcctcgcccgacgtggacaccgcggacgagcccgaggtggacgtggaatccaaccgcttccccgacgacgaggacgcccaagaggagaccgagcccagcgcacccagcgcagggggcggcccagacggtgaacagcccactggacccccttccgccacctcctctggcgcggacggtcccgcaaactctcccgacggcggcagcccccgcccccggcgccgcctcgggccacccccagctggccggcccgcatttggggacttggcagccgaagacttggtgcggagacctgagaggagcccgccaagcggcggcggcggctacgagctgcgagagccttgcgggcccctaggaggccccgcgccggccaaggtgttcgcgcccgagagggatgagcacgtgaagagcgcggcggtggcgctggggcccgcggcctcctacgtctgcacccccgaggcccacgagccagataaggaagacaatcactcgcccgccgatgatttggaaacgaggaaatcctatccagaccaaaggagtatctcccagccaagtcctgcaaatacagacagaggcgaagatgggcttaccttggatgtcacaggaactcatttggtggagaaagatatcgagaacctggccagagaggaattgcaaaaactgctcctggaacaaatggagctccgcaagaagctggaacgggaatttcagagtctcaaagataattttcaggatcaaatgaagagggaattggcttatcgagaagaaatggtgcaacagctgcaaattgtcagagataccctgtgtaacgaactcgaccaggagcggaaggcgcgctatgccatccagcagaaattgaaagaagcccacgacgccctgcaccatttctcctgcaagatgctgacgccccgccactgcactggcaactgctccttcaagccaccgctgttgccctag

SEQ ID NO: 220914 - DNA, 1000 bp, Homo Sapiens
cagaagaactgaaggaacgaaggaagctttatgaagaggaaatggaagaactttctaaccttaataagaatgtgcctattttcgtgtgtactatggcctatcccaccgttccttgtcccctgcacatctttgagccttgttaccgcctgatgattcgtagatgcattgagacaggcacgagacagtttggcatgtgccttggagatcctgtcaaagggtttgcagaatatggctgcatcctagagatcagaaatgttcaattctttgctgatggccgctcagtggttgacagcataggcaagaggcgcttcagggtgctccatcagagccagcgggatggctacaacacagccgacattgaatacattgaagaccaaaaggttcagggagaggattgtgctgagctcatgggattacataactgtgtctatcagcaagcatcattgtggtttcattcgctcaaattatccctaaagaatcggatactcaatcactttggtcccatgccggagaaagacgccgatcctcagatgaacccgaatggcccagcctggtgctggtggatgttagcagttcttcccttggaaagccgagctcagctccccttcctagcaatgaggtccttaaaggacagactgaatggtattcgacgagtcctggccttcatatcccgaaaccaaaactagtgagtggattgccgaagaggagctcccaccttccccactgccgtcggggggagtcttcttgtaaatatatctaattgcaataatatcttaacagaagggggtgtcaaacagaggcatcagcctgctgttgatcacagagagaaattgagtagaaagaccaaaagaatgtgacctatttgaaactttctgtcttaagatgcttcttgacatgctgcataactacataaacagcagaggtgtttaagagcccagaaaaacataatttgattttaacattaaaatttccaaaagtttaaaaaaaaaaaaaaaaaaaa

SEQ ID NO: 220915 - DNA, 1000 bp, Homo Sapiens
gatttcgcctcaataaatgtagtatttcattgaaaagcaaacaaaatatatataaatggacttcattaaaatgtttttgaactttggactagtaggagatcactttgtgccatatgaataatcttttttagctctggaactttttgtaggctttatttttttaatgtgggcatcttatttcatttttgaaaaaatgtatatgttttttgtgtatttgggaaacgaagggtgaaacatggtagtataatgtgaagctacacatttaaatacttagaattcttacagaaaagattttaagaattattctctgctgaataaaaactgcaaatatgtgaaacataatgaaattcagtaagaggaaaagtaacttggttgtactttttgtaactgcaacaaagtttgatggtgtttatgaggaaaagtacagcaataatctcttctgtaacctttattaatagtaatgttgttgtagccctatcatactcactttttaagacacagtatcatgaaagtcctatttcagtaagacccatttacatacagtagatttttagcagagatcttttagtgtaacatacatattttagagaattgttggctagctgtacatgttttgaaaagctgtttagctagctataaggctataattggaaatttgtattttttatttacagcaaaacatttattcagtcatccagtttgctaccaaaatatgttttagataagtgtgtgtatgtttgtttagaagttagaaattgtaaacactggtcttatgtttcatttggattcattattgcattgtcttgttaccagaaacaaattttgccgagctttttttgccctatatttcccagcataatttgattagaaagtacaaaaagggccgggcgcggtggcttacgcctgtaatcccagcactttgggaggccagggcgggtggatcacgaggtcaggagatcgggaccatcctggccaacatggtgaaaccccgtctctacta

SEQ ID NO: 220916 - DNA, 1000 bp, Homo Sapiens
attaactgcaactccaacttttgtaacagatagtgaaagtacaaggtcaacaggactgttagattcaggaatgttcatgaatattcatccatctggagtaaaaactgagtcagctgtgctgatgacatcagataaggctgaatcatgtcagggagatttaagtacattggccaatgtggttacatcattagcgaatcttggaaaaactaaagatctttctcaaaatagtaatgaaatgtctatgattgaaagcttaagcaatgatgatacctctttgtgtgaatttcaagaaatgcagaccaacggtgatgtttcaagggcatttgacactcttgcaaaagcattgaatcctggagagagcacagcctgccagagctcagtagcgggcatggaaggaagtgtacacctaatcactggagattcaagcataaattacaccgaaaaagaggggccacttctcagcgattcacatgtagctttcaggctcaccatgccttctcctatgcctgagtacctgaatgtgcactacattggggagtctgcctccagactgctgttcttatcaatgcactgggcactttcgattccttctttccaggctctagggcaagaaaacagcatatcactggtgaaagcttactggaatgaactttttactcttggtcttgcccagtgctggcaagtgatgaatgtagcaactatattagcaacatttgtcaattgtcttcacaatagtcttcaacaagcagaggggtaatcaccttaaaatgtcatcaaaaatagatctactagaaggcagcatcacattcccatcttacttatggactcctacccctggttcatgtcttatatgcctgtaatggttataaagcctaccttcaggaaagctatggttgactaattactaatggatgggttttaaacatgtccctctacaataaattaaaatctttattgtaaaactttaaaaaaaaaaaaaaaaaaaaaaaaaaaaaaaaaa

SEQ ID NO: 220917 - DNA, 1000 bp, Homo Sapiens
tgtgggactagagctgggtgtcacgtgaacccttcctggtagggtgacccccttcccctggagggggttttagagctgccgcctctgctccctctaacctctttggaggcagggttgggggtattgtcattcaaggccttttttttgtctgctccctccccgaccctgtgccctcttctggaggtttctcgtctgggagagtccctcccagcagtccctccacctccataaggacacactggacaaaactcccgcagctcttcaggaatgaccgatgcctacctgtggggttcagttgcccatagtttgaggccttctctcctcccttaccaccgctctggatcatgttactagttccgtcttttgtgtggccttgggccagcttccttgataccttgaagatgggctccttgtgagtccccagggagaaagggacaagagctaagatttttgcatcagcccttctggcagaaggtgtggtaggggccatttgttttttttagtggacttgggatttgtggtgtaatcatatcattaatgatccagggtgtgggaaaaatggaggtccttgaagtggctgaatctcattgtatttaagacactgtcagttgccagatgtaggcttatttttggagatgtctaggagaggaaaaagctaccaatcatactcttgatatccgtctggctgtgtgaggcacccctacctcatgggggtgtcttgggattgatgaactgtggaacctgcctcctgcgctccccaaagcttattaaccccttaactgtatcggggcggggtgtgtgtgtgcatggaagatgcctgggctgtctttgctatatgtaaatagagccattggatctttatttttgattaatttgttctgattttttggtttgttttttaaggaactgtaatgaacaaatgtcaggatatccaatgccaaataaagatgttgtatttttttaaaaaaaaaaaaaaaaaaaaaaaaaaaaaaaaaaaaaa

SEQ ID NO: 220918 - DNA, 1000 bp, Homo Sapiens
atgttgctgcagaagtaggctaaggcagaccacccacttctgctgaaatgcattgggagcctgtgaaagcacaaagctggaggctgggcgcctgcgttctcctacacggaaaggaatctaattccaagagtctaggaaatggtgctattgtgagttcgttctgactctttctcattctgagttttcagtgttaaactaggaagtgtgacagcaggggagctttcgtgaggcagtcagtcattgcttctctgtaaattaaaatgttacagcacacacatacacacacagagagcatttcaaggccacagctccacacctgccatgggatgttaatgtggcagggggtggggctcattctgttgggaggtcaaattaccaatgccaaggactgttgattttgtttttatttttattttttcttctagcttttcagaagatggaaatgagacagttgagtccaaaccccaatgctgacagccatatgcatttgaaaatctatctagattacagatgggcatttattactggcagtggaaacaccagatagaagatcttaggagaggcccagaaatgcatcaccttgtcatgacaaaagagaaggcagtagagtagggatagttacaaatgcatccatcttaattattttcaataggcttgtaaatcttatcgatggaaggagaaaggagacaagatgtggaagaattgacatgtatcccaccataaaatggtagaagatgagttttcaatgagtagtcatagttgaaattttacaaccaaagctcccatttgattgtaatcttgccaaaatataatggatgtataaatgaacttggggtataagcaataatatccactagtgttgttatcagctactgtaaccaagtggctggttcatttggttgatgctgattatggcctttaaccatggtggtttgttgtgtgttttttatttcacaaaaagccaataaaattgtttagctataaaaaaaaaaaaaaaaaa

SEQ ID NO: 220919 - DNA, 1000 bp, Homo Sapiens; identical to SEQ ID NO: 115497

SEQ ID NO: 220920 - DNA, 1000 bp, Homo Sapiens; identical to SEQ ID NO: 115498

SEQ ID NO: 220921 - DNA, 1000 bp, Homo Sapiens
cgggtcttgtggctttgtctcccgcgaagaggagatggcggagtcgttgaggtctccgcgccgctccctgtacaaactggtgggctcgccgccttggaaagaggctttccggcagagatgcctggagagaatgagaaacagccgggacaggctcctaaacaggtaccgccaggctggaagcagtgggccagggaattctcagaacagctttctagttcaagaggtgatggaagaagagtggaatgctttgcagtcagtggagaattgtccagaagacttggctcagctggaggagctgatagacatggctgtgctggaggaaattcaacaggagctgatcaagcaagagcagtccatcatcagcgagtatgagaagagcttgcagtttgatgaaaagtgtctcagcatcatgctggctgagtgggaggcaaacccactcatctgtcctgtatgtacaaagtacaacctgagaatcacaagcggtgtggtggtgtgtcagtgtggcctgtccatcccatctcattcttctgagttgacagagcagaagcttcgtgcctgtttagagggtagtataaatgagcacagtgcacattgtccccacacacctgaattttcagtcactggaggaacagaagaaaagtccagtcttctcatgagctgtctggcctgtgatacttgggctgtgatcctctagagccagcttggactcacatcattctatggggttgaagacaactcattccctctgaggagccttgtacatacaagccttttatttataacttattttgtattgaaacttttaaacaatactgaagaaaaaaaaacttttccgacatctgttcttggtcttttgtgacgcaggttgaagggggaggaatagaaaaagacaaactgccttggaggagataaaccaattttatgtctatcatgttatacaaaaatctagaaataatagatttgtacagaaaaaaatgataataaatgagaacacaaaacc

SEQ ID NO: 220922 - DNA, 1000 bp, Homo Sapiens; identical to SEQ ID NO: 115502

SEQ ID NO: 220923 - DNA, 1000 bp, Homo Sapiens
tttcaacctccgcgccggctgcgcctgtttctcggccaggggagcaaggccacgcggcctacgcagccgagtcggaaccaaccggttgtttggtgaaacctaccccagagcctcccgcggcccacagagcacagccctccttacagcctagaaaaaatgacagatctcgtagctgtttgggatgttgctttaagtgacggagtccacaagatcgaatttgaacatgggactacatcaggcaaacgagtagtatatgtagatggaaaggaagagataagaaaagagtggatgttcaaattagtgggcaaagaaacattctatgttggagctgcaaagacaaaagcgaccataaatatagacgctatcagtggttttgcttatgaatatactctggaaattaatgggaaaagtctcaagaagtatatggaggacagatcaaaaaccaccaatacttgggtattacacatggatggtgagaactttagaattgttttggaaaaagatgctatggacgtatggtgcaatggtaaaaaattggagacagcgggtgagtttgtagatgatgggactgaaactcacttcagtatcgggaaccatgactgttacataaaggctgtcagtagtgggaagcggaaagaagggattattcatactctcattgtggataatagagaaatcccagagattgcaagttaatgaattttcatcttaagaagtaaagatcaggactttttaattactgtggtaattaaatgtgttcagtatgtacttatcagtacatttagtctgcaatgttttaattttttaaaaagttacatgaaactaacattccaagggtcaggaaaaaaaccaattatgtatagtcataaaaattacaatttatgatgcaaataatgtaaaatgttttaaagacaaatggcaaataagatatggaccaaagtcactaatgttttacaacagtaacctttactataataaatacttttaaaaaaaaaaaaaa

SEQ ID NO: 220924 - DNA, 1000 bp, Homo Sapiens
gtcttgctgcggaactttccttttttaataagaccatattatgactctgaatgctcaagggtaagtctaaggcctcattgctgttaccaggagatttttctagttacagtaataaagatgttaattcacatgcatgcagacaactgaaactcaagtggagaatttgtttgtgaacaagtcatactacttctgttatttgcatgaatggaatctgcaatatctttttccatgggagaccctaaaagaaaaccctggatcagaatgatctgcagtttcagataataaaggcttttaagagacatttttagaattaaaaatatgctaattttattaaatgaaaatatttgtaactgttaactttctcactgacaaagcaagtttctcaataaaatacctattttaacttgcattactgacatcttttctttgagtaatctgaataatgcagaagccatcatagaggtcttttctatacattctcaatgttttcttaaatgggtttcctgagttctgttcttcatgactctgggctctgcaaacagggtttcccaattacgcattctataaacacttttatgaatgagtcaatatgacattgagtccttttcatacatttcatcatttccaatatgtagagtgacagctagaaaaatgataaaattttgattaaaacctatctctttttcttcagcatagtcaattgttttcttaactctcaatgagtaactccatgcctagcttgtgcttagctttcaatatttttagactaagacaaagtgtatttggcattttgagaacaacaattaatggtcagtaaatttctaaagcaagaaaaatgtgaaactagtgttttatatgtttgttacgcagcagaatgcggctcttagtgtttgccccttcatatctcatcatgtaaaatattaaattactttaggccactgcacataggtagtcctgtcatgagtgatggctggagaaaagttcaggatcataaatgtta

SEQ ID NO: 220925 - DNA, 1000 bp, Homo Sapiens; identical to SEQ ID NO: 115504

SEQ ID NO: 220926 - DNA, 1000 bp, Homo Sapiens
agctcatgagacaagcagtgtgtgttttaatagaaaagttgtcactttccaaaatgccctttagaggtgacaccgtaattgatggttggcaatggctgataaatgacactttgagacatctccatctcatctcaagtcactcccgccagcagatgaaggatgcagcagtctcggccctggctgctctatgcatgacactgcgtgggacgcggagcttgcagtggtgagagagcagcgcaaccgtctgtgtgaccttctgggcgtacccaggccccagctggtgccccagcctggtgcctgctgaagccagtcctggagcccatacctcacccctgcctggtgaggatgtcttgttcctgagggaggccggtgtggaaagcctcgcacagtggtgcctccagctgttgaagggtagcgctggcccttggaggctggcactagctgacagcttttcctctctgcacctgcgctctggtgacttggggtggacgcctctgccttcacttgaacacaaatgtgcttcctataaaatcatgtaccaagaagttcctgccttttgtctctgagcctgatgtgtgtaggggtgatggaaaggctcactgcccaggggtcagccagaggggaggtgggctgcactcctcctgcctggagaccaggcccccttcttgcctggtgctgtccctgctgtgggagacgtctggccacaggcagtgccccacccagtcttggagagagatgaatgttaaatcagaggttcaaatgctagagaactgagaagccctggtggcaggcatggtctggagtgctgggcagatgctgtttctgggcccgtctgcctggtgggggtgctgtcctcccccctgtgcacacgtgagcatcgtgcatgtggcccctctgcagtgcaggagtcactgattgatgggtgtgccgaccagcagcttcacaaatgtctgctgcaaggggaatcgtcagagtccaatgtgtgcctctacagtaatgt

SEQ ID NO: 220927 - DNA, 1000 bp, Homo Sapiens; identical to SEQ ID NO: 115505

SEQ ID NO: 220928 - DNA, 1000 bp, Homo Sapiens
tggttgggaaacttctgcctcatgactctgtcctttgagtcctttggacagcagcacaaaacataacaatttttatttttaaacagacccattctttttgatcccacaggagctgtggttgggtcggccgtagccccgggatgtggtttaagtggattactgcctagctgagccaaaatgtttgcttgtacctgttggaccactacagcaaaccgctgcttacagtgcattgtgtatttctgtagtactgttttgcattttccatagagacagaaaactttgcaagtcaatcactgttgttcccatggtactgtaagaaaaaaaaaaaggaaaaagaaaaaaaaaaagaaaaccagccaatcattgcgtgtacagagctaaaaattgtaattaatagagcctgttgggaaaaaaaagaaaacaactgttgcctttttttcttgtataaaagagaatttatgacaaaatttagctgtgaggaatgtgatacgtgtttatatttctgaatatggaacaaattgattcatggggatatattttaatgtaaactaaatcaggtatgtaaagttgttttaaaatgggagactatataagtaattctctaaagctttagttggtttgaatatcatcatttcctccatggtgagcctgcttgtgaattattaagcacttgtttgcattctctgttcttcactcatttatttcttgcagtgtgctatggacttaatgctctttctgtattgatgaaaagcagtatgtgggccaatctttttataaaacactatgcatatataaatattacattgttcatagctttatttgacttatgggtttatacataacattagaatgagtagctgtagttgtgtggacatttataaaacaagttcctttcctggaacagacacaatatacattctgtagctaaaaaggagggaaaagtctgtgaatgctatttttattattaaagttttccatacaaagcatacattgagctgta

SEQ ID NO: 220929 - DNA, 1000 bp, Homo Sapiens; identical to SEQ ID NO: 115509

SEQ ID NO: 220930 - DNA, 1000 bp, Homo Sapiens
tgctctactgaaatggtgccagaagaagacacaaggttatgcgaacattgacatcaccaatttcagcagcagctggagcgatggcctggccttctgtgctctgctccacacctacctgcctgcccacatcccctaccaggagctgaatagtcaggagaaaaagaggaatctcttgttggcatttgaagcggctgaaagtgtaggcatcaaacccagcctggaactcagcgagatgctgtacacagaccggcccgactggcagagtgtgatgcagtacgtggcccaaatctacaagtactttgagacgtaaccctggagggcctggggcagccaccattgccacctactgcagcttttcctggaagcgcctgattactgtccactgaccctgctctgcccaccacccagctgcctagacttcaaagacaggctcaatccaagtggaccaacacccaaataagaaacagagtgggtcccacgatgtacctgtctgaaatgcaaatgcagctggactgtaaattggggactctttgatctcttgtgggatgcttctaaagagggcagcctccctccttccagaccaagaccccacacccaggcttgttttgctgattatattgggtggctgaacgaacacattatctgcagaaattcagacaaagaacatctccaaatcagtcttttggttgctgttgttaaaaatatcccggctttgcctttatgaaacctttgcccttggctgggtgtggtagctcgtggctgtaatcccagcactttaggaagccaaggcagtaggatcgtttgagcccaggagttcgaggctgcagtgagctatgagcataccactgcactccagcctgtgtgaaagagccagaccctgtctcaaaaaaatgataaaacccaaaactttgcccttgtgaaccctcccttcccccctccccccccaaaaaaaaacaacaaaacacaaaaaataaacatttgttccagggcaacctggaaa

SEQ ID NO: 220931 - DNA, 1000 bp, Homo Sapiens; identical to SEQ ID NO: 115510

SEQ ID NO: 220932 - DNA, 1000 bp, Homo Sapiens; identical to SEQ ID NO: 115511

SEQ ID NO: 220933 - DNA, 1000 bp, Homo Sapiens
cagaaactgaagccccatgtgttcactgtgggtgaacagacctacaggaatgtcaagagcctgattgaaccagtcaaccagtctattgttgtcagtggagagagtggtgctggaaagacatggacgtctcgctgcctaatgaagttctatgctgtggtggccacctcacctgcatcttgggagagccacaagattgcagagaggatagaacagaggatcctgaactccaaccctgtcatggaagcttttgggaatgcgtgtacactgaggaataacaacagcagtcgctttgggaagttcatccagctccagctgaacagggctcagcaaatgactggagccgcagtccagacctacctcctagagaaaactcgagtggcctgccaggcttccagtgagaggaacttccacatcttctatcagatttgcaaaggagccagtgaggacgagaggctccagtggcaccttcctgagggagctgccttctcctggctgcccaacccagagaggagcttagaagaggattgttttgaggtgaccagagaggccatgctccatttgggcattgacacccctacccagaacaacatctttaaggtcagaagaaaagccacgccacttaagtttggcagagatgacgggcagccctttgcatagagcttttccctggacttggagttggtctttccctgaggatctaggactttgggcccctctgtgctacctccaaggaatcagtcacctctgttctgctgagtctggagaccaggtggtggggtggacggggcataaggaagagtgatgcatacacagtgctagagtacagaatgcagtaagtgatccatgggggcagagagcaaggtaccgcatgatcagaagagagaactagtgctaccgccttgcttgtctagtacattaaaacttacaagtcatgttcacaaaaaaaaaaaaaaaaaaaaaaaaaaaaaaaaaaaaaaaaaaaaaaaaaaaaaaaaaaaaa

SEQ ID NO: 220934 - DNA, 1000 bp, Homo Sapiens
ccatggtcatgccaggtggttgtactacaatcccagagtcagacctagaagaaagatcagtagaacaagactctacagaactgtttaccaaccacagacatctcactgcagagacacccaggcctgaagtttcacccctccaaggagtctcggaataattcaagtagagttgtttggttgagaggaacatccccatctcaaggccgaacctgtgtgaacctcatgccaagcacagatatagggctggcgcaggtgcttcctaaagctcaccttcctggagatgacatgcatagaaagaggggttgggactttttacttcactaggagaacttgtaacaccatggggaagtcagctgaaacttgtcttgttttgccaggaaaggaagtagttgcctttggtcatccatctgctaatagtcacagaatacagtgaaatgacatagttttgggttagattttataatgcaaagattcagatccaaaataatttcataccccattttttcacagaattcttatatagtaaatgtatcaagtttaataaagcatctcattgtcaaataatatcttggattttatttataattagagggatttatgagtgattgctctacattatttcttcaaaggaaaggaaaggaattgaagactttgctactctctggtaagacttgaatgtgattattttataaataaaagaaccactatgaaactttcatgtgatttgttctattaagctaaacgtggaagaagggaagttttctagtattgtatgaaaatgtttaaatattttcaaggaagctagtacattaacatccccttttcattaccccattgggtggcaccttttaaaaatccaggttattaaaggattcacactttattacagttaaaatttaaggtttttatgtgtaagaagtgaaagaaactttgctaatttcaagttcgaattacagttgtgagattgatttatttaaataaaaatatgcctttgccagtt

SEQ ID NO: 220935 - DNA, 1000 bp, Homo Sapiens; identical to SEQ ID NO: 115513

SEQ ID NO: 220936 - DNA, 1000 bp, Homo Sapiens; identical to SEQ ID NO: 115516

SEQ ID NO: 220937 - DNA, 1000 bp, Homo Sapiens
actgtctttgatggcattttcagaacaataaatgtcacaatcccttctatagccccctacagtgatctcttcaaggtcaactgcagtgttgcttccctccccctatagggctggaatctgtctaggagccctctctcggaggccatagaggctgggggtagccattgtgcagtcatggcccgggggaaacttgccaaccttcgtgtcaggtgctgtgtataagtggagaacttggggatagaggaggaagctcctcgtggcccttccaaggtgaggcaaaggcatctggacttgttccagcccagcccaccgggtgacatcaccgggcagggaggggtgctggtggtggttcatacggagtaagctgctctgcctgtgtgagtggctcctgggccctaaacaggcacctttaggccatgggtcactcaccgtgagccatcaatgtgctctggtctgacatggtttctctctgtcttctagtctagacctagtttttttgttctgttccccacgtatggatatagtagagattgttgtctgtgaaatttctcttttgtagattttgagttttcccttgtagtgtaaagaatgatcactttctgtaacaataacaagaccactttttaagatttatcctgtttgttctttgttgattgaaacataataattgttaaaattctctacagccttctttttcttccatagctaatcttccttctaatagtttttgctttctgttttgctgttgttgctttgcaaagctttcccctcatagcctgtacctgttatcaatataaaataatcttcctgttgaatgcttcatgacttgaattctactttgataaaaacattgccatactgctttttatcttgatgaattcatctggcattgctttgccttatcatctcatctggagtttttaaatgccatttgtttcagttgtctttaacaacataataaatagactttgccatttaaaaaaaaaaaaaaaaaaaaaaa

SEQ ID NO: 220938 - DNA, 1000 bp, Homo Sapiens; identical to SEQ ID NO: 115520

SEQ ID NO: 220939 - DNA, 1000 bp, Homo Sapiens
agggaatttcaggaactagagatgactgagtcctcgtagccatctctctactcctacctcagcctagaccctcctcctcccccagaggggtgggttcctcttccccactccccaccttcaattcctgggccccaaacgggctgccctgccactttggtacatggccagtgtgatcccaagtgccagtcttgtgtctgcgtctgtgttgcgtgtcgtgggtgtgtgtagccaaggtcggtaagttgaatggcctgccttgaagccactgaagctgggattcctccccattagagtcagccttccccctcccagggccagggccctgcagaggggaaaccagtgtagccttgcccggattctgggaggaagcaggttgaggggctcctggaaaggctcagtctcaggagcatggggataaaggagaaggcatgaaattgtctagcagagcaggggcagggtgataaattgttgataaattccactggacttgagcttggcagctgaactattggagggtgggagagcccagccattaccatggagacaagaagggttttccaccctggaatcaagatgtcagactggctggctgcagtgacgtgcacctgtactcaggaggctgaggggaggatcactggagcccaggagtttgaggctgcagcgagctatgatcgcgccactacactccagcctgagcaacagagtgagaccctgtctcttaaagaaaaaaaaagtcagactgctgggactggccaggtttctgcccacattggacccacatgaggacatgatggagcgcacctgccccctggtggacagtcctgggagaacctcaggcttccttggcatcacagggcagagccgggaagcgatgaatttggagactctgtggggccttggttcccttgtgtgtgtgtgttgatcccaagacaatgaaagtttgcactgtatgctggacggcattcctgcttatcaataaacctgtttgttttaaaaaaaa

SEQ ID NO: 220940 - DNA, 1000 bp, Homo Sapiens
agttttaggaagacccactaccttatttgagacaatgggaaaagctgacatatggcttatgcgaaactcctggagttttcaatttcctcatccattcttaccaaacgttgattttgttggaggattccactgcaaacctgccaaacccctacctaaggaaatggaggagtttgtacagagctctggagaaaatggtgttgtggtgttttctctggggtcagtgataagtaacatgacagcagaaagggccaatgtaattgcaacagcccttgccaagatcccacaaaaggttctgtggagatttgacgggaataaaccagatgccttaggtctcaatactcggctgtacaagtggataccccagaatgaccttctaggtcatccaaaaaccagagcttttataactcatggtggagccaatggcatctatgaggcaatctaccatgggatccctatggtgggcattccattgttttttgatcaacctgataacattgctcacatgaaggccaagggagcagctgttagattggacttcaacacaatgtcgagtacagacctgctgaatgcactgaagacagtaattaatgatcctttatataaagagaatattatgaaattatcaagaattcaacatgatcaaccagtaaagcccctggatcgagcagtcttctggattgaatttgtcatgccccacaaaggagccaaacaccttcgagttgcagcccatgacctcacctggttccagtaccactctttggatgtgattgggtttctgctggcctgtgtggcaactgtgatatttatcatcacaaagttttgtctgttttgtttctggaagtttgctagaaaagggaagaagggaaaaagagattagttatgtctgacatttgaagctggaaaaccagatagataggacaacttcagtttattccagcaagaaagaaaagattgttatgcaagatttctttcttcctgtgacaaaaaaaaaaaaaaaaaa

SEQ ID NO: 220941 - DNA, 1000 bp, Homo Sapiens
actgcaaacctgccaaacccctgcctaaggaaatggaagactttgtacagagctctggagaaaatggtgttgtggtgttttctctggggtcaatggtcagtaacatgacagaagaaagggccaacgtaattgcatcagccctggcccagatcccacaaaaggttctgtggagatttgatgggaataaaccagataccttaggtctcaatactcggctgtataagtggataccccagaatgaccttctaggtcatccaaagaccagagcttttataactcatggtggagccaatggcatctacgaggcaatctaccatgggatccctatggtggggattccattgtttgccgatcaacctgataacattgctcacatgaaggccaggggagcagctgttagagtggacttcaacacaatgtcgagtacagacttgctgaatgcattgaagagagtaattaatgatccttcatataaagagaatgttatgaaattatcaagaattcaacatgatcaaccagtgaagcccctggatcgagcagtcttctggattgaatttgtcatgcgccacaaaggagctaaacaccttcgggttgcagcccacgacctcacctggttccagtaccactctttggatgtgattgggttcctgctggtctgtgtggcaactgtgatatttatcgtcacaaaatgttgtctgttttgtttctggaagtttgctagaaaagcaaagaagggaaaaaatgattagttatatctgagatttgaagctggaaaacctgataggtgagactacttcagtttattccagcaagaaagattgtgatgcaagatttctttcttcctgagacaaaaaaaaaaaaaagaaaaaaaaatcttttcaaaatttactttgtcaaataaaaatttgtttttcagagatttaccacccagttcatggttagaaatattttgtggcaatgaagaaaacactacggaaaataaaaaataagataaagcctt

SEQ ID NO: 220942 - DNA, 1000 bp, Homo Sapiens; identical to SEQ ID NO: 118773

SEQ ID NO: 220943 - DNA, 1000 bp, Homo Sapiens
ttggcatcgagaactcagttgaatgcagaaacgatttcttggaggtgagaaatggaagtaacagcaattcaccattactgggcaagtactgtggaactctgctgccaaaccctgtcttctctcaaaataatgaactatacctacgatttaagagtgatagtgtaacttctgatcgtggatatgaaatcatctggacttcatcaccctctggatgtggtggaactctttatggagacagaggctcattcaccagccccggctatccaggcacatacccaaacaacacgtactgcgagtgggtccttgttgctcctgctggaaggcttgtcaccatcaacttctacttcatcagcattgacgatccaggagactgtgtccagaactatctcacactctatgatgggcccaacgccagctctccatcctctggaccatactgcggaggcgacaccagcatagctcccttcgtggcttcctcaaatcaggtcttcataaaatttcatgctgattatgcacggcgtccatccgcattccgattaacttgggacagctaagtgggtaacaactcgtgttcactcagcactttccctctgcagcacgctggacagcactctgccatcctgatacatgacccctgctgatgccacagagaataagctgaacttgtatggtttttcaccaaaccatggatagaatcaatatttgtaggccaggcgtggtggctcacccccctgtattctcagcactttgggaggccgaggcaggttgatcacctgaggtcaggagtttgagactagcctggccagcatggtgaaacctcatccctctaacaatataataattagccaggcgtggtggtgggtgcctgtaattccagccactcgagaggctgaggcaggagaattgcttgaacccaggaggcagaggttgcagtgagctaagatcacaccactacactccagcctgggcgagacggcaagactccatctcaaaaaaaaaa

SEQ ID NO: 220944 - DNA, 1000 bp, Homo Sapiens; identical to SEQ ID NO: 115522

SEQ ID NO: 220945 - DNA, 1000 bp, Homo Sapiens
caagatccagtctttaatttatcctgcccttcagcctcttgatgtagatttaccgtcatatcaagaaaattcaaattttctatttctatccaaatcactcatggtcagattctggagtgaatattttaccactgatagatcacttgaaaaagccatgctttccagacaacatgtacctgtggaatcaagtcatctcttcaaatttgttaattggagttccctgctccctgagaggtttataaaaggacatgtttataacaatccaaattatggcagttctgagctggctaaaaaatatccagggttcctagatgtgagggcagcccctttgttggctgatgacaacaaattacgtggcttacccctgacctatgtcatcacctgtcaatatgatctcttaagagatgatggactcatgtatgtcacccgacttcgcaacactggggttcaggtgactcataaccatgttgaggatggattccatggagcattttcatttctgggacttaaaattagtcacagacttataaatcagtatattgagtggctaaaggaaaatctatagtaaaacatgtagctataacatattttaaaaataaaatctgaaaacctcagaaaatttgcattagaaattggtctttcttagaatggtctagttaagttccacatgtagcataattcttaaataggcacttttctgttttttttttcttactgtgggatttcatttcaattttctacattgtctatctgctttttctgagattttccttcttacactgttaatcttattttaaaaaatattacattcttgtatactttatttttgtgagttggctactatttacgatgcaagagaataaatgtgagcaaatattgccaaaaaaaaaaaaaaaaaaaaaaaaaaaaaaaaaaaaaaaaaaaaaaaaaaaaaaaaaaaaaaaaaaaaaaaaaaaaaaaaaaaaaaaaaaaaaaaaaaaaaaaaaaaaaaaaaaaaaaa

SEQ ID NO: 220946 - DNA, 1000 bp, Homo Sapiens
caaggcatggtccattaccacctgccgggccgtgacctcagctgggcgaaggttttcggtattctggagaaagccaaggaaaagtacggcgtggacgactactccgtgagccagatctcgctggaacaggtcttcctgagcttcgcccacctgcagccgcccaccgcagaggaggggcgatgaggggtggcggctgtctcgccatcaggcagggacaggacgggcaagcagggcccatcttacatcctctctctccaagtttatctcatcctttatttttaatcacttttttctatgatggatatgaaaaattcaaggcagtatgcacagaatggacgagtgcagcccagccctcatgcccaggatcagcatgcgcatctccatgtctgcatactctggagttcactttcccagagctggggcaggccgggcagtctgcgggcaagctccggggtctctgggtggagagctgacccaggaagggctgcagctgagctgggggttgaatttctccaggcactccctggagagaggacccagtgacttgtccaagtttacacacgacactaatctcccctggggaggaagcgggaagccagccaggttgaactgtagcgaggcccccaggccgccaggaatggaccatgcagatcactgtcagtggagggaagctgctgactgtgattaggtgctggggtcttagcgtccagcgcagcccgggggcatcctggaggctctgctcccttagggcatggtagtcaccgcgaagccgggcaccgtcccacagcatctcctagaagcagccggcacaggagggaaggtggccaggctcgaagcagtctctgtttccagcactgcaccctcaggaagtcgcccgccccaggacacgcagggaccaccctaagggctgggtggctgtctcaaggacacattgaatacgttgtgaccatccagaaaataaatgctgaggggacacaaaaaaaaaaaaaaaaaaaaaaaa

SEQ ID NO: 220947 - DNA, 1000 bp, Homo Sapiens
gtatttttatccatgacaggcctgaagatattactacttaccatttgctactgtacataaacaatgatgccctgctccagggagattttgaggtaaagatatggagaattgctgaagggcattctttcccagtgagtctctggggcaggctgcttcaatcccagcctaactcaactgggctctgtccccctggttgggtggcaattccaatatttctgctttctttgattctccttttatgtgtagttgtctctcttcagactctcagcccagaagaaaattctcctgataaaacaacagctcgatccaaattgtgcttctccccagaattcacgcctctccctaggagaagagttgaggaactgtacagaaaagggcggcttcgttagaccgctctcttttctgtacttcctgagtggccagggaatctaatatccccaaattagggcaattggaacaaagtgaaggacatagaggtatattggaagaggcagagcctgaggtggtaggaggacgaccctggaaatggactggtttgagattgccccaggtctgggaagctgagggcaaatccagtcccagtggtcctgactttgggcgctgggtattggaaatggatgcaaagtacaatgtgtttttctccagtgctgtccatgcttctcatcttgtgaaatggccaggatcctctcctttgaaacctgctctgtaggagctacccttttcctttgtggttttatggagacctctccttcctaccctcctgcactgtttaagtactgtttaccatttttcattcacttctcttaaacttgtgaatgcttctcacttttttttttgtttgatgcaggcacttattgtaaattttagaaacccctctgtagccactagtaagtaattatgcactaaatatgaaccctttgtttcttgtttattgagtttgtaggtaaaatgtatttttctacattattgcttattgcttagtaaaatttatttcataaaa

SEQ ID NO: 220948 - DNA, 1000 bp, Homo Sapiens
atctaaacaggtttttaggagatagagattttaaccaattttcttcaggggaaaaaaatatcttcttggcaagttttgttcatgaatattcaagaagacatcctcagcttgctgtctcagtaattctaagagttgctaaaggataccaggagttattggagaagtgtttccagactgaaaaccctcttgaatgccaagataaaggagaagaagaattacagaaatacatccaggagagccaagcattggcaaagcgaagctgcggcctcttccagaaactaggagaatattacttacaaaatgcgtttctcgttgcttacacaaagaaagccccccagctgacctcgtcggagctgatggccatcaccagaaaaatggcagccacagcagccacttgttgccaactcagtgaggacaaactattggcctgtggcgagggagcggctgacattattatcggacacttatgtatcagacatgaaatgactccagtaaaccctggtgttggccagtgctgcacttcttcatatgccaacaggaggccatgcttcagcagcttggtggtggatgaaacatatgtccctcctgcattctctgatgacaagttcattttccataaggatctgtgccaagctcagggtgtagcgctgcaaacgatgaagcaagagtttctcattaaccttgtgaagcaaaagccacaaataacagaggaacaacttgaggctgtcattgcagatttctcaggcctgttggagaaatgctgccaaggccaggaacaggaagtctgctttgctgaagagggacaaaaactgatttcaaaaactcgtgctgctttgggagtttaaattacttcaggggaagagaagacaaaacgagtctttcattcggtgtgaacttttctctttaattttaactgatttaacactttttgtgaattaatgaaatgataaagacttttatgtgagatttccttatcacagaaataaaatatctccaaatg

SEQ ID NO: 220949 - DNA, 1000 bp, Homo Sapiens
tctgaactcacggctggtgttcccaataaggtggggacatgtgtgtcagagggaagctaccctgcagggactcttagctggcacttggatgggaagcccctggtgcctaatgagaagggagtatctgtgaaggaacagaccaggagacaccctgagacagggctcttcacactgcagtcggagctaatggtgaccccagcccggggaggagatccccgtcccaccttctcctgtagcttcagcccaggccttccccgacaccgggccttgcgcacagcccccatccagccccgtgtctgggagcctgtgcctctggaggaggtccaattggtggtggagccagaaggtggagcagtagctcctggtggaaccgtaaccctgacctgtgaagtccctgcccagccctctcctcaaatccactggatgaaggatggtgtgcccttgccccttccccccagccctgtgctgatcctccctgagatagggcctcaggaccagggaacctacagctgtgtggccacccattccagccacgggccccaggaaagccgtgctgtcagcatcagcatcatcgaaccaggcgaggaggggccaactgcaggctctgtgggaggatcagggctgggaactctagccctggccctggggatcctgggaggcctggggacagccgccctgctcattggggtcatcttgtggcaaaggcggcaacgccgaggagaggagaggaaggccccagaaaaccaggaggaagaggaggagcgtgcagaactgaatcagtcggaggaacctgaggcaggcgagagtagtactggagggccttgaggggcccacagacagatcccatccatcagctcccttttctttttcccttgaactgttctggcctcagaccaactctctcctgtataatctctctcctgtataaccccaccttgccaagctttcttctacaaccagagccccccacaatgatgattaaacacctgacacatcttga

SEQ ID NO: 220950 - DNA, 1000 bp, Homo Sapiens
cgccaaccaccaaggatgcaacgctggagacagtgatggcgacactgcccaacttccaccaggcttctctccagatgtccatcacttggcagctgggcagacgccagcccgttatggtggctgtgggccagcatgaggaggagtatttttcgggccctgagcctaaggctgtgctgaagaagttcagggaggagctggctgccctggataaggaaattgagatccggaatgcaaagctggacatgccctacgagtacctgcggcccagcgtggtggaaaacagtgtggccatctaagcgtcgccaccctttggttatttcagcccccatcacccaagccacaagctgaccccttcgtggttatagccctgccctcccaagtcccaccctcttcccatgtcccaccctccctagaggggcaccttttcatggtctctgcacccagtgaacacattttactctagaggcatcacctgggaccttactcctctttccttccttcctcctttcctatcttccttcctctctctcttcctctttcttcattcagatctatatggcaaatagccacaattatataaatcatttcaagactagaatagggggatataatacatattactccacaccttttatgaatcaaatatgatttttttgttgttgttaagacagagtctcactttgacacccaggctggagtgcagtggtgccatcaccacggctcactgcagcctcagcgtcctgggctcaaatgatcctcccacctcagcctcctgagtagctgggactacaggctcatgccatcatgcccagctaatatttttttattttcgtggagacggggcctcactatgttgcctaggctggaaataggattttgaacccaaattgagtttaacaataataaaaagttgttttacgctaaagatggaaaagaactaggactgaactattttaaataaaatattggcaaaagaaaaaaaaaaaaaaaaaaaaaaaaa

SEQ ID NO: 220951 - DNA, 1000 bp, Homo Sapiens
gtgcagtatgtcaccatggtgatattcacctgctcagccaagcatgcggctgtcagtgcagggcagtttgactcctgtgcttggatgcccaacctgccacccagcatgcagctgccaccacccacctccaaaggcctggcaacatgcgagggcttcatagccaccctcccacctgtcaatgccacatgtgatgtcatccttgctctctggttgctgagcaaggagcctggagaccaaaggcccctgggcacctatccggatgagcacttcacagaggaggcccctcggcggagcatcgccaccttccagagccgcctggcccagatctcgaggggcatccaggagcggaaccggggcctggtgctgccctacacctacctagaccctcccctcatcgagaacagcgtctccatctaaatcccaggggaacacaggcccagatgacatccctttgaccacatcgctctaggataactggcacccagagaaaaggactcctcagaaaaaacaggcccccatgtgcctctcctgggacaaccagactctgtaactcacccccaccaccatacacacacacaaaaacagaaacaaaatcaaaacagagaaagcagaaaatctaccaagaacagagtctcaggacagaaccactgagtcttttggaggctccaagcctcaaagtgcccgcagagcccaccttgagggttttgctagttggttttgttttgcgtttacagccgtggggggaagcacataatcccgccccagggcccactagcatccactgattggaccttatggtcacccaactcaaggacagccaccaagaagtggctgccaaagagactgggcgcagtggctcatgcccataatcccagcactttgggagatggaggcgggaaaatcatttgaggtcagaagttcaaggccagcctggacgacatagcgagactccacctctaccaaaaaataaaaattaaaaaacaaaaaaaaaaaaaaaaaa

SEQ ID NO: 220952 - DNA, 1000 bp, Homo Sapiens; identical to SEQ ID NO: 115530

SEQ ID NO: 220953 - DNA, 1000 bp, Homo Sapiens; identical to SEQ ID NO: 115531

SEQ ID NO: 220954 - DNA, 1000 bp, Homo Sapiens
tgcatttgtggccattgttcaaagtgtcaagaacaagcctctcttctttgccgacaaactttacaaatccatgaagggtgctggcacagatgagaagactctgaccaggatcatggtatcccgcagtgagattgacctgctcaacatccggagggaattcattgagaaatatgacaagtctctccaccaagccattgagggtgacacctccggagacttcctgaaggccttgctggctctctgtggtggtgaggactagggccacagctttggcgggcacttctgccaagaaatggttatcagcaccagccgccatggccaagcctgattgttccagctccagagactaaggaaggggcaggggtggggggaggggttgggttgggctcttatcttcagtggagcttaggaaacgctcccactcccacgggccatcgagggcccagcacggctgagcggctgaaaaaccgtagccatagatcctgtccacctccactcccctctgaccctcaggctttcccagcttcctccccttgctacagcctctgccctggtttgggctatgtcagatccaaaaacatcctgaacctctgtctgtaaaatgagtagtgtctgtactttgaatgagggggttggtggcaggggccagttgaatgtgctgggcggggtggtgggaaggatagtaaatgtgctggggcaaactgacaaatcttcccatccatttcaccacccatctccatccaggccgcgctagagtactggaccaggaatttggatgcctgggttcaaatctgcatctgccatgcacttgtttctgaccttaggccagcccctttccctccctgagtctctattttcttatctacaatgagacagttggacaaaaaaatcttggcttcccttctaacattaacttcctaaagtatgcctccgattcattcccttgacactttttatttctaaggaagaaataaaaagagatacacaaacacataaacac

SEQ ID NO: 220955 - DNA, 1000 bp, Homo Sapiens
ccatgacgcagtgagtgcagcacgacaggagagaggcctgcatggacccttgacccttaatagtccactgaccccggagaagattaggatggcctgtgaagacaagttcacaaaaatgattccgagagatgaacctggatcctacgttccttggaatgtacccatctgaatcaaatgcaaacttctggagaaaacagagtgcctcttcccagatggcaatctgtcctatctctgtgctggaagatgctagatctgaaagacagagtttccacagttcagaaatcatcccacagtgttgcttttctatggagctgatttaaagtattccatttagatttgatagatatgcttaagcaatctataaatcattttcaatgttataaacactaattggtttcctctagggtgatattcgtcattactctgtctcttcaatccatccagctaaatggaataggtgatgacttgcatgtgactcctacttggcttctatccaccaacagaaattataccatatagtgaaaggcaattttctaaataatttcattactaatatgaactgtgaagttgtcattttttcatttgtccttttctgctatcaccttcctcttgtcagaatgaatatagacactgtatctaagtgggaccaaagaaaaaatagcgaactttcaccaaagttttcatgaaaacccaaaagctttaaaagttactatcaagaaattgaaaggaaacccacagaataggataaaatatttgtaaatcatatatttgataaaagtcttgtaaccagatacataaagagctcttacaactcaataaaaggcaagtaatttaaaaataggcaaaagaattgctggatggtatggtagttctatttttagtttttaccctaactactctgacttgatcatttaacattctgtgtatgtaacaaaatatcacatgcataaatattatgtatcaataaaattttttaatgggcaaaaaaaaaaaaaaaaaa

SEQ ID NO: 220956 - DNA, 1000 bp, Homo Sapiens; identical to SEQ ID NO: 115537

SEQ ID NO: 220957 - DNA, 1000 bp, Homo Sapiens
acgtctttacaagcaagagaactgattgatacgattttagtaaaaggaaatattgcagccactgtattcagaaactctctgcaagaagctgaagctgtgttatatgagcatttatttgtgcaacaggacataaaatatattcccacagaagatgtttcagatctaccagtggaagaacaattgcggagactacaagaagaaagaacatgtaaagtgtgtatggacaaagaagtgtccatagtgtttattccttgtggtcatctagtagtatgcaaagattgtgctccttctttaagaaagtgtcctatttgtaggagtacaatcaagggtacagttcgtacatttctttcatgaagaagaaccaaaacatcgtctaaactttagaattaatttattaaatgtattataactttaacttttatcctaatttggtttccttaaaatttttatttatttacaactcaaaaaacattgttttgtgtaacatatttatatatgtatctaaaccatatgaacatatattttttagaaactaagagaatgataggcttttgttcttatgaacgaaaaagaggtagcactacaaacacaatattcaatcaaaatttcagcattattgaaattgtaagtgaagtaaaacttaagatatttgagttaacctttaagaattttaaatattttggcattgtactaataccgggaacatgaagccaggtgtggtggtatgtgcctgtagtcccaggctgaggcaagagaattacttgagcccaggagtttgaatccatcctgggcagcatactgagaccctgcctttaaaaacaaacagaacaaaaacaaaacaccagggacacatttctctgtcttttttgatcagtgtcctatacatcgaaggtgtgcatatatgttgaatgacattttagggacatggtgtttttataaagaattctgtgagaaaaaatttaataaagcaacaaaaattactcttaaaaaaaaaaaaaaa

SEQ ID NO: 220958 - DNA, 1000 bp, Homo Sapiens
gtttcgcggtgttgaccaggctggtctcgaactcctgatctcaggtgatctgcctgcctcggcctcacaaagtgctgggattacaggtgtgaaccactgctcccggccttgtgtgattttatctaagggacttaagcgtcctcaggtcctagggggtcgtgaaaccaaaaccccagggatagcaagggacaattgtatcttcaaagtagacaaatggcgccgggcacggtggctcacgcctgtaatcccagcagtttccgaggctgaggcaggcggctcacctgaggtcaggagttggagaccagcctggccaacatgctgaaaccctgtctgtacaaaaatacaaaaatagctgggcatggtggcgcatgcctgtagtcccagctactagagcgactgaggcaggagaattgcttgaacctgggaggcggaggttgcagggagccaagatggcgccaccgcactccagcctaggtgatagagtgagactccctctcaaaaacaaaacaaaacaaaaaaattagacaaatgctacattaatgtttgggtggtcagattctactttgaatctgaagtttgcagatatgcctatagatttttggagtttaccactttcttattctgtatcattaatgtaatattttaaattactatatatgttaccatttttctggatttagtaagaaatttgcagttttggtttgatgtaacaagggttttaatgtaatttatgttagattttgcatttttttcattactgttatattttaacctgactgactgatctaattgtattagtattgtgaataatcatgtgaaatgttttgagacagagtactatatttgtgaatataattttatggtttttttcacttagaacctttctgtgtggaaaactaagaaaattgctttctgctgtataatctggcattcattgtagattaaagcttatttttctgtgaataaaacgtattcaataaaatactattctttaaaatta

SEQ ID NO: 220959 - DNA, 1000 bp, Homo Sapiens; identical to SEQ ID NO: 115539

SEQ ID NO: 220960 - DNA, 1000 bp, Homo Sapiens; identical to SEQ ID NO: 220901

SEQ ID NO: 220961 - DNA, 1000 bp, Homo Sapiens
ctgagcttcaacatcctgctgctggtggtcatctgtgtgactgggtcccaaagtgagggtcacagaggtgcacagctgcaagccgagctgcggagcctgaaggaagctttcagcaacttctcctcgagcaccctgacggaggtccaggcaatcagcacccacggaggcagcgtgggtgacaagatcacatccctaggagccaagctggagaaacagcagcaggacctgaaagcagatcacgatgccctgctcttccatctgaagcacttccccgtggacctgcgcttcgtggcctgccagatggagctcctccacagcaacggctcccaaaggacctgctgccccgtcaactgggtggagcaccaaggcagctgctactggttctctcactccgggaaggcctgggctgaggcggagaagtactgccagctggagaacgcacacctggtggtcatcaactcctgggaggagcagaaattcattgtacaacacacgaaccccttcaatacctggataggtctcacggacagtgatggctcttggaaatgggtggatggcacagactataggcacaactacaagaactgggctgtcactcagccagataattggcacgggcacgagctgggtggaagtgaagactgtgttgaagtccagccggatggccgctggaacgatgacttctgcctgcaggtgtaccgctgggtgtgtgagaaaaggcggaatgccaccggcgaggtggcctgaccccagcacacctctggctaacccataccccacacctgcccagctctggcttctctgttgaggattttgaggaaaggaagaaacactgagacaggggtatggggaagagctgagcaaagagagaaaggaggtagtttaagagtccctgaccctggaggactgagatcccacctccttctgtaattcattgtaattattataatcgtcagcctcttcaatggcgtaggaaagaagaaacaaatgcttgaatctc

SEQ ID NO: 220962 - DNA, 1000 bp, Homo Sapiens
aatttagggtctccggtatctcccgctgagctgctctgttcccggcttagaggaccaggagaagggggagctggaggctggagcctgtaacaccgtggctcgtctcactctggatggtggtggcaacagagatggcagcgcagctggagtgttaggagggcggcctgagcggtaggagtggggctggagcagtaagatggcggccagagcggtttttctggcattgtctgcccagctgctccaagccaggctgatgaaggaggagtcccctgtggtgagctggaggttggagcctgaagacggcacagctctgtgcttcatcttctgaggttgtggcagccacggtgatggagacggcagctcaacaggagcaataggaggagatggagtttcactgtgtcagccaggatggtctcgatctcctgacctcgtgatccgcccgccttggccttccaaagtgccgagattacagcgatgtgcattttgtaagcactttggagccactatcaaatgctgtgaagagaaatgtacccagatgtatcattatccttgtgctgcaggagccggctcctttcaggatttcagtcacatcttcctgctttgtccagaacacattgaccaagctcctgaaagatgtaagtttactacgcatagacttttaaacttcaaccaatgtatttactgaaaataacaaatgttgtaaattccctgagtgttattctacttgtattaaaaggtaataatacataatcattaaaatctgagggatcattgccagagattgttggggagggaaatgttatcaacggtttcattgaaattaaatccaaaaagttatttcctcagaaaaatcaaataaagtttgcatgttttttattcttaaaacattttaaaaaccactgtagaatgatgtaaatagggactgtgcagtatttctgacatatactataaaattattaaaaagtcaatcagtattcaacatcttttacactaaaaagcc

SEQ ID NO: 220963 - DNA, 1000 bp, Homo Sapiens
ggtttggaagacacaaagctggtacaggtggtacttaaagaggaaagtgaatctaagtttgaatcagaaagtaaagaagtaagtcccctgacacaagaaggggctccagaggatgtgccagatggagggcagataagcaaaggctttgggaaactatacaggaaggtcaaggagaaagtgagaagccccaaagagcctgagacccccactgagctctacaccaaagagcggcacgtgctggtcacaggggatgccaattacgtggaccctagattctatgtctcctccatcacagctaaaggtggggtggctgtttctgttgcggaagactctgtgctttatgacggccaggtggagccctctcctgagtcacccaagccccctttagagaatgggcaggtgggtctgcaggagaaagaagatggacaaccaattgaccagcagcctatagacaaggagattgagccagatggtgcagagctggaaggccctgaagagaaacgtgagggtgaggagcgggacgaagagtccaggagaccctgtgccatggtcacacccggtgcagaggaaccatctatacctgagcctccaaagcctgcggctgatcaggatggagctgaggtgcttgggactaggagcagaagcctgccagaaaaaggccctcccaaggctttggcctataagacagtggaagtggtggaatctatcgagaagatttccacggagagcattcagacatatgaagaaaccgctgtgatcgtggagaccatgattggaaagacaaagtcagacaagaagaaatcaggagagaagagctcttaaaatgcccaggcttgatgggataaaatgtatttggggccactgtaggggtaatgctttgatattttagagcaaatgataaaagggtgagggttcctgtttggattagaccatagttgacccatctggcattgccaacgaagccttcattaaaatgttttctttgcttgcaaaaaaaaaa

SEQ ID NO: 220964 - DNA, 1000 bp, Homo Sapiens
aggcatgaaaacattttgggtttcattgctgcagatatcaaagggacagggtcctggacccagttgtacctaatcacagactatcatgaaaatggttccctttatgattatctgaagtccaccaccctagacgctaaatcaatgctgaagttagcctactcttctgtcagtggcttatgtcatttacacacagaaatctttagtactcaaggcaaaccagcaattgcccatcgagatctgaaaagtaaaaacattctggtgaagaaaaatggaacttgctgtattgctgacctgggcctggctgttaaatttattagtgatacaaatgaagttgacataccacctaacactcgagttggcaccaaacgctatatgcctccagaagtgttggacgagagcttgaacagaaatcacttccagtcttacatcatggctgacatgtatagttttggcctcatcctttgggaggttgctaggagatgtgtatcaggaggtatagtggaagaataccagcttccttatcatgacctagtgcccagtgacccctcttatgaggacatgagggagattgtgtgcatcaagaagttacgcccctcattcccaaaccggtggagcagtgatgagtgtctaaggcagatgggaaaactcatgacagaatgctgggctcacaatcctgcatcaaggctgacagccctgcgggttaagaaaacacttgccaaaatgtcagagtcccaggacattaaactctgataggagaggaaaagtaagcatctctgcagaaagccaacaggtactcttctgtttgtgggcagagcaaaagacatcaaataagcatccacagtacaagccttgaacatcgtcctgcttcccagtgggttcagacctcacctttcagggagcgacctgggcaaagacagagaagctcccagaaggagagattgatccgtgtctgtttgtaggcggagaaaccgttgggtaacttgttcaagatatgatgcat

SEQ ID NO: 220965 - DNA, 1000 bp, Homo Sapiens
atagcccagcagatgcactttcactggggaggtgcgtcctcggagatcagcggctctgagcacaccgtggacgggatcagacatgtgatcgagattcacattgttcactacaattctaaatacaagagctatgatatagcccaagatgcgccggatggtttggctgtactggcagccttcgttgaggtgaagaattaccctgaaaacacttattacagcaacttcatttctcatctggccaacatcaagtacccaggacaaagaacaaccctgactggccttgacgttcaggacatgctgcccaggaacctccagcactactacacctaccatggctcactcaccacgcctccctgcactgagaacgtccactggtttgtgctggcagattttgtcaagctctccaggacacaggtttggaagctggagaattccttactggatcaccgcaacaagaccatccacaacgattaccgcaggacccagcccctgaaccacagagtggtggaatccaacttcccgaatcaggaatacactctaggctctgaattccagttttacctacataagattgaggaaattcttgactacttaagaagagcattgaactgaggaaagctaagaggaagattcaatattaactagcttgaagcctgacctagccagaagtgcctgtccgctgcagccgcaccctaccttgtctaagaaaccatgtgtgtctggaacacgctgctccccctggggcagctgttgggattctgattaaaagaggggaaacgatcatcctggacaggaagtgagatggcttcagttcatgagacgggatctgagttagacatcaccagtggaaattgattggaatagaaacttaaaggaaatggaaccctaactattctcccatcaaatcatatatgttgacctgtctgaattataaaccagcctgacctttcctttagcattagatgtaataaaataactttggaaatttgtcatttaaaaa

SEQ ID NO: 220966 - DNA, 1000 bp, Homo Sapiens
cccatgttgactgtcttgactgtcacggaacagatcttgttctttgctggaccatcaagggtcatggcagtgcctgaacatggcagtctagggtgaacaatcccctaacacaagtttacttgtctttgattatgacagtaacaaaattgacagctttctaactcacaggcatagagtgaccttttaatcagagcccagggaagacacatgattaatgatttagctccctccatacctcgaacatcagttgggatccctcctccagccaagatgatccttcttagagaaggctcagccttggaagcaaacttataaatcatattctcatggctttgttaaacttatttcaagtgatggtcattcatatcactatgaacttggatattcaagcctttggatggctatggagagggcttgaaatgtgtacaggtgtcaccatcatttctagtatattaggaaactgggatgggaggttgatttgctctctaaacttccctctagttggcaagtctcacatattcatcagcaggagtggagggtgggggaaaactagaaagatgaaaacttttacatttttctgatgggttcatgtctctgattgggtcagctggcttcctagcctaagctgggatctgaataccccttctctgtagctgctagtgagccttcccatttagattaaagattgctttatccagcagtcaattaactctccagttatcagtactcccacaattggccagggcaacaataattggagttcatactgatgccctgaggcactgaaaaaaaaaaaaatcccaaagtgccttctgagctgtctaaaagttacattgtgcttggtagatttagtgttaagtgtgcagtataattttctaatttattttctcaatcttttagcacatgtgtaagacactgtgcaaatttttggaaaatagagcaatactttttgtggaatactagctaactaattctgtcattaaactcatattttggaaat

SEQ ID NO: 220967 - DNA, 1000 bp, Homo Sapiens
gcggcggcattgacactagctgggctcctcggggcgcgccccaggtggtccgaagcccggtccgccctccacgcaggtgccccgcgctccccgctcagccatgtcgtcctgcagccgcgtggcgctggtgaccggggccaacaggggcatcggcttggccatcgcgcgcgaactgtgccgacagttctctggggatgtggtgctcaccgcgcgggacgtggcgcggggccaggcggccgtgcagcagctgcaggcggagggcctgagcccgcgcttccaccaactggacatcgacgacttgcagagcatccgcgccctgcgcgacttcctgcgcaaggagtacggggggctcaacgtactggtcaacaacgcggccgtcgccttcaagagtgatgatccaatgccctttgacattaaagctgagatgacactgaagacaaatttttttgccactagaaacatgtgcaacgagttactgccgataatgaaacctcatgggagagtggtgaatatcagtagtttgcagtgtttaagggcttttgaaaactgcagtgaagatctgcaggaaaggttccacagtgagacactcacagaaggagacctggtggatctcatgaaaaagtttgtggaggacacaaaaaatgaggtgcatgagagggaaggctggcccaactcaccttatggggtgtccaagttgggggtcacggtcttatcgaggatcctggccaggcgtctggatgagaagaggaaagctgacaggattctggtgaatgcgtgctgcccaggaccagtgaagacagacatggatgggaaagacagcatcaggactgtggaggagggggctgagacccctgtctacttggccctcttgcctccagatgccactgagccacaaggccagttggtccatgacaaagttgtgcaaaactggtaaacgtctgcttcggagcttgctgcttaataaatgttggtggaatgaatgaaaaaaaaaaaaaaaaaa

SEQ ID NO: 220968 - DNA, 1000 bp, Homo Sapiens
tcacaatatgcatatgctgcccagaatctcctttctcatcatgatagccattcttcagtcattctaaaaatgcccatagagggttcagaaaaccccgagcggccttttctggaaaaggctgacaaaacagctctcaaaatgagaatcccagtggcaggtggagataaagctgcgtcttcaaaaccagaggagataaaaatgcgcataaaagtccatgctgcagctgataagcacaattctgtagaggacagtgttacaaagagccgagagcacaaagaaaagcacaagactcacccatctaatcatcatcatcatcataatcaccactcacacaagcactctcattcccaacttccagttggtactgggaacaaacgtcctggtgatccaaaacatagtagccagacaagcaacttagcacataaaacctatagcttgtctagttctttttcctcttccagttctactcgtaaaaggggaccctctgaagagactggaggggctgtgtttgatcatccagccaagattgccaagagtactaaatcctcttccctaaatttctccttcccttcacttcctacaatgggtcagatgcctgggcatagctcagacacaagtggcctttccttttcacagcccagctgtaaaactcgtgtccctcattcgaaactggataaagggcccactggggccaatggtcacaacacgacccagacaatagactatcaagacactgtgaatatgcttcactccctgctcagtgcccagggtgttcagcccactcagcccactgcatttgaatttgttcgtccttatagtgactatctgaatcctcggtctggtggaatctcctcgagatctggcaatacagacaaaccccggccaccacctctgccatcagaacctcctccaccacttccaccccttcctaagtaaaaaaagaaaaagaagaggagaaaaaaacttctttaaaaaaacacataatttttctttttttttt

SEQ ID NO: 220969 - DNA, 1000 bp, Homo Sapiens
tgtgagccaggaacattcctcgtgaaggactgtgaccagcatagaaaggctgctcagtgtgatccttgcataccgggggtctccttctctcctgaccaccacacccggccccactgtgagagctgtcggcactgtaactctggtcttctcgttcgcaactgcaccatcactgccaatgctgagtgtgcctgtcgcaatggctggcagtgcagggacaaggagtgcaccgagtgtgatcctcttccaaacccttcgctgaccgctcggtcgtctcaggccctgagcccacaccctcagcccacccacttaccttatgtcagtgagatgctggaggccaggacagctgggcacatgcagactctggctgacttcaggcagctgcctgcccggactctctctacccactggccaccccaaagatccctgtgcagctccgattttattcgcatccttgtgatcttctctggaatgttccttgttttcaccctggccggggccctgttcctccatcaacgaaggaaatatagatcaaacaaaggagaaagtcctgtggagcctgcagagccttgtcgttacagctgccccagggaggaggagggcagcaccatccccatccaggaggattaccgaaaaccggagcctgcctgctccccctgagccagcacctgcgggagctgcactacagccctggcctccacccccaccccgccgaccatccaagggagagtgagacctggcagccacaactgcagtcccatcctcttgtcagggccctttcctgtgtacacgtgacagagtgccttttcgagactggcagggacgaggacaaatatggatgaggtggagagtgggaagcaggagcccagccagctgcgcctgcgctgcaggagggcgggggctctggttgtaaaacacacttcctgctgcgaaagacccacatgctacaagacgggcaaaataaagtgacagatgaccaccctgcaaaaaaaaaaaaaaaaaa

SEQ ID NO: 220970 - DNA, 1000 bp, Homo Sapiens
taatatctttgggtcttactatttttacccataaaagtgaccaggtagaccctttttaattacattcactacttctaccacttgtgtatctctagccaatgtgcttgcaagtgtacagatctgtgtagaggaatgtgtgtatatttacctcttcgtttgctcaaacatgagtgggtatttttttgtttgttttttttgttgttgttgtttttgaggcgcgtctcaccctgttgcccaggctggagtgcaatggcgcgttctctgctcactacagcacccgcttcccaggttgaagtgattctcttgcctcagcctcccgagtagctgggattacaggtgcccaccaccgcgcccagctaattttttaatttttagtagagacagggttttaccatgttggccaggctggtcttgaactcctgaccctcaagtgatctgcccaccttggcctccctaagtgctgggattataggcgtgagccaccatgctcagccattaaggtattttgttaagaactttaagtttagggtaagaagaatgaaaatgatccagaaaaatgcaagcaagtccacatggagatttggaggacactggttaaagaatttatttctttgtatagtatactatgttcatggtgcagatactacaacattgtggcattttagactcgttgagtttcttgggcactcccaagggcgttggggtcataaggagactataactctacagattgtgaatatatttattttcaagttgcattctttgtctttttaagcaatcagatttcaagagagctcaagctttcagaagtcaatgtgaaaattccttcctaggctgtcccacagtctttgctgcccttagatgaagccacttgtttcaagatgactactttggggttgggttttcatctaaacacatttttccagtcttattagataaattagtccatatggttggttaatcaagagccttctgggtttggtttggtggcattaaatgg

SEQ ID NO: 220971 - DNA, 1000 bp, Homo Sapiens
aatgctgccacaaccagccaggcaggtccacagagagggagagcagagaaagaagtcctttctctttattgagttcgaggactacaaccaatttacactgccatctgatgccgtgatcctgagccaaggaggtgaggagcagagcaggcaatttcaccaccaaatgccaagaaaagggctgacattttctttcatgggcaccaacctgcatttgtatgtgtcccgaatccacagtcgtactgattctaatggggacacagatcatggtagagaatctctccctcctcagtaaatgtacaactgcacctgtcatcatggaggtcatacatgcatacaaagaggtgtacaggtaccatcttgtatacacatatatacccacatgtacagacatacatttatgcacattcacgctgtttgtttcatatatacaggcataaaatagagtaaatacaggtagttttaaaagtacccttttgtgtgaattgactaccgttgtttgcaaacccgaaaataaaagacgttcattatgtatgaaaagtaactgatttgtattctgtgagcatgtaaaagcggaaagttagtgcttgttctaagattaccttcttgttgataaaccataaatgaatcatcaaagctcacaccaaatttttctatcaaataaaactagtgacagcttgtggctttttattagagctcgccacgaactagggtaaggtgagtgtcttagcatattttaatgcagttgcttactaaaggttttaaccgcacatgcacacacacacgctttcttatgcaatctatgtttgcacttgtgctttcagttagccttctgtaggaagtagaagtcatatgttgtctttgttgtagtgaaattatacagatagagttccatatattgtatttgtttcaatggtaaatccttttggaacatatagaatgcagagatttttttttccattaaaataaatgggtattggtggttaaaaaaaaaaaaaaaaaa

SEQ ID NO: 220972 - DNA, 1000 bp, Homo Sapiens
tgaccagctggacagaatattcaatgtaatgggatttcctgcagataaagattgggaagatataaaaaagatgcctgaacattcaacattaatgaaagatttcagaagaaatacgtataccaactgcagccttatcaagtatatggaaaaacataaagttaaaccagatagtaaagcattccacttgcttcagaagctgcttaccatggacccaataaagcgaattacctcagaacaggctatgcaggacccctatttcttagaagacccacttcctacatcagacgtttttgccggttgtcaaatcccttacccaaaacgagaatttttaacggaagaagaacctgatgacaaaggagacaaaaagaaccagcagcagcagcagggcaataaccacactaatggaactggccacccagggaatcaagacagcagtcacacacagggacccccgttgaagaaagtgagagttgttcctcctaccactacctcaggtggacttatcatgacctcagactatcagcgttccaatccacatgctgcctatcccaaccctggaccaagcacatcacagccgcagagcagcatgggatactcagctacctcccagcagcctccacagtactcacatcagacacatcggtactgagctgcatcggaatcttgtccatgcactgttgcgaatgctgcagggctgactgtgcagctctctgcgggaacctggtatgggccatgagaatgtactgtacaaccacatcttcaaaatgtccagtagccaagttccaccacttttcacagattggggtagtggcttccaagttgtacctattttggagttagacttgaaaagaaagtgctagcacagtttgtgttgtggatttgctacttccatagtttacttgacatggttcagactgaccaatgcatttttttcagtgacagtctgtagcagttgaagctgtgaatgtgctaggggcaagcatttgtctttgtatgtggt

SEQ ID NO: 220973 - DNA, 1000 bp, Homo Sapiens
aacacggagcagcaccaactcgccctcatcagtcagctctgcggctccatcacccctgaggtgtggccaaacgtggacaactatgagctgtacgaaaagctggagctggtcaagggccagaagcggaaggtgaaggacaggctgaaggcctatgtgcgtgacccatacgcactggacctcatcgacaagctgctggtgctggaccctgcccagcgcatcgacagcgatgacgccctcaaccacgacttcttctggtccgaccccatgccctccgacctcaagggcatgctctccacccacctgacgtccatgttcgagtacttggcaccaccgcgccggaagggcagccagatcacccagcagtccaccaaccagagtcgcaatcccgccaccaccaaccagacggagtttgagcgcgtcttctgagggccggcgcttgccactagggctcttgtgttttttttcttctgctatgtgacttgcatcgtggagacagggcatttgagtttatatctctcatgcatattttatttaatccccaccctgggctctgggagcagcccgctgagtggactggagtggagcattggctgagagaccaggagggcactggagctgtcttgtccttgctggttttctggatggttcccagagggtttccatggggtaggaggatgggctcgcccaccagtgactttttctaagagctcccggcgtggtggaagaggggacaggtccctcacccacccacaatcctattctcgggctgagaaccctgcgtgaggacagggctcgcctcaggaatgggctgtttttggcctaaccctcagaaacactggggctggcacaaactcttggtttcttcaacaggagaattttactgtgtttcttttggttccattgtttggagacattcctgggcacagtttggtccgttagaattaaaagttgaatttttttttttttttaaaaaaaaaaaaaaaaaaaaaaaaaaaaaaaa

SEQ ID NO: 220974 - DNA, 1000 bp, Homo Sapiens
caggactatcccttcggcgagacggatggaaaccgagccccctggaggacctgcccctgcagttctgcctcacacggctcaagtcaccaccgtgaacaagggaccctaaagaatggccgagccttgggggaacgagttggcgtccgcagctgccaggggggacctagagcaacttactagtttgttgcaaaataatgtaaacgtcaatgcacaaaatggatttggaaggactgcgctgcaggttatgaaacttggaaatcccgagattgccaggagactgctacttagaggtgctaatcccgatttgaaagaccgaactggtttcgctgtcattcatgatgcggccagagcaggtttcctggacactttacagactttgctggagtttcaagctgatgttaacatcgaggataatgaagggaacctgcccttgcacttggctgccaaagaaggccacctccgggtggtggagttcctggtgaagcacacggccagcaatgtggggcatcggaaccataagggggacaccgcctgtgatttggccaggctctatgggaggaatgaggttgttagcctgatgcaggcaaacggggctgggggagccacaaatcttcaataaacgtggggagggctcccccacgttgcctctactttatcaattaactgagtagctctcctgacttttaatgtcatttgttaaaatacagttctgtcatatgttaagcagctaaattttctgaaactgcataagtgaaaatcttacaacaggcttatgaatatatttaagcaacatctttttaacctgcaaaatctgttctaacatgtaattgcagataactttgactttcttctgaatattttatctttccttggcttttcccttgcttccccttttgccaatctcaacacccaagttgaagactttgtttttaaaatggtttgtcctgatgcttttgtctaattaaaacactttcaaaacaggaaaaaaaaaaaaaaaaaa

SEQ ID NO: 220975 - DNA, 1000 bp, Homo Sapiens
ctctggggccccagctagctgaccctgaagttttcctaccccaaggagagttactcaacagtccataagaagtcaactgttgtgtgtgtgcatgccttgggcacaaacaagcacatacactatatcccatatgggagaagtccagtgcccaggcatagggttagctcagtttccctccttcccaaaagagtggttctgctttctccactaccccaaggttgcagactctctcttatcaccccttcctccttcctcttctcaaaatggtagattcaaagctcctctcttgattctctcctactgtttaaattcccattccaccacagtgcccctcagccagatcaccaccccttacaattccctctactgtgtggaaatggtccattgagtaacacccccatcagcttctcaactgggaaacccctgaaatgctctcagagcacctctgacgcctgaagaagttataccttcctcttcccctttaccaaataaagcaaagtcaaaccatcatctggaaacagtggccacttttcactgacctttcttcgacatctagtcaacccacccaatatgccactgggctctcgctcccaattccaccccaccctccattacagagctcaccacgccctcctagatcaccgtccccaacacacccattgcctctcaaggcccttatctcagccccttcctgtggccacttccctcagtgctcagatgattccctgggtgagggagacactggggcaccctcagaggttgaagcaggctccctgctgtccctggatcctggacagatggctcagtaaactgtggggactaggtgcagactttttgccttcttggagtcctgggtctcctctgagagtctgggtggtgctcttcctacgcctctagaggtctctgtgttcctcattttccttcaaaagcgggctgtgtttctcttctaccttccagctgctcccacagaggaggaagacaataaatatttgttgaactg

SEQ ID NO: 220976 - DNA, 1000 bp, Homo Sapiens
aaagcattgaatgttctgatcagatgtgactaaggtcaaggaaaaaaaattgaaatatcttatttaccatttcctctttttgagtcacttaaattggacacctttggtaccctggtctcagtatatgctattctggcccaaatgttccattattcagctggctgataccacatagatagcttgacaaggagtgctgtctgtccttaccacattttcagcactcagcacagtgccttgtgtataataggcactcaatttattataaatcttcagtatgtcctgagaacagctttagtcatggaatactgggagaaggaataactttcacaaaataaacttaaaacagcctgtaattattgaggttcatattcttctggtatatcattctgagaaattgtggctaatttagaacattgtttagaattgacaaaaggccctggcaattaaattgtcaaggcccaagggctaattttaattttctttttacttggagtcattcattaatttctcacatgggattatggagtatgaagtattatctttgaatgaaattcctgggctgatctgccttacataatcacataaggtcctttgcttttctttgtgttaagagggacttgcctctgtaaatgaaaatgacaatgtgcttttcttgtagttgactttcatgtcactcactataaaataggtctcttaacctggcaccagtataactataaagcactagctgagaaggaactgatacttacatttcatggacagcattaacaagaatgagataaatttgtactttttagatcaaaacaaattacctaattgcaaaagagaaactgaaatggaacatagtctcagattcttctaatgtgtatctcacaatgtcatgtaatgtaaaggaaacccttttggaattagaattcttgttctgatgctgaactatttggtaataaagtgcttatttgcagataacagaaaaaaaaaaaaaaaaaaaaaaaaaaaaaaa

SEQ ID NO: 220977 - DNA, 1000 bp, Homo Sapiens; identical to SEQ ID NO: 115556

SEQ ID NO: 220978 - DNA, 1000 bp, Homo Sapiens
atccaatttggacttctctccagtaaacagtgcttctagtgaagaaaatgtgaagtactccagttctcagccagaaccccgcacaggtctttccttatgggataccagcccctcatacattgataaattggtacaagggatcagcttttcccagcccacatgtcctgatcatatgcttttgaatagtcagttacttggcaccccaggatcctcacagaacccctggcagcggttggtcaaaagaatgacacgattctttaccaaattggatgcagacaaatcttatcaatgcctgaaagagacttgtgagaagttgggctatcaatggaagaaaagttgtatgaatcaggttactatatcaacaactgataggagaaacaataaactcattttcaaagtgaatttgttagaaatggatgataaaatattggttgacttccggctttctaagggtgatggattggagttcaagagacacttcctgaagattaaagggaagctgattgatattgtgagcagccagaaggtttggcttcctgccacatgatcggaccatcggctctggggaatcctggtgaatatagtgctgctatgttgacattattcttcctagagaagattatcctgtcctgcaaactgcaaatagtagttcctgaagtgttcacttccctgtttatccaaacatcttccaatttattttgtttgttcggcatacaaataatacctatatcttaattgtaagcaaaactttggggaaaggatgaatagaattcatttgattatttcttcatgtgtgtttagtatctgaatttgaaactcatctggtggaaaccaagtttcaggggacatgagttttccagcttttatacacacgtatctcatttttatcaaaacattttgtttaattcaaaaagtacatatttcttccatgttgatttaattctaagatgaaccaataaagacataattcttgcaaaaaaaaaaaaaaaaaaaaaaaaaa

SEQ ID NO: 220979 - DNA, 1000 bp, Homo Sapiens
gctacaaggagatccggaaaggcgagagtcggtcggaggctctggctgtggatggagctgggaagcctggggctgaggaggctcaggaccccgaagggaagggagaacaggagcactcccagcagaaagaggaggaggaggagatggcagtggtcccgcaaggcctcttccggggtgggaagagcggagagctggagcaggaggaggagcggctctccaaggagtgggaggactccaaacgctggagcaagatggaccagctggccaaggagctgacggctgagaagcggctggaggggcaggaggaggaggaggacaaccgggacagttccatgaagctctccttccgggcccgggcctacggcttcaggggccctgggccgcagctgcgacgaggctggaggccatcctcccgggaggacagccttgaggcgggcctgcccctccaggtccgaggctaccccgaggagaagaaagaggaggagggcagcgcaaaccgcagaccagaggaccaggagctggagagcctgtcggccattgaagcagagctggagaaagtggcccaccagctgcaggcactacggcggggctgagacaccggctggcagggctggccccagggcaccctgtggccctggctctgctgtccccttggcaggtcctggccagatggcccggacgctgcttccggtagggaggcagcctccagcctgcccaagcccaggccaccctatcgccccctacgcgccttgtctcctactcctgactcctacctgccctggaacatcctttgcagggcagccccacaactttaaacattgacgattccttctctgaacacaggcagctttctagaagtttcccttcctccatcctatccactgggcacaactgcaataacttctgaccttttggtgaaagctgagaactcctgactgtaacatattctgtatgaactttatctaaagaaaaataaatctgttctgggctctttcctctg

SEQ ID NO: 220980 - DNA, 1000 bp, Homo Sapiens
tccccgccccttcctggagctggcagagctaacgccctgcaggaggaccccggcctctcgagggctggatcagcagccgcctgccctgaggctgccccggtgaatgttattggaattcatccctcgtgcacatcctgttgtgtttaagtcaccagatattttgttcccatcagtttagcccagagatagacagtagaatgcaaatacctccctcccctaaactgactggacggctgccaaggaggccccaaacccaggccccatgcaaaggcacgtggtttccttttctcctctctctgcatctgcgctttccagataagcccaaagacagcaacttctccactcatgacaaatcaactgtgaccctcgctccttccatttctgtccattagaaaccagccttttcagcatctcacccattagcagccccatcacccagtgatcagtcgcctcagtaaagcagatctgtggatggggagcctacgggtggtaagaagtggtgttttgtgtttcatctccagcttggtgttccatggcccctaggcgaggtgatcagggagtggggccaatgggcccccggccctggctttgggaccttgtgctgagggatgatttgctcctgaccttgattaacttaacagttcccagctggaagggacactttcaggacccagtccactgtatggcatttgtgatgcagaattatgcactgacatgaccctgggtgacaggaaagcctttcgagaggcccaaggtggcctcgccagccctgcagtattgatgtgcagtattgcaccacagctctgcggaccttggccattgccgcagtcgcagcttccttttttctgtttgcactgtttgtttgtatgatgttagctaattccactgtgtatataaattgtattttttttaatttgtaaaatgctatttttatttgaacctttggaacttgggagttctcattgtaaccctaacatgtgagaataaaatgtcttctgtc

SEQ ID NO: 220981 - DNA, 1000 bp, Homo Sapiens
aaaaggaaaataaaaactgtggctgaccaaaaggtcttcttgttgtccataaaaggataaggtaaacagtccttagataattacaaaactttctacaaaagttaaaatgttacattactatacgtattcagattcacttgttaaagtactcttaaatcattcaaatctggaaacaaaagctgaacttaactcttgctccctcaaaagagaaacacaagcataagtgcagcttcaaaaaaggaaaatattttaggctttggtggaagggtggagtttagataaaatttaaatgaagtagcgttttaataggttcaaagaaaagtaaggcaatgagcaaactcaaagtactgtccttgaaaaccatagagtcaagataaatgtatagtgtatggttaggtggcagagaaatgcaatcatgttgataatctttgagatacatcctgtcatcagtatatttcagaatacatgcaatgcactagcaagttacaattgatagaatacatttgaaatgttaaatgaaataagccaggcacagaaagacaaacaccacatgatctcactcatatgtggaattttaaaaagttgatctcactcatatgtggaattttaaaaagttgatctcacacaagtagagggtagaatcgtggttaccaggggctagggagagaaagaaggcagaggcactgaaagatgttggtcaatgggtataaagttacacctaggaagaataaattttggtattcaccacagtagggtgactatagcaaataataatgtagcatgtatttcaagatagctagaaaagcaggtttttaaatgtcaccacaaagaaataacaaatgtttatagtggtggatatggtaattacgcctatttgatcattatactgtgtgtacatgcattgaaacaccacattgtatcccatatatatgtacaattatgtgcccattatacatttaaaaaataaattttaaaaaccttcaaaaaaaaaaaaaaaaaa

SEQ ID NO: 220982 - DNA, 1000 bp, Homo Sapiens; identical to SEQ ID NO: 115562

SEQ ID NO: 220983 - DNA, 1000 bp, Homo Sapiens; identical to SEQ ID NO: 115564

SEQ ID NO: 220984 - DNA, 879 bp, Homo Sapiens
gcagggagagagaactggccagggtataaaaagggcccacaagagaccggctctaggatcccaaggcccaactccccgaaccactcagggtcctgtggacagctcacctagtggcaatggctccaggctcccggacgtccctgctcctggcttttgccctgctctgcctgccctggcttcaagaggctggtgccgtccaaaccgttccgttatccaggctttttgaccacgctatgctccaagcccatcgcgcgcaccagctggccattgacacctaccaggagtttgaagaaacctatatcccaaaggaccagaagtattcattcctgcatgactcccagacctccttctgcttctcagactctattccgacaccctccaacatggaggaaacgcaacagaaatccaatctagagctgctccgcatctccctgctgctcatcgagtcgtggctggagcccgtgcggttcctcaggagtatgttcgccaacaacctggtgtatgacacctcggacagcgatgactatcacctcctaaaggacctagaggaaggcatccaaacgctgatggggaggctggaagacggcagccgccggactgggcagatcctcaagcagacctacagcaagtttgacacaaactcgcacaaccatgacgcactgctcaagaactacgggctgctctactgcttcaggaaggacatggacaaggtcgagacattcctgcgcatggtgcagtgccgctctgtggagggcagctgtggcttctaggtgcccgagtagcatcctgtgacccctccccagtgcctctcctggccctgaaggtgccactccagtgcccaccagccttgtcctaataaaattaagttgtatcatttca

SEQ ID NO: 220985 - DNA, 1000 bp, Homo Sapiens
ctcaggcggccccacccccgggacgtggggtcacttccttcatgtaagactttggccgaaatttctacacctgtgtctagtcctcccctccaagagcattaactatttaaaacaaggaaaagaggaaaaaaaaaacagaggcccgccctaccccactcctgcccctccgtttctttgctgaagtgagtagtgtgatcctggaggccccccggcctggccccgccccgccagccgcccccgttagcgtcataaagtccagcttgtctccctcgatccaaaggccgttttctcgaggggagggcaggcccggcctggaggggtgctgtggagctgtcttgcccaggccctcctgggagggggacaggcattgttgccaggggtgaggccgtgccccaggcctccccgaaaccaaaggggaaggcaggggtggggccgtggctgaagccggctccccaaccaaaatgctgcaccaaagctcgggcgccgcgggcacggctgctgcagtctcttcccagcctggccctggcaaggggcgggtgggcgctgccaggcgggtgcttctcgacgcacttgctcccggaggctgcgccccggcgcctggaacccgaggtgggaggaccggttggtgtcaccctgctcggccctcagccctgccgcgtggggcgcgtgggcacggagcttcctgcctctgctccgacacccggcaagcagccggagacaaaacgccttaaagcccccggcccagccctgcaggtatattgcaggggcctgggggcggccctggactggcgggcggttccccagtggggtgccctggaggctgccgggcagagtggagcagcttggggccgtgcccagggcggtggctgtgagtctagtttttgctttaccaagtgtacagaaatggcatttacgtttctctgatgctcccttgaagccatagaatttaggggcttttttaaaaaaataaaagaaaaatgaaaccaaaaaaaaaaaaaaa

SEQ ID NO: 220986 - DNA, 1000 bp, Homo Sapiens
tatggatttccagtttttctttactttctcccagtatgttttaacaaaaaaaaaaaaaagcaggaaaaaaggaatatttagcagtattgttcgttctgatatgtgaatttgtttgtgacaactaaacaaggcattcagcagtttctgacaattaacatacatcattccacactccttgtcaacaaagtgctttttcactgcctaaaattttagatgtagatatttgaaatagattttttcatttataccagttttctttatgatgatacagtgttaaaagaaaataaattacaattgatctgtcatccatatttgctaagaatgtctatttccaagaacctatatcttacaaaatacacattcttgcttgtgtgtctgtgtgtgtgggtgtatgtatgtccacgtactagaaaaattacctgtgtgagattttattttgacagaagctatttcatttgctgttcatcttgtacaaactttgtttttggttttttagtataaatgtacatcagtttgttccttttgtactgtatctattcttctgaccatctagtgactcaggatattaggccagttgaagtggagttataggattttcacacattcacgcatacttggatatcaaccctctctacaggtccgtttccttacacattttatcccctcagaacacgataaaccatggccaattcagtttcactttggggccaattacttgaagtatccacagaaaatgtaaactgctcgccttattcccccaaactttttgttcatgtggcagggagcagtacacaactatggaatagattattaaaactgaacttgaagctaacgttagaatagtggttaacagagctaagaaataaggctaaccatcgaaaagaacatgggccgcgggtaaactagctttgctctttagatgcaagtggctgaggccaataggtgcctagtaaatgttaactgttcttggaaaaaataaaaacatcagtaacaaaaaaaa

SEQ ID NO: 220987 - DNA, 1000 bp, Homo Sapiens
ccaggccagtaagggaaatagaaaaaccctgcccccaaataagaagggatggattccaaccccaactccagtagcttgggacaaatcaagcttcagtttcctggtctgtagaagagggataaggtacctttcacatagagatcatcctttccagcatgaggaactagccaccaactcttgcaggtctcaacccttttgtctgcctcttagacttctgctttccacacctggcactgctgtgctgtgcccaagttgtggtgctgacaaagcttggaagagcctgcaggtgctgctgcgtggcatagcccagacacagaagaggctggttcttacgatggcacccagtgagcactcccaagtctacagagtgatagccttccgtaacccaactctcctggactgccttgaatatcccctcccagtcaccttgtggcaagcccctgcccatctgggaaaataccccatcattcatgctactgccaacctggggagccagggctatgggagcagcttttttttcccccctagaaacgtttggaacaatctaaaagtttaaagctcgaaaacaattgtaataatgctaaagaaaaagtcatccaatctaaccacatcaatattgtcattcctgtattcacccgtccagaccttgttcacactctcacatgtttagagttgcaatcgtaatgtacagatggttttataatctgatttgttttcctcttaacgttagaccacaaatagtgctcgctttctatgtagtttggtaattatcattttagaagactctaccagactgtgtattcattgaagtcagatgtggtaactgttaaattgctgtgtatctgatagctctttggcagtctatatgtttgtataatgaatgagagaataagtcatgttccttcaagatcatgtaccccaatttacttgccattactcaattgataaacatttaacttgtttccaatgtttagcaaatacatattttatagaacttcca

SEQ ID NO: 220988 - DNA, 1000 bp, Homo Sapiens
ctcctgaaggaaaaggagcgcaaggcggccctgcctgcagccacaacccctgggccaggcctggagactgcgggcccggcggatgccccggctggggcagtggtgggcggagggtccccgcgggggcgcccggggccggtgcccgccccgggtctgttggcgccactgctgtgggagcgcacgctgccgttcggcgatgtggagtacgtagacctggacgccttcctgctggagcacgggctcccgcccagcccgccgccccccggtggcccgtcgccggagccgtcgcccgcgcggacgcccgcaccctccccagggccgggttcgtgcggctcggcttccccccgctcctctcctgggcacgcccccgcccgggctgccctcgggaccgccagcggccaccgcgcaggcctgacctctcgggacacacccagccctgtggacccagacaccgtggaggtgttgatgacctttgaacccgacccagctgatcttgccctatcaagcattcctggccacgagacctttgaccctcgaagacatcgcttctcagaagaggaacttaagccccagccaatcatgaagaaggcaagaaaaatccaggtgccggaggagcagaaggatgagaaatactggagccggcggtacaagaacaacgaggcagccaagcggtcccgtgacgcccggcggctcaaggagaaccagatatcggtgcgggcggccttcctggagaaggagaacgccctgctgcggcaggaagttgtggccgtgcgccaggagctgtcccactaccgcgccgtgctgtcccgataccaggcccagcacggggccctgtgaggctgccccacatccccacctggcggagctctcctccgccttgctgagacttacgccctgttcccttcctgccctgtggcccacgggccggccagctgggtgccccagggacgtgataatgcagataaatacatttatatttttaagaaaaaaaaaaaaaaaa

SEQ ID NO: 220989 - DNA, 1000 bp, Homo Sapiens; identical to SEQ ID NO: 115460

SEQ ID NO: 220990 - DNA, 1000 bp, Homo Sapiens; identical to SEQ ID NO: 115580

SEQ ID NO: 220991 - DNA, 1000 bp, Homo Sapiens
ccctgaggtgtttgggctgcaccccaatgctgacatcacctaccagagcaagctggccaaggacgtgctggacaccatcctaggcatccaacccaaggacacctctggtggaggggatgagacccgggaggcggtggtggcccggctggctgatgatatgctggagaagctgcccccagactatgtcccctttgaagtaaaagagaggctgcagaagatggggccattccagcctatgaacattttcctcaggcaggaaatagacagaatgcaaagggtactcagccttgtccgcagcaccctcactgagctgaaacttgctattgatggcaccatcatcatgagcgaaaatctgcgagatgcattggattgcatgtttgatgctagaatccctgcttggtggaaaaaagcttcttggatttctagtacactgggtttctggtttactgaacttatagaaagaaacagccagtttacctcgtgggttttcaatggccgacctcactgcttttggatgacgggtttttttaacccccagggatttttaactgcaatgcgacaggaaataactcgggccaacaaaggctgggctctggacaatatggtgctttgcaatgaagtcaccaaatggatgaaggacgacatttctgcccctcccacagagggtgtctatgtctatggcttatatcttgaaggtgctggctgggacaagaggaacatgaaactcattgaatcaaagccaaaagtgctctttgagttgatgcctgtcataaggatttatgcagaaaacaatactttacgagatcctcggttttactcctgtcccatctataagaagccagttcgaacggacttgaactacattgccgctgtggatctcaggacagcccagacccctgaacactgggtgctccgtggggttgcccttctgtgtgatgtcaagtaacatgtggggagtgtccccacccaatgctttggaaaatgcaagatctaaattatt

SEQ ID NO: 220992 - DNA, 1000 bp, Homo Sapiens
tcaacagcacagaggaccactccaaatggtgcgtgtccccaaaagggccctggacctgcgtgggtgacatgaatcggaaccagggagaggagcaacggggtgggggcacactgtgtgcccagctgccagccctctggaaagccttccagccgctggtgaagaactaccagccctgtaatggcatggccaggaagcccagcagagcttataagatctaacccttatggccaggtgcagtggctcacgtatgtaatcccagcactttgggaagccaaggagggaggatcacttgaactcaggaattcgagaccagcctgggctacatagtgagaccacatctctactagaacttaaaaaaagttagccaggcacggtgataaatgcctgtagtcccagccactgaagccagaggatcgattgaaccagggagatcatggtcacagtgaactatgattacgccaacctgggtcacatagcaagactctgtttcaaaaaaaaagggggggcgggggacgggtgggtgcagtggctcacatctgtaaccccagcactttgggaggctgagatgggcagatcacttgaggtcaggagttcgagaccagcctggccaacatggtgaaaccccatatccattaaaaatatttaaaaattagccagacatggtggcacgcgtctgtggtcctagctcctcgggaggctgaggcaggagaatcgcttgaactcgggaggcagaggttgtcatgagctgagctaacaccacggcacttcagcctgggtgacagaatgagactctgtgtcaaaaaaataaaaaataaaaaatctaagggctcaggaaccagtttggacttgattttgaatcccagttcatccccttcctagctgtatgaccttgattgtgtgccttaaccgctctgtgacacagtctacctgtctgcaaaatgggaaacataatacctgccatcaggattgttgaggagtaaataaatggaaattggtgaaa

SEQ ID NO: 220993 - DNA, 1000 bp, Homo Sapiens
atgttaacatttcgtgcgactgctttttcttcaaaggagttcagttctcaccatggagtgagtggcctttagcgtcatggagcaaggtgggtctgggaggtagatatgggtccgggatgtgctatcgtagttatcagagttgggggcctctgagtgtgtctggctctgagagagtctgagtcttgcccaaacattctttctttttgtgccaaatgacttgcatttgcaaagagctcaattgctctgagctcagccaagtaggagaggctaggccatcactcttaggaagctgtgtagtgatgatgtataagaatcctcctcactgtcatgggatgttgtatccagcccctccttgttccagccggtggtgtgacttcgttggttgaggtgtgtctccaacctacatcagaccatgaagttcaacccctccagggaagctcctgatttcccctgcataattgaaaataggatatttctcagctattgaacagttactaatttatggggtggaaacagcattaagaatactgaatcaaatggaaaaacaaatgaatacaggaagataagtgttcgttcttttctgaaaaagagtatgtgtaccacaagagctggttttaattgggtgaattgtttttgtcctcattctgtacagaaatttgtatatatgatggttcttagaacttgttttaatttttgtggtccttctgtttattataataggcgtccaccaatgattatccatatgtgttcttaatttttaactgctggaagtgttaaaacacacacacacacacacacacattttttttttgagaactccaaagtcctgaaaattttggtggacaatgatttttaaaaaactaactttgtataacctaatatttgtattctctcatctatatttttttattcactataatcatgatactcttctaatagacttaaaagttaatcattgacaacgaaaaataaaatgttattttaaaagaaaaaaaaaaaa

SEQ ID NO: 220994 - DNA, 1000 bp, Homo Sapiens
atgctgagcccttagactccctgcgcattgctccatgcccttcccaggactccctatactcagaccccttggacagcacgtctgctcaggcaggagagggagtacaacggaagaaacctctctattgggacttgtatgagcatgcgcagcagcagttgctgaaggccaagctgacagaccccaaagaggatcccatctatgatgaacctgagggcctggccccagtccctccccagggcctttatgatctgcctcgggagcccaaggatgcatggtggtgccaagctcgggtgaaggaggagggctatgagctcccctacaaccctgccactgatgactacgctgtgccaccccctcggagcacaaagcccctccttgctcccaagccccagggcccagccttccctgaacctggtactgcaactggcagtggcatcaaaagccacaactcagccctgtacagccaggtccagaagagcggggcctcagggagctgggactgtgggctctctagagtagggactgacaagactggggtcaagtcagagggctctacctgagaaggacggcaaggctgaggtggctaagggggaccatggggaggtggcactagggatcaaagaagatggttagaaccagcagaagccagagggtgggaggggccatgctgtgtgagaccaggggaccagagggatgggagagtcaagggaaggacaatcccaggaagtcctaagaagtggggcagatggcagggctgaggatgggctctgcatcccccaaagccatcccttccctacttccccaaatgaagggacggctgtgggaccaggtctgtggaaagtggtgcatggtcagaatgggtgcagtttgaggggcctgtgtggaggcctcagggagatgttggactgtgcctggatccttactcctgcattgttctttgccagagacctatttaaaaattttaaaattctcattaaagtcaaaaaaaaaaaaaaaaaaa

SEQ ID NO: 220995 - DNA, 1000 bp, Homo Sapiens; identical to SEQ ID NO: 115586

SEQ ID NO: 220996 - DNA, 1000 bp, Homo Sapiens
aaaggaggaagtgaggcgaattctggggctgctggatgcttacttgaagacgaggacttttctggtgggcgaacgagtgacattggctgacatcacagttgtctgcaccctgttgtggctctataagcaggttctagagccttctttccgccaggcctttcccaataccaaccgctggttcctcacctgcattaaccagccccagttccgggctgtcttgggcgaagtgaaactgtgtgagaagatggcccagtttgatgctaaaaagtttgcagagacccaacctaaaaaggacacaccacggaaagagaagggttcacgggaagagaagcagaagccccaggctgagcggaaggaggagaaaaaggcggctgcccctgctcctgaggaggagatggatgaatgtgagcaggcgctggctgctgagcccaaggccaaggaccccttcgctcacctgcccaagagtacctttgtgttggatgaatttaagcgcaagtactccaatgaggacacactctctgtggcactgccatatttctgggagcactttgataaggacggctggtccctgtggtactcagagtatcgcttccctgaagaactcactcagaccttcatgagctgcaatctcatcactggaatgttccagcgactggacaagctgaggaagaatgccttcgccagtgtcatcctttttggaaccaacaatagcagctccatttctggagtctgggtcttccgaggccaggagcttgcctttccgctgagtccagattggcaggtggactacgagtcatacacatggcggaaactggatcctggcagcgaggagacccagacgctggttcgagagtacttttcctgggagggggccttccagcatgtgggcaaagccttcaatcagggcaagatcttcaagtgaacatctcttgccatcacctagctgcctgcacctgcccttcagggagatgggggtcattaaaggaaactgaacattgaa

SEQ ID NO: 220997 - DNA, 1000 bp, Homo Sapiens
atgggccacttgggaccggaagtgacttgctccagacaagaggtgaccaggcccggacagaaatggcctgggaagtagcagaagcagtgcagcaggaactggaagtgccttcatccaggacaggaagtagcacttctgaaacaggaagtggtctggctggaactccaagtggcttagtctgggggatcaggaggtgggaggtggatggttcttattctgtggagaagaagggcgggaagaacttcctttcaggaggaagctggaacttactgactgtaagaggttagaggtggaccgagaaggacttttcccagtcttcagtggcacttcccaagatctcccttcccttgtgctctgtgctgattttaggacagctaagatgactgccatgtgctgtggcaggcctaatttgtcttgttctttcctttccatatcccagtataatctctgttaatcaacaggactaccccaagaacccatgtgctctcccgagtaacccagatggctgtcttgttcattccatcctacatttctgactcctttcagactcaacacagttcccttcttagtgaccaaaatggtggcctactggctggtctagctgacagtggtacttagcaaaggccactgtttccatagtgaccagctgatacctcttcctgccctctagtgtgcaattgggtgttgcctcagtttcctcccagctcagttttattagatcaaagctgttgttgggcaccaggttggccacctcaatcaccagccaagatggttgctttgtccaccagaggtcaagttcacctctctggtgctgtagttcccagctccttcctgatttttctaatcgctccttctggggaacaggaagttgatattgccatggtggcggggtatgccgtcacctcagtagttttactgtaaaagggaaatttgaacaacaaaaaccaaaaaaaataaaaataaaaaacttcaaaagttgacaaaaaaaaaaaaaaaaaaa

SEQ ID NO: 220998 - DNA, 1000 bp, Homo Sapiens; identical to SEQ ID NO: 115587

SEQ ID NO: 220999 - DNA, 1000 bp, Homo Sapiens; identical to SEQ ID NO: 115588

SEQ ID NO: 221000 - DNA, 1000 bp, Homo Sapiens; identical to SEQ ID NO: 115592

SEQ ID NO: 221001 - DNA, 1000 bp, Homo Sapiens
agaaccaaagcaaccacaaatgcataaatgcataatttatggtcttcaaccaaggccacataataacccagttaacttactctttaaccaggaatattaagttctataactagtactcaaggtttaaccttaaaattaagatttccttaaccttaaccttaaaattgatattatattaaacatacataatacaatgtaactccactgttctcctgaatattttttgctctaatctctctgccgaaagtcaaagtgatgggagaattggtatactggtatgactacgtcttaagtcagatttttatttatgagtctttgagactaaattcaatcaccaccaggtatcaaatcaacttttatgcagcaaatatatgattctagtgtctgacttttgttaaattcagtaatgcagtttttaaaaacctgtatctgacccactttgtaatttttgctccaatatccattctgtagacttttgaaaaaaaagtttttaatttgatgcccaatatattctgaccgttaaaaaattcttgttcatatgggagaagggggagtaatgacttgtacaaacagtatttctggtgtatattttaatgtttttaaaaagagtaatttcatttaaatatctgttattcaaatttgatgatgttaaatgtaatataatgtattttctttttattttgcactctgtaattgcactttttaagtttgaagagccattttggtaaacggtttttattaaagatgctatggaacataaagttgtattgcatgcaatttaaagtaacttatttgactatgaatattatcggattactgaattgtatcaatttgtttgtgttcaatatcagctttgataattgtgtaccttaagatattgaaggagaaaatagataatttacaagatattattaatttttatttatttttcttgggaattgaaaaaaattgaaataaataaaaatgcattgaacatcttgcattcaaaatcttcactgac

SEQ ID NO: 221002 - DNA, 1000 bp, Homo Sapiens
gtggttatgttcccagcagtgggggtcagacgcccttcctcagaactttctagttgccctctacctgactcctgacttgtattccttttagcagtagccttcttccctcggggagccaaagagtgtggtgtgtggcgctatattgtggctgctatttcatctggtttcttttaatgtgaggaactcacatactgacttcagtgggactcggtgagccggggccgtctgtgtggtgggaccccctttagcgggactcagtgagctggggccgtctgtgtggtggagccagggcctctccctttagtggagccaggttgtcgggccccgaatgtcactggtggatctaagaagggctgagtggtctgacaccaaaacatgccgcagggagggctgtggtgccggtgcttccaacaaggacagccctccttgaccctgaaaggaacactggcttgaaggactgcagacaggctctgaggggcacgccctcctcagcgagaggcagcaaggtggccacagtgtcactggtcaggtgcttctcaccacgggaaagccgccgacctgtgactcgcttgagatgggaaagcggcgccacagaccccgggtctccttggctgtctgtgggccgcccctggccaccttgtcctggctcgcagggtgcaggagcgcctcgttctctgggtggccggcttgctgctccggtttgggctgtcttaccataacaccgtcccagggctctgcaggccactgtgagcgctggctccctgggcagtgctcctccgtgtggactgtgcctcaggccagggctcaccagctggggtcctgtccggaaggatgggatctttctgggagctgcgccggacagagtggggagctcctagtttgtggggggaagctttgatatccatgccacgtccatccaccccaccccttttcgtcacgagcacaatggtcttacattggatttttgtaaaaaaataaaaataaatggagactttaactc

SEQ ID NO: 221003 - DNA, 1000 bp, Homo Sapiens
ggcatcctcctaggggctgagaggtgagcagcaggggagcgggcacagtcccctctgcccctgcctcagtcgagcactcactgtgtctttgtcaagtgtctgctccacgtcaggcactgtgctttgcaccggggagaaaatggtgatggagggcaacaaggactccgaggagcaccaccaggcctcgggccccagaggtcccgctcctcagcctacacgcagaggaacgggcccacctcagagtcacaccactggctgccagtcagggcctgccaggagtctacacagctctgaaccttctttgttaaagaattcagacctcatggaactctgggttcttcatcccaagtttcccaggcacttttggccaaaggaaggaaggaactaattcttcattttaaaaattcttaggcactttttgaccttgctgtctggatgagtttcctcaatgggatttttcttccctagacacaaggaagtctgaactcctatttagggccggttggaagcagggagctggaccgcagtgtccaggctggacacctgccattgcctcctctccactgcagacgcctgcccatcaagtattacctgcagcgactcaaccctatgcatggagggtcaatgtgggcacatgtctacacatgtgggtgcccatggatagtacgtgtgtacacatgtgtagagtgtatgtagccaggagtggtggggaccagaagcctctgtggcctttggtgacctcaccactccctcccacccagtccctccctctggtccactgccttttcatatgtgttgtttctggagacagaagtcaaaaggaagagcagtggagccttgcccacagggctgctgcttcatgcgagagggagatgtgtgggcgagagccaatttgtgtgagtggtttgtggctgtgtgtgtgactgtgagtgtgagtgacagatacatagtttcattggtcatttttttttttaacaataaagtatctttttttactgtt

SEQ ID NO: 221004 - DNA, 1000 bp, Homo Sapiens
tgtcccaggccttcgtgggccagaagaactccttcaccgtggactgcagcaaagcaggcaccaacatgatgatggtgggcgtgcacggccccaagaccccctgtgaggaggtgtacgtgaagcacatggggaaccgggtgtacaatgtcacctacactgtcaaggagaaaggggactacatcctcattgtcaagtggggtgacgaaagtgtccctggaagccccttcaaagtcaaggtcccttgaatcccaaaagtgcctccccagcctcagcccccacctccagccacacacacattacacacacacacacacacacacaaatgtgccacacccagacacgcacagaatcagacactacaaacacctgccttgggggtgaagtgaaggcccagcctccccaccccaccgcgccccaggggttggaggaccttgtctgtgtcaggacagtgtccctccctgggaatgtgacatgagggccgactggggccaggctcaggggcagaggctgggacacaaggggctggcgagggctgcgaggccagggaagccctgagtttctggcggggctgagcagtgggggagcattgtgttgtgggtgtctgtgtgtgaggtcaccctcaaactgcaccgccggccagataccctcctgaccccgaggacttggtctggtctctctggtggctacaaccccagagttttaaggacttggaaaggaaagcacaatcagagaagaaaacagcccccgaaccagcaggagtggcctggcacatggaccggcctgagcgatgtgcactccacccaagccaggctcccagggggcctgatttctctctcactgtctctttttttaaaatggttgcacggctctgccccatggggggccttttttacacactgcgaggcccagctttctaggggacttttgcacatgtcatgcagctcagctgggagctgcttaggtggaaaactccaaataaagtgcggctgtcgcagagggt

SEQ ID NO: 221005 - DNA, 1000 bp, Homo Sapiens
cggcgacaggaggcatgaggggcccccggccgaaatgacagtgctggcgccagcctggagcccaacaacctatctcctcctgctgctgctgctgagctcgggactcagtgggacccaggactgctccttccaacacagccccatctcctccgacttcgctgtcaaaatccgtgagctgtctgactacctgcttcaagattacccagtcaccgtggcctccaacctgcaggacgaggagctctgcgggggcctctggcggctggtcctggcacagcgctggatggagcggctcaagactgtcgctgggtccaagatgcaaggcttgctggagcgcgtgaacacggagatacactttgtcaccaaatgtgcctttcagcccccccccagctgtcttcgcttcgtccagaccaacatctcccgcctcctgcaggagacctccgagcagctggtggcgctgaagccctggatcactcgccagaacttctcccggtgcctggagctgcagtgtcagcccgactcctcaaccctgccacccccatggagtccccggcccctggaggccacagccccgacagccccgcagccccctctgctcctcctactgctgctgcccgtgggcctcctgctgctggccgctgcctggtgcctgcactggcagaggacgcggcggaggacaccccgccctggggagcaggtgccccccgtccccagtccccaggacctgctgcttgtggagcactgacctggccaaggcctcatcctggggaggatactgaggcacacagaggggagtcaccagccagaggatgcatagcctggacacagaggaagttggctagaggccggtcccttccttgggcccctctcattccctccccagaatggaggcaacgccagaatccagcaccggccccatttacccaactctgtacaaagcccttgtccccatgaaattgtatataaatcatccttttctaccaaaaaaaaaaaaaaaaaaaaa

SEQ ID NO: 221006 - DNA, 1000 bp, Homo Sapiens
attgacaaaaggtatgtggagagccaacgccataccattcagggagactacatagataccatggaagagcttgctgatttggtgggggtcaggcccaatctgctgtctctggccttcactgaccccaagctggcattacacttattactgggaccctgcactccaatccactatcgtgtacagggccctggaaagtgggatggggctcgaaaagctatcctcaccacagatgatcgcatcaggaagcctctgatgacaagagtagttgaaaggagtagttctatgacttcaacaatgacaataggcaagtttatgctagctcttgccttctttgctataattatagcttacttctagttgtcctattgtcactgccctgtttttcattgggaagcttatctacagatgccttcagaatctgacgagattgactctcagtttcatattgcccagaaatctactttaatgtctctttcgaaagcattaattcactttcctttttcctacaatgaaacctgttttccatttgtattaactcatctcccttccactcatgatccgtcactcttccttgtggtaatccctagactgggagctcaggtactcttttagtcatctttgtatgtctttagcagagttcttgacatgtggtaggtgcttaataaatgtttgttgtttatcaaattttatggtagggagagtaagtcagcatcggtataaaatcgcttactccacgtaactcttcttctgatagggtttgattttctattagaagctcaattttagttttttttcatattataactaaatatgtttcctgagagataagagaaataatgttcctacaatagttgtatgtatctaagataagacatatagatgcttaagacattttgtttcacttgctattcactagtgtacttgaaacatggtcatttttagcccttttccttaggaaccatgtctttattttctcaataaagaaattactttcaactca

SEQ ID NO: 221007 - DNA, 1000 bp, Homo Sapiens
cgactcggtaaaaaagttaagcgctgggatatgaagcttcgtcatcttggactcagtaaaagtgattctagcaatagtgattccactcagagtcagaagtctggcaggaactcgaacccccggcaagcacgcaactaaatcccgaaatacaaaaagtaacacagtggacttcctattaagacttacttgcattgctggactagcaaaggaaaattgcactattgcacatcatattctattgtttactataaaaatcatgtgataactgattattacttctgtttctcttttggtttctgcttctctcttctctcaacccctttgtaatggtttgggggcagactcttaagtatattgtgagttttctatttcactaatcatgagaaaaactgttcttttgcaataataataaattaaacatgctgttaccagagcctctttgctggagtctccagatgttaatttactttctgcaccccaattgggaatgcaatattggatgaaaagagaggtttctggtattcacagaaagctagatatgccttaaaacatactctgccgatctaattacagccttatttttgtatgccttttgggcattctcctcatgcttagaaagttccaaatgtttataaaggtaaaatggcagtttgaagtcaaatgtcacataggcaaagcaatcaagcaccaggaagtgtttatgaggaaacaacacccaagatgaattatttttgagactgtcaggaagtaaaataaataggagcttaagaaagaacattttgcctgattgagaagcacaactgaaaccagtagccgctggggtgttaatggtagcattcttcttttggcaatacatttgatttgttcatgaatatattaatcagcattagagaaatgaattataactagacatctgctgttatcaccatagttttgtttaatttgcttccttttaaataaacccattggtgaaagtcccaaaaaaaaaaaaaaaaaaaaa

SEQ ID NO: 221008 - DNA, 1000 bp, Homo Sapiens; identical to SEQ ID NO: 115605

SEQ ID NO: 221009 - DNA, 526 bp, Homo Sapiens; identical to SEQ ID NO: 22837

SEQ ID NO: 221010 - DNA, 1000 bp, Homo Sapiens; identical to SEQ ID NO: 115615

SEQ ID NO: 221011 - DNA, 1000 bp, Homo Sapiens; identical to SEQ ID NO: 115617

SEQ ID NO: 221012 - DNA, 1000 bp, Homo Sapiens
atgtgaattcaagtgcctgattaattgaggtggcaacatagtttgagacgagggcagagaacaggaagatacatagctagaagcgacgggtacaaaaagcaatgtgtacaagaagactttcagcaagtatacagagagttcacctctactctgccctcctcatagtcataatgtagcaagtaaagaatgagaatggattctgtacaatacactagaaaccaacataatgtatttctttaaaacctgtgtgaaaaaataaatgttccaccagtagggataggggaaaagtaaccaaaagagagaaagagaaaggaatgctggtttatctttgtagattgtaatcgaatggagaaatttgcagtattttagccactattaggaattttttttttttgtaaaatgaagactgaactctgttcaaatgctttcatgaacctggtttgagacggtaggaaagcaacaaaacgtgggaacctggtgactaagggcctggtgcaaggacttgggaaatgtcattaataatagatggtggggttttcccccctttagaaatgttggatattaagtgatataaacacttcttttaactccgaaaatcttctgagaaatcacaaaattcacggtatgcttggaacgattgagattttctaggtagatgctgaatagcctagacatcaaagttggtgtgaaccaaaatagagtcagctgacccagcatcagccacactctgggttggaaaatgtttgcctgttggaattaatttaagcttaagtatatatcaacattattttattgtgcaattaaaacaatacaaattcatggttttttaaagttaaaaattctaaccactgtaacaacagtttttgtgttattttctgtattaaacatcttgttgcacgcatttgaggtcatcagggtgcaaaatttgtattcctgaaaatgtcatatattttcattaataaataacctaaatatgataaaacataaaaaaaaaaaaaaa

SEQ ID NO: 221013 - DNA, 1000 bp, Homo Sapiens
ttaccctccaacatagatgacctcccctcacatgaggcacctctcgctgactctctggaagaactggagcctcagcacatctccctttctgttttcccctcaagttctcttcacccactcaccttctcctgtggtgataagctgactctggatcagttaaagatgaggtgtgactccctcatgctctgagtggtgaggcttcaagccttaaagtcagtgtgccctcaaccagcacagcctgccccaattcccccagcccctgctccagcagctgtcatctctgggtgccaccatcggtctggctgcagctagaggacaggcaagccagctctgggggagtcttaggaactgggagttggtcttcactcagatgcctcatcttgcctttcccagggccttaaaattacatccttcactgtgtggacctagagactccaacttgaattcctagtaactttcttggtatgctggccagaaagggaaatgaggaggagagtagaaaccacagctcttagtagtaatggcatacagtctagaggaccattcatgcaatgactatttctaaagcacctgctacacagcaggctgtacacagcagatcagtactgttcaacagaacttcctgagatgatggaaatgttctacctctgcactcactgtccagtacattagacactaggcacattggctgttaatcacttggaatgtgtttagcttgactgaggaattaaattttgattgtaaatttaaatcgccacacatggctagtggctactgtattggagtgcacagctctagatggctcctagattattgagagccttcaaaacaaatcaacctagttctatagatgaagacataaaagacactggtaaacaccaaggtaaaagggcccccaaggtggtcatgactggtctcatttgcagaagtctaagaatgtacctttttctggccgggcgtggtagctcatgcctgtaatcccagcactttgggaggctga

SEQ ID NO: 221014 - DNA, 1000 bp, Homo Sapiens
ccgccctcatctgcggcttcatcattaagctgaggaactgcctgcatgacgacggcttcctgcgccagctctacaccatcgggctgctggcccagttcgagagcctgctgagcacctacggggaggagctggcaatgctggaggacatgagccttgggatcatggacttgaggaacgtgaccttcaaagtcactcaggccacttccagcgcctccgcagacatgctgcccgtcatcacaggaaatcgcgacgggtttaacgtgcgggtccctctgccgggcccgctgtttgacgccttgccccgggagatccagagtggcatgctgctgcgagtgcagcccgtcctcttcaacgtgggcatcaatgagcagcagacactggccgagaggtttggcgatacgtctttacaagaagtcatcaacgtggagagtttggtgcggttaaattcctactttgagcagtttaaggaagttttgcctgaggattgcctgcctcggtctcgcagtcagacgtgcctgccagagctgctgcggtttctgggtcagaacgtgcatgcccggaagaataagaacgtcgacattctctggcaagctgctgagatctgccgccgccttaatggggtccggttcaccagctgcaagagcgctaaggaccgtacagccatgtcggtgacactggagcagtgcctgatcctgcaacacgagcatggcatggccccgcaggtcttcacccaggccctggagtgcatgcgcagcattggaacacgggaggtagtcacccagaaaaacttgagcggcctggtgcccatccgagacttaaggctagaccccagcctcctctgttccatccctttattagctctgagccccaatttactgattgtgtggctctttctgagcatagcatacctggtgaccaaattgcgttgcaaatgaatatcattatgaaaaattaataagtcacaagaaaaacaaaagtgccagaagatgtccagccaccg

SEQ ID NO: 221015 - DNA, 1000 bp, Homo Sapiens
agcagctctttgcccatctctttggacagtggccaccctgcacaatggggccgacgaggcctagggccctcctacctgcttacaatttggaaaagtgtggccgggtgcggtggctcacgcctgtaatcccagcactttgggaggccaaggcaggaggatcgctggagcccagtaggtcaagaccagccagggcaacatgatgagaccctgtctctgccaaaaaattttttaaactattagcctggcgtggtagcgcacgcctgtggtcccagctgctggggaggctgaagtaggaggatcatttatgcttgggaggtcgaggctgcagtgagtcatgattgtatgactgcactccagcctgggtgacagagcaagaccctgtttcaaaaagaaaaaccctgggaaaagtgaagtatggctgtaagtctcatggttcagtcctagcaagaagcgagaattctgagatcctccagaaagtcgagcagcacccacctccaacctcgggccagtgtcttcaggctttactggggacctgcgagctggcctaatgtggtggcctgcaagccaggccatccctgggcgccacagacgagctccgagccaggtcaggcttcggaggccacaagctcagcctcaggcccaggcactgattgtggcagaggggccactacccaaggtctagctaggcccaagacctagttacccagacagtgagaagcccctggaaggcagaaaagttgggagcatggcagacagggaagggaaacattttcagggaaaagacatgtatcacatgtcttcagaagcaagtcaggtttcatgtaaccgagtgtcctcttgcgtgtccaaaagtagcccagggctgtagcacaggcttcacagtgattttgtgttcagccgtgagtcacactacatgcccccgtgaagctgggcattggtgacgtccaggttgtccttgagtaataaaaacgtatgttgcaataaaaaaaaaaaaaaaaaa

SEQ ID NO: 221016 - DNA, 1000 bp, Homo Sapiens
caatcctcccacctcagactcccaaagtgctggaattacagttgggagccactgtgcctggcctggaagactttcaacttgtgtctcagtgcagttcttgactcacctctctgggcctcaggttctacaaatgccagacacctagcgaagagctctgcaggctttccactgcctgtattggaaatcttgcaattcacataattattcagtcactgcctggtacctttatcttcccatcccactaatgttagtgttttttaatggagcttttattctgagaatatgtgtttgtctgtttgtttgttttttgagacagagtctcactttgtcacccaggctggagtgcagtggcacgatctcagctcactgcaagctctgcctctcaggttcaagtgattctcctgcctcagcctcctgagtagatgggactgtaggcacctgccactatgcctggctaatttttgtgtttttagtagagacagggtttcaccatattggccaggctggtctcgaactactgacctcgtgatctgcccgccttggcctatcaaagtgttgggattacaggcttgagccaccgcacccggccgagaatatgtgttgttatttatgactggattatgaagaatcaggagaatgcatttcatgtctgattctgctgctaattaagtcaatcatttaatttttgggacctcagtttctttgtaagtaaaataacacctgcttgttcttcatccctgggctgttgggaggaacagatgagacagtggctatagaagcacttggaaaatgcacttgtcctgttttgtaaaataaaaaggtattaaatgtgtatttctgccatgtacctaatgattattcagtgcgtatatatctgaaaagtcatgttgcaaatctttctgtgaaacagatgctattttaaattcactgggagaaatatcctatttaaagtaatctatagtaatttctttttatataataaaaatatatttgtaaagtc

SEQ ID NO: 221017 - DNA, 1000 bp, Homo Sapiens
tgggcatcgaggactactcggtcagccagaccacactggacaatgtgttcgtgaactttgccaagaagcagagtgacaacctggagcagcaggagacggagccgccatccgcactgcagtcccctctcggctgcttgctcagcctgctccggccccggtctgcccccacggagctccgggcacttgtggcagacgagcccgaggacctggacacggaggacgagggcctcatcagcttcgaggaggagcgggcccagctgtccttcaacacggacacgctctgctgaccacccagagctgggccagggaggacacgctccactgaccacccagagctgggccagggactcaacaatggggacagaagtcccccagtgcctgccagggcctggagtggaggttcaggaccaaggggcttctggtcctccagcccctgtactcggccatgccctgcggtcactgcggttgccgcccctaattgtgccaaaggctgacccggcccgggctgcgtacacccttgccctgctttgccttaaagcctcggggtctgcccggcccctcgcccctgcctggcactgctcaccgcccaaggcgacgccggctggaccaggcactgctggcctttctcctgcccggcctcggaaccagcttttctctcttacgatgaaggctgatgccgagagcgggctgtgggcggagctgggtcagtcccgtatttattttgctttgagaagaggctcctctggccctgctctcctgcagggaggtggctgtcccgcgggaagccatcagcttgggccagctggcaggtggcaggaatggagaagctgaccctgctggccaggcaaggggccagaccccccccaacccccagctgccatcgctctcccacccagcttggccccctgcccgcccacctccctgggagccgggcctgtacatagcgcacagatgtttgttttaaataaataaacaaaatgtcaaaaaaaaaaaaaaaaaa

SEQ ID NO: 221018 - DNA, 1000 bp, Homo Sapiens
cctcatgactcgtcttgtattttgcctttctgatacccatcagaactgctgctgctctaacttatactctttaccttgcccagatctccgcgtaaggaatgctttatgatcaacttgccataggactgatggattaaccagtgttcggctttatttgaagtctatgccctgcacagctcttgtatgtattttagatgctagaagtttttttagcatgtgatgtgtgattcttgtttgaattctaggtaccttgtgaattccagaaaaagagactgtgcttcacgattgttagtcccatgaacttgcactatctatctttcatggtgatgttttgaaaatacaatcaggaaaaaacccaacacctttggaatttaaaatagaatcatatcatgaaatttaaaaagaatctcttctgttgcatttcctcacccctaagtaacagctacatttaagtaaaatgcaggtggtaggggaaaaaaaaccatggcgagatggtggtttagtggaataaactgattactggtttttttgtttttttttttttttttaaagaaagaagcttcatcacagatactttccagtttctcttttatacttttttgaaagattactttttaggaacatttggtatgatatgcataaaattatttatccatttatgggcaaaatgatacaagtagcatcttgattgaacatcatttacctcagatattcaaccagcagtacgttttttatgcagtctcaacccatatcccatttgttacctctcagaatattggtaagcagttattttcgctttactctgtatttcttgtgttttgggcacaggttattgtactactgtcaaatcgtacttgctattttttctgcaagtatttaacagaaagcttaaaatccccataaaaccccaccttggataagtgattgttaaatattgtacaaataaaatgtatgctatccccattccatccccaagttaaataaaaaaatgaatacggta

SEQ ID NO: 221019 - DNA, 1000 bp, Homo Sapiens
cagtgttggcgagaggaggggcccgttgtctccctggccctcaaggctcccacagtgactcgggctcctgtgcccttattcaggaaaagcctctgtgtcactggctgcctccactcccacttccctgacactgcggggcttggctgagagagtggcattggcagcaggtgctgctaccctccctgctgtcccctcttgccccaacccccagcacccgggctcagggaccacagcaaggcacctgcaggttgggccatactggcctcgcctggcctgaggtctcgctgatgctgggctgggtgcgaccccatctgcccaggacggggccggccaggtgggcgggcagcacagcaaggaggctggctggggcctatcagtgtgccccccatcctggcccatcagtgtacccccgcccagactggccagccccacagcccacgtcctgtcagtgccgccgcctcgcccaccgcatgccccctgtgccagtgctctgcctgtgtgtgtgcactcgtgtcgcgccttctcccccccggggctgggttggcgcaccctcccctcccgtctactcattccccggggcgtttctttgccgatttttgaatgtgattttaaagagtgaaaaatgagactatgcgtttttataaaaaatggtgcctgattcggctgtctcagactctttttgtacctggtgaccccttttcagcttctgctgggctggggcctgatggggagggtctcggtggtaccaggtctcctccaccgccatggcttccaaggtggtctgctcgggcccaggccatcttccaggtggggtgaggcagtgggtcccacttcccctcctacccctcccagctgacagtcctctccacctagtggctgtccagtgcccattcctcaccttttcccggggaggagagagcagcttctgccacttcccaggtaagcaggaggaggtgccaacagtgttaggcctggcacagtgtctgggtgatcgggacct

SEQ ID NO: 221020 - DNA, 1000 bp, Homo Sapiens; identical to SEQ ID NO: 115629

SEQ ID NO: 221021 - DNA, 1000 bp, Homo Sapiens
cgaaagctgccctggccgccttcaacgctcagaacaacggctccaattttcagctggaggaaatttcccgggctcagcttgtgcccctcccaccttctacctatgtggagtttacagtgtctggcactgactgtgttgctaaagaggccacagaggcagccaagtgtaacctgctggcagaaaagcaatatggcttttgtaaggcaacactcagtgagaagcttggtggggcagaggttgcagtgacctgcacggtgttccaaacacagcccgtgacctcacagccccaaccagaaggtgccaatgaagcagtccccacccccgtggtggacccagatgcacctccgtcccctccacttggcgcacctggactccctccagctggctcacccccagactcccatgtgttactggcagctcctccaggacaccagttgcaccgggcgcactacgacctgcgccacaccttcatgggtgtggtctcattggggtcaccctcaggagaagtgtcgcacccccggaaaacacgcacagtggtgcagcctagtgttggtgctgctgctgggccagtggttcctccatgtccggggaggatcagacacttcaaggtctaggctagacatggcagagatgaggaggtttggcacagaaaacatagccaccattttgtccaagcctgggcatgggtggggggccttgtctgctggccacgcaagtgtcacatgcgatctacattaatatcaagtcttgactccctacttcccgtcattcctcacaggacagaagcagagtgggtggtggttatgtttgacagaaggcattaggttgacaacttgtcatgattttgacggtaagccaccatgattgtgttctctgcctctggttgaccttacaaaaaccattggaactgtgactttgaaaggtgctcttgctaagcttatatgtgcctgttaatgaaagtgcctgaaagaccttccttaataaagaaggttctaagctg

SEQ ID NO: 221022 - DNA, 1000 bp, Homo Sapiens; identical to SEQ ID NO: 115631

SEQ ID NO: 221023 - DNA, 1000 bp, Homo Sapiens
tgacagtgagcacgctggtgctgggagagggcgctacagaggcggagatcagcatgaccagcactcgttggcggaaaggtgtctgtgaggagacgtctggagcttatgagaaaacagatactgatgggaagtttctctatcacaaatccaaatggaacataaccatggagtcctatgtggtccacaccaactatgatgagtatgccattttcctgaccaagaaattcagccgccatcatggacccaccattactgccaagctctacgggcgggcgccgcagctgagggaaactctcctgcaggacttcagagtggttgcccagggtgtgggcatccctgaggactccatcttcaccatggctgaccgaggtgaatgtgtccctggggagcaggaaccagagcccatcttaatcccgagagtccggagggctgtgctaccccaagaagaggaaggatcagggggtgggcaactggtaactgaagtcaccaagaaagaagattcctgccagctgggctactcggccggtccctgcatgggaatgaccagcaggtatttctataatggtacatccatggcctgtgagactttccagtacggcggctgcatgggcaacggtaacaacttcgtcacagaaaaggagtgtctgcagacctgccgaactgtggcggcctgcaatctccccatagtccggggcccctgccgagccttcatccagctctgggcatttgatgctgtcaaggggaagtgcgtcctcttcccctacgggggctgccagggcaacgggaacaagttctactcagagaaggagtgcagagagtactgcggtgtccctggtgatggtgatgaggagctgctgcgcttctccaactgacaactggccggtctgcaagtcagaggatggccagtgtctgtcccggggtcctgtggcaggcagcgccaagcaacctgggtccaaataaaaactaaattgtaaactcctgaaaaaaaaaaaaaaaaaaa

SEQ ID NO: 221024 - DNA, 1000 bp, Homo Sapiens
ccgacatccactggggcatccgggtgctacagccacccccagagcaagagaatgtgcagtatgctggccttgactttgaagcaatcctgctgcagcctggcagccctccagataagacccaagtgcccatggtggtcatgccccacggggggccccattcatcctttgtcactgcctggatgctgttcccagccatgctttgcaagatgggctttgcggtactactagtgaactatcgtggctccacgggctttggccaggacagcatcctctccctcccaggcaatgtgggccaccaggatgtgaaggatgtccagtttgcagtggaacaggtgctccaggaggaacactttgatgcaagccatgtggcccttatgggtggttcccatggtggcttcatttcctgccacttgattggtcagtacccagagacctacagggcctgcgtggcccggaaccccgtgatcaacatcgcctccatgttgggctccactgacatccctgactggtgcgtggtggaggctggctttcctttcagcagtgactgcctgccagacctcagcgtgtgggctgagatgctggacaaatcgcccatcagatacatccctcaggtgaagacaccactgttactgatgttgggccaggaggaccggcgtgtgcccttcaagcagggcatggagtattaccgtgccctcaagacccggaatgtgcctgttcggctcctgctctatcccaaaagcacccacgcattatcagaggtggaggtggagtcagacagcttcatgaatgctgtgctctggctacgcacacacttgggcagctgaagccctgccattctgcatgagctgatcagcctgtgccacacttcgctcttgaggagctcaacggtctggcagggcagcaggaggctttctgggctctggactccacggatgcgtgggcagaggaatgtgggctatgtagtcataataaattaggacacaaaaaaaaaaaaaaaaaa

SEQ ID NO: 221025 - DNA, 464 bp, Homo Sapiens
ctccccagcctgataaaggtcctgcgggcaggacaggacctcccaaccaagccctccagcaaggattcagagtgcccctccggcctcgccatgaggctcttcctgtcgctcccggtcctggtggtggttctgtcgatcgtcttggaaggcccagccccagcccaggggaccccagacgtctccagtgccttggataagctgaaggagtttggaaacacactggaggacaaggctcgggaactcatcagccgcatcaaacagagtgaactttctgccaagatgcgggagtggttttcagagacatttcagaaagtgaaggagaaactcaagattgactcatgaggacctgaagggtgacatcccaggaggggcctctgaaatttcccacaccccagcgcctgtgctgaggactccctccatgtggccccaggtgccaccaataaaaatcctacagaaaattcaaa

SEQ ID NO: 221026 - DNA, 1000 bp, Homo Sapiens
ttattcccataaaagaagttttccagtggaatggagatttcattttgtcagcagcagtgaccacagccttaccaaagcagacgcgtgcgcgtgcacagatgcacacacacagatgtcttaaaagactagaatccacacttcctgagccagaggggccgtgttgacggtaatgcattctctatagagccaagtccaaactggcaagctcaatgatgcaggcaataaaccgcctttttggcagcctaccaatgccaaaaggataaatgtctttccaaaagtgtgtattcctgttaaattaagctcttgctaacttgaaaaatccctgttctgccagcgaagcttcctcctcctctccagctggtagtcacttgcgtgaatgctggtcagtctgaaaaggtgaagctggctgtgcacttacccccatctttctccctcggggagacgacccaaggaatttcagagtattttgtttggcagagcttttacctgttattctttgccctcaaatacagtattgtggtcattttgatgatatgtgtgtaaaatgtgaataatccaattggtgtctgtactcagccttttgatgtctttttaggactttctcttctacacagcaatacgtcgtgctcgagtatccttgtagcaaagcacatagagccagctgtcctgtcagttcccctgtttgcctctgaaacgtctggttagtggggacccaaagattctagtgagtcaacatccataactctgtatctagttgtattattcatagaaaatcaatctggtgctaatggttggccctggtgttgttgggtggcagctgctccttcgccctcttgtagtgtggctgtggagggctctgcctatggggggtggcctgtggcttgtatccttcagtccaccacagcaaatgtgtgtagatttcatgctcgacacttaccactcacctatcaacagatcatcctgcttgactgtaacaaaataaatagtgtctcttcaagtg

SEQ ID NO: 221027 - DNA, 1000 bp, Homo Sapiens
ccggccccgcgcccggccgcccgccccctatatagcgcgccccagcagggcccgcgccaggccgccagcctcggagtgggcgcgggacagtgcgcggcgccccgcagccaggcccccgcccccgccgcatccacctcctccgccgcctgcgacccaacgggcgccccccgccggcagctcgcgccgggcccccgcggccaccatgaagaaggaggtgtgctccgtggccttcctcaaggccgtgttcgcagagttcttggccaccctcatcttcgtcttctttggcctgggctcggccctcaagtggccgtcggcgctgcctaccatcctgcagatcgcgctggcgtttggcctggccataggcacgctggcccaggccctgggacccgtgagcggcggccacatcaaccccgccatcaccctggccctcttggtgggcaaccagatctcgctgctccgggctttcttctacgtggcggcccagctggtgggcgccattgccggggctggcatcctctacggtgtggcaccgctcaatgcccggggcaatctggccgtcaacgcgctcaacaacaacacaacgcagggccaggccatggtggtggagctgattctgaccttccagctggcactctgcatcttcgcctccactgactcccgccgcaccagccctgtgggctccccagccctgtccattggcctgtctgtcaccctgggccaccttgtcggaatctacttcactggctgctccatgaacccagcccgctcttttggccctgcggtggtcatgaatcggttcagccccgctcactgggttttctgggtagggcccatcgtgggggcggtcctggctgccatcctttacttctacctgctcttccccaactccctgagcctgagtgagcgtgtggccatcatcaaaggcacgtatgagcctgacgaggactgggaggagcagcgggaagagcggaagaagaccatggagctgaccacccgctga

SEQ ID NO: 221028 - DNA, 1000 bp, Homo Sapiens
ggccattatgctgctggattggacctcaatgacacctactctgggaagcgtgaaccattttctggggaccacagtgctgatggatttgaggttacctcaagaagtgagatgtcttcagggagtgagatttcccctgtgagtgaaatgccttctagtagtgaaccgtcctcgggagccgactatgactactcagaagagtatgataacgaaccacaaatacctggctatattgtcgatgattcagtcagagttgaacaggtagttaagcccccccaaaacaagacggaaagtgaaaatacttcagataaacccaaaagaaagaaaaagggaggcaaaaatggaaaaaatagaagaaacagaaagaagaaaaatccatgtaatgcagaatttcaaaatttctgcattcacggagaatgcaaatatatagagcacctggaagcagtaacatgcaaatgtcagcaagaatatttcggtgaacggtgtggggaaaagtccatgaaaactcacagcatgattgacagtagtttatcaaaaattgcattagcagccatagctgcctttatgtctgctgtgatcctcacagctgttgctgttattacagtccagcttagaagacaatacgtcaggaaatatgaaggagaagctgaggaacgaaagaaacttcgacaagagaatggaaatgtacatgctatagcataactgaagataaaattacaggatatcacattggagtcactgccaagtcatagccataaatgatgagtcggtcctctttccagtggatcataagacaatggaccctttttgttatgatggttttaaactttcaattgtcactttttatgctatttctgtatataaaggtgcacgaaggtaaaaagtattttttcaagttgtaaataatttatttaatatttaatggaagtgtatttattttacagctcattaaacttttttaaccaaacagaaaaaaaaaaaaaaaaaaaaaaaaaaaaaaaaa

SEQ ID NO: 221029 - DNA, 1000 bp, Homo Sapiens
cggggcactgagcgctgctgaggtggagaagaggctggcagtccgagagctagcagccgccactctcactcatgtgcaaggctgcagcgctgtggacggtctgggcctgcagcagggccttgagcgcctctatgagatgatcctcaagaggaagaaggcagctcggggtggcaagaagagacggtgacccaagccccccctccctttcctcccacctagtaggggtctgcacacttggacagcagggtgggaccagcctgtgacctctcagtcagactggggtgcaggacctgtccacctcaatgaaggagagaggagcatggggtgtcccgttttggtgccacactggggtggggatgggagatgggatgtctttgcatatctctctcatcctctctggagaagtgggcgctgcaggactgtggagacgtaaatgtaaactgtgactctacctcgaccctgtttcttatttttcttctctggctaaaaatttttaattggatgtgtttgggggcggggggatggaagtgacttggagaatgtgtttgggatgaaataactatctccccttcctctgtcccccaactggggagtctccccaggctgcttttctaggaataccagtcacatagtttttatttttgtgtctgtgaaagtgccaagaacccctccccacatttgtagatccatgaccctttttataagctgtgtgtgtcctctgtattattgttattaactattttttagcatttgcctgtaagttattaaagactgataactgtagctcttaccttggtctggggcattttcctctccttatcttgccccagagacaattcaagatttctatatggggttgtggcgcagggggagggagatttatcttgaagctgaatttgcaaagcaagcacttataaaaattagattgtgtgttacgggatggcttgtgaaaattataggggggagtggaaaacccctcaagctaaaaaaaaaaaaaaaa

SEQ ID NO: 221030 - DNA, 1000 bp, Homo Sapiens
cggagctggaagccgagatgcccgcacaggaggatgacctggagggggtcgtggaggctgtggcctgctttgcctacacgggccgcacagcccaggagctgagcttccggcggggggacgtactgcggctgcacgagagggcctcgagcgactggtggcggggggagcacaacggcatgcggggcctcatcccccacaagtatatcacgctgcccgccgggacggagaagcaggtggtgggcgcagggctgcagactgcaggggagtctgggagcagtcccgagggcctcctggcatcggagctggtccaccggccagagccatgcacctcacctgaggccatgggaccctctggacacagacgacgctgcttggtcccagcctccccagagcaacacgtggaggtggataaggctgtggcacagaacatggactctgtgtttaaggagctcttgggaaagacctctgtccgccagggccttgggccagcatctaccacctctcccagtcctgggccccgaagcccaaaggccccgcccagcagccgcctgggcaggaacaaaggcttctcccggggccctggggccccagcctcaccctcagcttcccacccccagggcctagacacgacccccaagccacactgaggtgccgctgctggagatgcgtgcccccggcggctacccgctggaccggccactctccccagcccccttgcttctctccagccctgtccagcaagtgcagggtgcctgcacttcaccctgtgcagagaggtgggatggggccgtgcacacagggtatgcccgctccacatcctgcctgcccctcagccctggcccaggccccttgtggaggcagctgaggaaggatgctggggaaagccctcttctgcagctttgtggaaggctgatcagtggctgctgggtggcgggtacccttgctcagatgcctggcagggctgggtggcgattcataaagacctcgtgttgattccccg

SEQ ID NO: 221031 - DNA, 902 bp, Homo Sapiens; identical to SEQ ID NO: 115638

SEQ ID NO: 221032 - DNA, 1000 bp, Homo Sapiens; identical to SEQ ID NO: 115642

SEQ ID NO: 221033 - DNA, 1000 bp, Homo Sapiens
aacacattccacactttgaaatcttcgtggaacaaaagatatttgtggaaccaatctttgtggaacatattccagctttttgaatgagtgcatatccagtagtacctttaaagtaacactttgtacataacaaatactcagcaaatgtgaaactttatttgctcttacttcaaaattagtccaaaatgttggaaataaaatataagacattgatctagatatgaggtttttctccttcattctcagctgtcgaagaaatcaaagtagcatatgcacaaggttaaaaaccacatatacaaatactatagaacagcttataatgaaaaccttgcctgcctttataaaaaatgtgattatcttcttctgttaatgtcaataaaagatggtttgtcctagaaggtctataaatggtattatgttctggaggaaacctagcaaaaactttgctagtttagtacttgtctctaaattgatgttcacccatttcaatattgcacttattaatggtctttatttttctagcatagataacaattgattctttagattcatatatggaggtaattcttgctttctaaagaaaggaatatggcacattggaaccattttattcaccagtggatttacccttagagtatttttagatctgagctgatgacttgtgagagaaaaagggaacagagtaaagccatggaagccatgaacagtaagagactgccgcctggcatggtttcttcttctgcagaagatgaaactgaggagaaacaagacaacatccttcataccaggaatggtcaagataatgcaagaagaaaaaagctttcaaacaaatcagaaggcagtcaacaaacagaaagggggacattccttccctggcagttactcaaaactgaaattgcttattgtgtacaccggggcttgtacttggggaatttaataaaaatgctcattaccaagctccaaaaaaaaaaaaaaaaaaaaaaaaaaaaaaaaaaaaaaa

SEQ ID NO: 221034 - DNA, 912 bp, Homo Sapiens
acagacctgccccgccatgacccggctgacagtcctggccctgctggctggtctgctggcgtcctcgagggccggctccagcccccttttggacatcgttggcggccggaaggcgaggccccgccagttcccgttcctggcctccattcagaatcaaggcaggcacttctgcgggggtgccctgatccatgcccgcttcgtgatgaccgcggccagctgcttccaaagccagaaccccggggttagcaccgtggtgctgggtgcctatgacctgaggcggcgggagaggcagtcccgccagacgttttccatcagcagcatgagcgagaatggctacgacccccagcagaacctgaacgacctgatgctgcttcagctggaccgtgaggccaacctcaccagcagcgtgacgatactgccactgcctctgcagaacgccacggtggaagccggcaccagatgccaggtggccggctgggggagccagcgcagtggggggcgtctctcccgttttcccaggtttgtcaacgtgactgtgacccccgaggaccagtgtcgccccaacaacgtgtgcaccggtgtgctcacccgccgcggtggcatctgcaatggggacgggggcacccccctcgtctgcgagggcctggcccacggcgtggcctccttttccctggggccctgtggccgaggccctgacttcttcacccgagtggcgctcttccgagactggatcgatggtgttctcaacaacccgggaccggggccagcctaggggggcctgtgacctcccatggagcccagccccgccctccacacctccggcgctccgcacccacctcccacggccccgcccctgcccccgctccggccagaggggccctggctgtaataaagaagccgatctctcctctg

SEQ ID NO: 221035 - DNA, 1000 bp, Homo Sapiens
ctggttaaattctatggagtgtgttcaaaggaataccccatatacatagtgactgaatatataagcaatggctgcttgctgaattacctgaggagtcacggaaaaggacttgaaccttcccagctcttagaaatgtgctacgatgtctgtgaaggcatggccttcttggagagtcaccaattcatacaccgggacttggctgctcgtaactgcttggtggacagagatctctgtgtgaaagtatctgactttggaatgacaaggtatgttcttgatgaccagtatgtcagttcagtcggaacaaagtttccagtcaagtggtcagctccagaggtgtttcattacttcaaatacagcagcaagtcagacgtatgggcatttgggatcctgatgtgggaggtgttcagcctggggaagcagccctatgacttgtatgacaactcccaggtggttctgaaggtctcccagggccacaggctttaccggccccacctggcatcggacaccatctaccagatcatgtacagctgctggcacgagcttccagaaaagcgtcccacatttcagcaactcctgtcttccattgaaccacttcgggaaaaagacaagcattgaagaagaaattaggagtgctgataagaatgaatatagatgctggccagcattttcattcattttaaggaaagtagcaaggcataatgtaatttagctagtttttaatagtgttctctgtattgtctattatttagaaatgaacaaggcaggaaacaaaagattcccttgaaatttagatcaaattagtaattttgtttatgctgctcctgatataacactttccagcctatagcagaagcacattttcagactgcaatatagagactgtgttcatgtgtaaagactgagcagaactgaaaaattacttattggatattcattcttttctttatattgtcattgtcacaacaattaaatatactaccaagtacagaaatgtggaaaa

SEQ ID NO: 221036 - DNA, 1000 bp, Homo Sapiens
gacagaggtgcagggcgaggacggacaggtggtgctcatcaagcaggagaaagaccgagaagccaaattggcagagaatgcttgtaccctggctgacctgacagagggtcaggttggcaagctactcatccgcaagtctggaagggtgcaactcctcttgggcaaggtgactctggacgtgaccatgggaactgcctgctccttcctgcaggagctggtgtccgtgggccttggagacagtaggacaggggagatgacagtcctgggacacgtgaagcacaaacttgtatgttcccctgattttgaatccctcttggatcacaaacaccggtaaaatgagcaggtggaggaggacggcgcctgtgcccacggctgctgcctgctccagacattttgttcttgaatctgtgagacccagaaggggcccactgagcccactcactccagcctttggcaaccattgttccaggtcccccagggcttcctcccacagcagctgtgaatggcacagtgaccttcctgcagcgtggagatggcacatccttgctgctggggacttggccctgctatttatttttgtatttatgtcttaatctcttccactgatgcatcctccaagggtagatggggagggtctgtgtgaaggggccggcttctcttggtgcctgctgggttgcaggggcaggaagcgtgtggactgcagcttctgctggtgctccccccgtcctcctggaggcagtataggagagagagcaaggattgagtctgagacttaagcactcggtcccagcttgccagttcctggttctgtgtccttggacaaactacctaacctttctgagcctcctatacctcatccgacacaaatggggatgatacctacctccagggttggcgtgaggattcatgggctattatagatgaaaactgcacaaggccagaaccagcaggcactcaataaacgttcatgtcctttttctctaaaaaaaaaaaaaaaaaa

SEQ ID NO: 221037 - DNA, 1000 bp, Homo Sapiens
agtagggcactcctaaaacacctggaaggtatctcagatgaagacatcatcaacattactcttcctactggagtccccattcttctggaattggatgaaaacctgcgtgctgttgggcctcatcagttcctgggtgaccaagaggcgatccaagcagccattaagaaagtagaagatcaaggaaaagtgaaacaagctaaaaaatagtctttctcaactgttggctaagaagaaatgcaaaagaagtggcataggagtgtgttatgggtgctgaactctctctctttttccccgattttccagagctaggctgtggagtagagtttgtataggtaactaggtaacttattgtggcccagataaggctttaggatgcctcagtgcttatgtcatagccttatgagttagctttcttgctagccccctagtcggtcaccaaactagtaactagtggggcttaatgaaggtcataagtttctgagatgggagagcaacaagtagagatgaagttaaaggtatttatcattcaagaaatcattattgagtcaccattgacaggcactattctaatcagtagttcactttaatatttaataagattttctgggataacagtaagggatattagataatataccgtatgtatttattactagtcttttcctctaggaaaagggatactttgataattaaggccagaggcccattagttgagaaagtcacagatatatttctccaagaaagccaacaaccaccaccacaatgacagaaatgacaacaaggccctttaacttgtcttctagtttagagacatccttcatttgacatttagtagaattcctctttggccacaagaataagcagcaaataaacaactatggctgttgaggttctcattttggtttgttttaattttttgaactttgggtacctgtaattagtttaaaaataaagttcctgataataaagtgactgaaaatggcatccccaaaaaaaaaaa

SEQ ID NO: 221038 - DNA, 1000 bp, Homo Sapiens
ctagaacctataggaaactacttggagcaaactcaaaggacagattagggatcgagattgggtcaggttagcatggggttgtggttgaaatatcttggtatccaggataagggtatgtggaaaaacaggctttaggcaagtggaaaattcaaaatgtgctgtgaaaggacaatctcaggctgaaatcccataaaggaacttggagggaatattatgatggagggaagtgaggtgaatccaggcacatgatgaacacctggctcatccatagagttttcacagcctatatcgcaaattttctaagccacgtcctataggacagaggagactggccccacttctatgggtctgagctgtggaaaagggagagcagagaggaactgagatgagcagggatgaagggtcaggcagaaagcgtgatagaggagagaatttttgacaaaactcaaaagttgtttgcacagctgttctttgtaccctgttccttcctctgcgccctcctgtttctcccttgcctggaagtcattccaccctcaatttgttgatccacaagtttccagttgtcctcttctttttgttatagcatctctctatttcaaagacattcctagaagtcatccttcagtgatatcaccacttgctcagtcaccatctcaaccttatgtcacctcagccctcatctcaatgcccaaaccccttacacacaccttcagttagcttcaactgcctccgtttccacactgtgcacctttcactttccctacccagctttcctacatgctgcctctcctcagggtcccctgaatgctgcatcattgtgttcagtgcagctggactgattgcacctgtgtatttgcccctgagcactttcctttacacatgtggcttgtcttgccaatagactccaggcttacaccttccatttccatcgtattctccagtttccaggatagatgttgctcatcgtctttacctaataaataagtttgtctgattgctg

SEQ ID NO: 221039 - DNA, 1000 bp, Homo Sapiens; identical to SEQ ID NO: 115656

SEQ ID NO: 221040 - DNA, 1000 bp, Homo Sapiens
cgagacccttctccaatccaagatggcaacgaggacatgaaagctattccagaaggagagaaaattcaaggcgatggggcccaagccgcagttaagggggcacaggctgagctgatgaaggtgcaagccttagagaaagttaaaggtgcagatataaatgctgaagaggcccccaaaatggtgcccaaggcagtggaggatgggataaaggtggctgacctggaactagaggagggcctagcagaggagaagctgaagactgtggaggaggcagcagctcccagagaagggcaaggaagctctgctgtgggttttgaagttccacagcaagatgtgatcctgccagagtactaaacagcttccttcagatctggaagccaaacaccggcattttatgtactttgtccttcagcaagaaaggtgtggaagcatgatatgtactatagtgattctgtttttgaggtgcaaaaaacatacatatataccagttggtaattctaacttcaatgcatgtgactgctttatgaaaataatagtgtcttctatggcatgtaatggatacctaataccgatgagttaaatcttgcaagttaacacaacgtaacacttaaaagcatacattttcagcaaccagtggcacatatttgaagtgaatagtagcaaattgtttttgctttgaaaatctagccatcctacatcctttggatttcttcacaaggcagtaattcctttgaactactgcttagctaatactaggtagtgctaaaagacatgttcccataacttttacaacattttactttttatcattgatgtgttcaaactgtttacaaggagatgcttatagatgatagttgtacatatgtgcaaaaaaaaatccacttgcaatggtaagaaattgaagtatccttaaaggccatgaagccatatgtccctaaaaaaaaaaaaaaaaaaaaaaaaaaaaaaaaaaaaaaaaaaaaaaaaaaaaaaaaaaaaaaaa

SEQ ID NO: 221041 - DNA, 1000 bp, Homo Sapiens
tcaatgccatcctgacacactttatgcaaaaagaattttcccagataggctagccagaaaaaacttcaagtcctctgtaacatctgaggtgaccaagaggcagaagagcagagcagtcgggggccgtgtcctggctgatcccaactgcagctctgctgtgggggcccgtgggagggaggcagacccctgggctttcctgctggccacggagactctgctcctgcatggaaagggagcctgggagccagcagcccacgcctggggagcctgcctggggccatgtgaccatggcctctccctgggaacgggctgaccacaacacaccctgctgccatccacttctgtttactctgcaaatgtaagaaagaaccacttggccagaagtgtcccccagatgcttttttttttttttttttggagacagttttgctcttgtctccccggctggagtgcagtggcatgatctcaactctcaactcactgtaacctccgcctcccggatactcctgcctcagcctcctgggtagctgggattacaagcacccaaccacgcccagctaatttttgtattttcggtagagacgggatttcaccatgttggccaggctagtctcgaactcatgacctcaagtgatccgcccacttcggtctcccaaagtgctgggattacaggcatgagccacggcgcctggcccccaaatgctcttgaaccggaaacccagggatgggagatgctcactgagctgctgcttttatgtgtgctggtgctatgtgtgttcatgtccgcggcagctgtctttttgctactataagggaattctggccaccctgggtggggtgtggtcggggtgagaacccaagcgttggaactgtagacccgtcctgtcgactgtgtgcccctgggcatgtgtgagcctcagtttcctcatctgtaaggggggcaatgatacctacctcacagggggttgtgaggattaaatgtgaggaggatagtggcaac

SEQ ID NO: 221042 - DNA, 1000 bp, Homo Sapiens; identical to SEQ ID NO: 115664

SEQ ID NO: 221043 - DNA, 1000 bp, Homo Sapiens
cctcatccctggcactctagaacccggccactccaaaaacctgacctgctctgtgtcctgggcctgtgagcagggaacacccccgatcttctcctggttgtcagctgcccccacctccctgggccccaggactactcactcctcggtgctcataatcaccccacggccccaggaccacggcaccaacctgacctgtcaggtgaagttcgctggagctggtgtgactacggagagaaccatccagctcaacgtcacctatgttccacagaacccaacaactggtatctttccaggagatggctcagggaaacaagagaccagagcaggagtggttcatggggccattggaggagctggtgttacagccctgctcgctctttgtctctgcctcatcttcttcatagtgaagacccacaggaggaaagcagccaggacagcagtgggcaggaatgacacccaccctaccacagggtcagcctccccgaaacaccagaagaagtccaagttacatggccccactgaaacctcaagctgttcaggtgccgcccctactgtggagatggatgaggagctgcattatgcttccctcaactttcatgggatgaatccttccaaggacacctccaccgaatactcagaggtcaggacccagtgaggaacccacaagagcatcaggctcagctagaagatccacatcctctacaggtcggggaccaaaggctgattcttggagatttaacaccccacaggcaatgggtttatagacattatgtgagtttcctgctatattaacatcatcttagactttgcaagcagagagtcgtggaatcaaatctgtgctctttcatttgctaagtgtatgatgtcacacaagctccttaaccttccatgtctccattttcttctctgtgaagtaggtataagaagtcctatctcatagggatgctgtgagcattaaataaaggtacacatggaaaacaccagaaaaaaaaaaaaaaaa

SEQ ID NO: 221044 - DNA, 1000 bp, Homo Sapiens
aagtgacctttacaagaccccctgcaccaagagatttgagatgactcttccattccagcagtttgaaatccagggtattggaaactatcaacaatgccatcaaagcatcctggagctcttcaacaccagttactgcccttactcccagtgtgccttcaatgggattttcttgccaccactccagggggattttggggcattttcagctttttactttgtgatgaagtttttaaacttgacatcagagaaagtctctcaggaaaaggtgactgagatgatgaaaaagttctgtgctcagccttgggaggagataaaaacatcttacgctggagtaaaggagaagtacctgagtgaatactgcttttctggtacctacattctctccctccttctgcaaggctatcatttcacagctgattcctgggagcacatccatttcattggcaagatccagggcagcgacgccggctggactttgggctacatgctgaacctgaccaacatgatcccagctgagcaaccattgtccacacctctctcccactccacctatgtcttcctcatggttctattctccctggtccttttcacagtggccatcataggcttgcttatctttcacaagccttcatatttctggaaagatatggtatagcaaaagcagctgaaatatgctggctggagtgaggaaaaaaatcgtccagggagcattttcctccatcgcagtgttcaaggccatccttccctgtctgccagggccagtcttgacgagtgtgaagcttccttggcttttactgaagcctttcttttggaggtattcaatatcctttgcctcaaggacttcggcagatactgtctctttcatgagtttttcccagctacacctttctcctttgtactttgtgcttgtataggttttaaagacctgacacctttcataatctttgctttataaaagaacaatattgactttgtctagaaaaaaaaaaaaaaaaaaaaa

SEQ ID NO: 221045 - DNA, 1000 bp, Homo Sapiens; identical to SEQ ID NO: 115668

SEQ ID NO: 221046 - DNA, 1000 bp, Homo Sapiens
tgactattatagaatggaactcaaggaaatctgtgtcagtggatgctgctctgtggtccgaagtcttccatagagactttgtgaaaaaaaattttatagtgtcttgggaattttcttccaaacagaactatggaaaaaaaggaagaaattccaggaaaatctgcactgtgggcttttattgccatgagctagaagcatcacaggttgaccaataaccatgcccaagaatgagaagaatgactatgcaacctttggatgcactttatattattttgaatccagaaataatgaaataactaggcgtggacttactatttattgctgaatgactaccaacagtgagagcccttcatgcatttgcactactggaaggagttagatgttggtactagatactgaatgtaaacaaaggaattatggctggtaacataggtttttagtctaattgaatcccttaaactcagggagcatttataaatggacaaatgcttatgaaactaagatttgtaatatttctctctttttagagaaatttgccaatttactttgttatttttccccaaaaagaatgggatgatcgtgtatttatttttttacttcctcagctgtagacaggtccttttcgatggtacatatttctttgcctttataatcttttatacagtgtcttacagagaaaagacataagcaaagactatgaggaatatttgcaagacatagaatagtgttggaaaatgtgcaatatgtgatgtggcaaatctctattaggaaatattctgtaatcttcagacctagaataatactagtcttataataggtttgtgactttcctaaatcaattctattacgtgcaatacttcaatacttcatttaaaatatttttatgtgcaataaaatgtatttgtttgtattttgtgttcagtacaattataagctgtttttatatatgtgaaataaaagtagaataaacacaaaaaaaaaaaaaaaaaaaaaaaaaaaa

SEQ ID NO: 221047 - DNA, 1000 bp, Homo Sapiens; identical to SEQ ID NO: 115670

SEQ ID NO: 221048 - DNA, 1000 bp, Homo Sapiens
ccttaaggggaggaggacggattgattccacattccacttcctagatctagtttagaaaacatgttccccatctggtgctcttaggaaggagtatagtaaatgcctcatttaataacatactcctttttgaaagttgccttttctctccacccttgagtagatccagtatttgatgaaactcatgaaagtgggtggagcccatcttgcccctcctcttttctaggacgcactatatgtgactgtgactttcaaggacatttgtttgccatttgctgatttttttgggaagttaatttctaacttctttcactgataaatgaagaaaagtattgcacctttgaaatgcaccaaatgaattgagtttgtaattaaaaaaatttttttccctttcagtcattgtcttatatgcttagcatagatttgcagctcagtagtatatggtgttcctagaatgcagctgaagacctgttatgtagaggaaatacgaggggtggtgctagaagacagacatctgtggaatgattcacatcctctcaagttaggaggatggaggcctgcttcattaagaagctgggggtagggtgggggtggggagaacacttaacaacatggggaccagtcaggggaatccccttatttctgttttgcatatgaggaaccctagagcagccaggtgaggctctctagtttaataaaaatcatggaaagactcttaatgcagactcttcttaagtgttaatagggattttttcagcttattttggttgcagtttccaatttttaaaaatgttgaggtaatctttcccaccttcccaaacctaattcttgtagatgcattagtgttgaaccaatgctttctcatgtctcaattctttgtatatgcattcttttcagatgtattaaacaaacaaaaacccttcaaaaaaaaaaaaaaaaaaaaaaaaaaaaaaaaaaaaaaaaaaaaaaaaaaaaaaaaaaaaaaaaaaaaaaaaaaaaaaa

SEQ ID NO: 221049 - DNA, 1000 bp, Homo Sapiens
gttacacttgaattttacagtacagaagcactgggattttatgtgcctttttgtacctttttcagattggaattagttttctgtttaaggctttaatggtactgatttctgaaacgataagtaaaagacaaaatattttgtggtgggagcagtaagttaaaccatgatatgcttcaacacgcttttgttacattgcatttgcttttattaaaatacaaaattaaacaaacaaaaaaactcatggagcgattttattatcttgggggatgagaccatgagattggaaaatgtacattacttctagttttagactttagtttgttttttttttttcactaaaatcttaaaacttactcagctggttgcaaataaagggagttttcatatcaccaatttgtagcaaaattgaattttttcataaactagaatgttagacacattttggtcttaatccatgtacacttttttatttctgtatttttccacttcactgtaaaaatagtatgtgtacataatgttttattggcatagtctatggagaagtgcagaaacttcagaacatgtgtatgtattatttggactatggattcaggttttttgcatgtttatatctttcgttatggataaagtatttacaaaacagtgacatttgattcaattgttgagctgtagttagaatactcaatttttaatttttttaatttttttattttttattttctttttggtttggggagggagaaaagttcttagcacaaatgttttacataatttgtaccaaaaaaaaaaaaaaggaaaggaaagaaaggggtggcctgacactggtggcactactaagtgtgtgttttttaaaaaaaaaaatggaaaaaaaaaagcttttaaactggagagacttctgacaacagctttgcctctgtattgtgtaccagaatataaatgatacacctctgaccccagcgttctgaataaaatgctaattttggaaaaaaaaaaaaaaaaa

SEQ ID NO: 221050 - DNA, 1000 bp, Homo Sapiens; identical to SEQ ID NO: 115672

SEQ ID NO: 221051 - DNA, 1000 bp, Homo Sapiens
agaatccatcacaaactagtattgccctccaacacaccaaatgttcgcaggaccaagagaacacgtttgaaacctttggagtactggcgaggagagcgaatagattatcaaggaaggccatcaggaggattcgtgattagtggagtactatctccagacacaatatcgtctaaaaggaaggcaaaagaaaatattggaaaagtcaacaaaaaatctaataagaaaaggatctgtcttgataacgatgaaagaaagactaacttaatggtaaatctaggtatacctcttggagatcctttgcagccaacgagggtaaaggacccagaaacaagagagattattctcatggatcttgtaaggccacaagatacatatcaattttttgttaagcatggtgagttgaaggtatacaagacattggatacaccctttttttctactgggaaattgatattaggaccacaagaagaaaagggaaagcagcatgttggccaggatatattggttttttatgttaactttggtgaccttttgtgtactttacatgaaacaccttatatattaagtactggggattcgttctatgttccttcaggtaactattataacatcaaaaatctccggaatgaggaaagtgttcttctttttactcagataaaaagatgaaagatcaaccaaccttaaatatatgtatgtatatatgtatatgtgaaaaacagtttgtatagttggaatatttgtctttgtaattacttgtgatgttttaaaataaaaattttattcagttttctgtagacttgtatttgataaacatttctaactcacatgttttttctgatttttcagtgactgtacataatagcttgtagcgatgtccatatttatgatattatttttataatttgacaagaatatgaaaatgaaatatagaacatttctgtgtcaaaagagacctgattaatatgtctactcattaaaaaacatcttttccaaatactaa

SEQ ID NO: 221052 - DNA, 1000 bp, Homo Sapiens
tgatatcagaacatactgatcctcagccttcaaataaacccttaacttgtggaggtggcagcggcattgtacaaaacacaaaagctcttattttgaaaagtgaacatataaggctagaaaaagaaatttctaagttaaagcagcaaaatgaacagctaataaaacaaaagaatgaattgttaagcaataatcagcatctttccaatgaggtcaaaacttggaaggaaagaacccttaaaagagaggctcacaaacaagtaacttgtgagaattctccaaagtctcctaaagtgactggaacagcttctaaaaagaaacaaattacaccctctcaatgcaaggaacggaatttacaagatcctgtgccaaaggaatcaccaaaatcttgtttttttgatagccgatcaaagtctttaccatcacctcatccagttcgctattttgataactcaagtttaggcctttgtccagaggtgcaaaatgcaggagcagagagtgtggattctcagccaggtccttggcacgcctcctcaggcaaggatgtgcctgagtgcaaaactcagtagactcctctttgtcacttctctggagatccagcattccttatttggaaatgactttgtttatgtgtctatccctggtaatgatgttgtagtgcagcttaatttcaattcagtctttactttgccactagagttgaaagataagggaacaggaaatgaatgcattgtggtaatttagaatggtgatagcaataccttcttcttgcatatggtaatacttttaaaagttgaattgttttatttatttgtatattttgtaaagaataaagttattgaaagaaatgtaaagttatctacatgacttagcatattccaaagcataatacatacattaatataaaacatcattttattaacaaaattgtaaatgtttttaataccttacacattcaataaatgtttagtagttctgaatcaccaaaaaaaaaaaaaaaaaa

SEQ ID NO: 221053 - DNA, 1000 bp, Homo Sapiens
cctgccataagcgtgctttcattttcaagtagcatatgcaagagtccaaacaggctacccaatgttactacttatttttcctctcaggtcttatcagatacggctgtggagaggatgaggcatatgcgttgtcagttggaatccctccaaatggattgcaagagaaatactaaattgattctaaatctgttccattatcttctctgtaggatgcaaaacatccagttgtaatgtataagcatgcacttcatactagcaatcacagcacaggaggacagcattaaattttatatagccaatttgggcactgggcatctttgtatttgaacttaacgacacatttactcttttagtcaggatttcggtcttttctgcgggaaggaattaagctatgtattaggtccaccatacgatctgtgtaagtaagattatcccacttgccctttctctttagtctttgtcccttccttttcactaagtgcccctcatccttttcaatctcattgtcactggatagtgctgtatcacttaggtgtgcattcggctgcaaataacagaaaacccagcaaacactgaagggctggataagaaccctgagagggggtactccaggactgtctccataacatcattgggatccccatcccgttgctatttctttttcaccgtttttaccttttgtcctctggcttattgcctcagagttgcaagatggttcctgaactgtcaggtatcatgtctgctttctaagtgggaagaggaagggagaggcaagcaactaggtacaatgtctatcaggaaagcaaagcttccccagagacgctcagcttgtatccattgactggaagtctgtcacgtggctccccctagccgcacactagtgtgggaaggaaaatattgagctaggcacattactctctgaacgaaattcatattatcttattaaggaagagtgttggtcttcaggaggggaagtttgctgtattggatgccatcatcg

SEQ ID NO: 221054 - DNA, 1000 bp, Homo Sapiens
cccaaccaaggctgcaccttggacgccatgaaggttttctgcaacatggagactggcgagacttgcgtctaccccaatccagcaaacgttcccaagaagaactggtggagcagcaagagcaaggagaagaaacacatctggtttggagaaaccatcaatggtggcttccatttcagctatggagatgacaatctggctcccaacactgccaacgtccagatgaccttcctacgcctgctgtccacggaaggctcccagaacatcacctaccactgcaagaacagcattgcctatctggacgaagcagctggcaacctcaagaaggccctgctcatccagggctccaatgacgtggagatccgggcagagggcaatagcaggttcacgtacactgccctgaaggatggctgcacgaaacataccggtaagtggggcaagactgttatcgagtaccggtcacagaagacctcacgcctccccatcattgacattgcacccatggacataggagggcccgagcaggaattcggtgtggacatagggccggtctgcttcttgtaaaaacctgaacccagaaacaacacaatccgttgcaaacccaaaggacccaagtactttccaatctcagtcactctaggactctgcactgaatggctgacctgacctgatgtccattcatcccaccctctcacagttcggacttttctcccctctctttctaagagacctgaactgggcagactgcaaaataaaatctcggtgttctatttatttattgtcttcctgtaagaccttcgggtcaaggcagaggcaggaaactaactggtgtgagtcaaatgccccctgagtgactgcccccagcccaggccagaagacctcccttcaggtgccgggcgcaggaactgtgtgtgtcctacacaatggtgctattctgtgtcaaacacctctgtattttttaaaacatcaattgatattaaaaatgaaaagattattggaaagt

SEQ ID NO: 221055 - DNA, 1000 bp, Homo Sapiens
gcctggagctataggtctcccaggtgacccaggccctgccagctatggcagaaatggccgagacggtgagcgaggccccccaggggtggcaggaattcctggagtgcctggacccccgggacctcctgggcttcccggtttctgtgagccagcctcctgcaccatgcaggctggtcagcgagcatttaacaaagggcctgacccttgaaaggcttactgctgcatggctgtctgcatgaaccacgcctggtgaaggagcctgggtgagaaacaccatccaaagctggggcaaagatgattaccttcagcatgattacaatgtattaccttcagtatgattacagaagtcctacttgacaatcacatatagaagaacggtgctattcagtaagttctctttcctttcccttggagggaagacagcagagtcatcagttaaaaaaaaaaaaagaaaaccaaacacctcccttgaataaatttatactcctgttcccaggatcttgagctttagtgtgctatacctatgtgtcttatcgtgggccactgtgccaataaacaaaaacaactgtttggtttacctcagttgcagtagttattttcatttagaagttgttctcagattattgtttcagttatatagaggattactagactagttatgaagaaaccccactacattcaatggaattggtgcttaaaatctcatcgatgtgctgtctctggagtgataagaaagggctacatctcccgaaatgatttctttacgtcatgtattggtttccttcttcaccttgaacttttgttgaactgtatgtactttaccccaaacctgttaatattttgagcgcttctatgtgaaagcaaagaaataattttaatactctggcattcataaattttattgatgagattatttattttaaaggtttgaggtaacatctctggttgtaccaaagaagaaataaatatggtttcttaatctcttgcatgttttcttata

SEQ ID NO: 221056 - DNA, 1000 bp, Homo Sapiens
accgaatgaatttttacattcttcctgtgttcaatgttgatggatatatttggtcatggacaaagaaccgcatgtggagaaaaaatcgttccaagaaccaaaactccaaatgcatcggcactgacctcaacaggaattttaatgcttcatggaactccattcctaacaccaatgacccatgtgcagataactatcggggctctgcaccagagtccgagaaagagacgaaagctgtcactaatttcattagaagccacctgaatgaaatcaaggtttacatcaccttccattcctactcccagatgctattgtttccctatggatatacatcaaaactgccacctaaccatgaggacttggccaaagttgcaaagattggcactgatgttctatcaactcgatatgaaacccgctacatctatggcccaatagaatcaacaatttacccgatatcaggttcttctttagactgggcttatgacctgggcatcaaacacacatttgcctttgagctccgagataaaggcaaatttggttttctccttccagaatcccggataaagccaacgtgcagagagaccatgctagctgtcaaatttattgccaagtatatcctcaagcatacttcctaaagaactgccctctgtttggaataagccaattaatccttttttgtgcctttcatcagaaagtcaatcttcagttatccccaaatgcagcttctatttcacctgaatccttctcttgctcatttaagtcccatgttactgctgtttgcttttacttactttcagtagcaccataacgaagtagctttaagtgaaaccttttaactacctttctttgctccaagtgaagtttggacccagcagaaagcattattttgaaaggtgatatacagtggggcacagaaaacaaatgaaaaccctcagtttctcacagattttcaccatgtggcttcatcaatttatgtgctaatacaataaaataaaatgcactt

SEQ ID NO: 221057 - DNA, 1000 bp, Homo Sapiens
gtaacccaattgcgaatgccaccatctccgtggaaggaatagaccacgatgttacatccgcaaaggatggtgattactggagattgcttatacctggaaactataaacttacagcctcagctccaggctatctggcaataacaaagaaagtggcagttccttacagccctgctgctggggttgattttgaactggagtcattttctgaaaggaaagaagaggagaaggaagaattgatggaatggtggaaaatgatgtcagaaactttaaatttttaaaaaggcttctagttagctgctttaaatctatctatataatgtagtatgatgtaatgtggtcttttttttagattttgtgcagttaatacttaacattgatttattttttaatcatttaaatattaatcaactttccttaaaataaatagcctcttaggtaaaaatataagaacttgatatatttcattctcttatatagtattcattttcctacctatattacacaaaaaagtatagaaaagatttaagtaattttgccatcctaggcttaaatgcaatattcctggtattatttacaatgcagaattttttgagtaattctagctttcaaaaattagtgaagttcttttactgtaattggtgacaatgtcacataatgaatgctattgaaaaggttaacagatacagctcggagttgtgagcactctactgcaagacttaaatagttcagtataaattgtcgtttttttcttgtgctgactaactataagcatgatcttgttaatgcatttttgatgggaagaaaaggtacatgtttacaaagaggttttatgaaaagaataaaaattgacttcttgcttgtacatataggagcaatactattatattatgtagtccgttaacactacttaaaagtttagggttttctcttggttgtagagtggcccagaattgcattctgaatgaataaaggttaaaaaaaaatccccagtgaaaaaaaa

SEQ ID NO: 221058 - DNA, 1000 bp, Homo Sapiens
tctgtgtcttttgcaattaaattgtcagtcacttcttcaaaaccttacagtccttcctaagttactcttcatgagatttcatccatttactaatactgtatttttggtggactaggcttgcctatgtgcttatgtgtagctttttactttttatggtgctgattaatggtgatcaaggtaggaaaagttgctgttctattttctgaactctttctatactttaagatactctatttttaaaacactatctgcaaactcaggacactttaacagggcagaatactctaaaaacttgataaaatgaaatatagatttaatttatgaaccttccatcatgatgtttgtgtattgcttctttttggatcctcattctcacccatttggctaatccaggaatattgttatcccttcccattatattgaagttgagaaatgtgacagaggcatttagagtatggacttttcttttctttttctttttctttttttctttttgagatggagtcacactctccaggctggagtgcagtggcacaatctcggctcactgcaatttgcgtctcccaagttcaagcgattctcctgctttagactatggatttctttaaggaatactggtttgcagttttgttttctggactatatcagcagatggtagacagtgtttatgtagatgtgttgttgtttttatcattggattttaacttggcccgagtgaaataatcagatttttgtcattcacactctcccccagttttggaataacttggaagtaaggttcattcccttaagacgatggattctgttgaactatggggtcccacactgcactattaattccacccactgtaagggcaaggacaccattccttctacatataagaaaaaagtctctccccaagggcagcctttgttacttttaaatattttctgttattacaagtgctctaattgtgaacttttaaataaaatactattaagaggtaaaaaaaaaaaaaaa

SEQ ID NO: 221059 - DNA, 1000 bp, Homo Sapiens
gaaagtttaccctggtagttccacaccagcatcgaaactgcagcttctccataatttatcctgtggtgatcaaaatatctgatcttaccctgggacacgtaaatggtcttcagttaaagaaatcctcagcaggttgcgagggaataggagactttgtggagctgctgggaggaactggattggacccttccaagatgacgcctttagctgatctctgctacccctttcatggcccggcccagatgaaagttggctgtgacaacactgtggtgcgcatggtctccagtggaaaacacgtaaatcgtgtgacttttgagtatcgtcagctggagccgtacgagctggaaaacccaaatggaaacagtatcggggaattctgtttgtctggtctttgaataaccaacccagtgatttacatgctgatagctaagtgagtttttaatggccattgtgtatgattttgatgcacaactagttaaaagcctttcataccagtcagtattcccagccttgagcgcacgcgcgcacacacacacacacatacacacacgcattaatttttgtactttgcttcttttatgtttgtaatctgtaaatgaacacatggcagaaaataacccctgattggtaggatcatagttctaaatggaaatgtttgtaattctttgatgtgctacaaacctgaaactggtaagacaagcacaaagcaacgtgcaatacaaaaatcgtatctcaagggaaaatactcaaagaaagaaaagtggcagcacttatattagttttataacaggataaagtcttgtgtatagcaaagtagttgcatctgtttattttctatttattattgttacaataggtaatagttatagcaattatttattgatttgtaacaacttgtttttaaccaaactttgtagcatggaaaaaattttccatccacaaatacaaacatgaataaatacattcagaatgttggcaccatgaaaaaaaaaaaaaaaaa

SEQ ID NO: 221060 - DNA, 1000 bp, Homo Sapiens
gcctgacccagagctgctgcagttctgccggacacccaaccctgcccttaagaatggccagtactgggtgtgaggcctggcctgggcccagatgctgatcgggccagggacaggcttgcccatgtcccgggccccattgcttccatgcctggtgctgtctgagtatccccagagcaagagagacctggagacaccaggggtggagggtcctgggagatagtcccaggggtccgggacagagtggagtcaagagctggaacctccctcagctcactccgagcctggagaactgcaggggccaaggtggaggcaggcttaagttcagtcctcctgccctggagctggtttgggctgtcaaaaccagggtaacctcctacatgggtcatgactctgggtcctgggtctgtgaccttgggtaagtcgcgcctgacccaggctgctaagagggcaaggagaaggaagtaccctggggagggaagggacagaggaagctattcctggcttttccactccaacccaggccaccctttgtctctgccccagagttgagaaaaaaacttcctcccctggttttttagggagatggtatcccctggagtagagggcaagaggagagagcgcctccagtctagaaggcataagccaataggataatatattcagggtgcagggtgggtaggttgctctggggatgggtttatttaagggagattgcaaggaagctatttaacatggtgctgagctagccaggactgatggagcccctgggggtgtgggatggaggagggtctgcagccagttcattcccagggccccatcttgatgggccaagggctaaacatgcatgtgtcagtggctttggagcaggttaggctggggctcatcgagggtctcaggccgaggccactgcggtgccagtgcccccctgaggactagggcaggcagctgggggcacttggttccatggagcctggataaacagtgctttggaggctctgga

SEQ ID NO: 221061 - DNA, 1000 bp, Homo Sapiens
tctgttaattgtgaaagccttcataatagacttcgtttcttgcaaaactctcttggagcagttccatctcctattgattgttacctctgcaatcgaggtctgaagactctacatgtccgaatggaaaagcatttcaaaaacggaatggcagttgcccagttcctggaatctaatccttgggtagaaaaggttatttatcctgggctgccctctcatccacagcatgagttggtgaagcgtcagtgtacaggttgtacagggatggtcaccttttatattaagggcactcttcagcatgctgagattttcctcaagaacctaaagctatttactctggccgagagcttgggaggattcgaaagccttgctgagcttccggcaatcatgactcatgcatcagttcttaagaatgacagagatgtccttggaattagtgacacactgattcgactttctgtgggcttagaggatgaggaagacctactggaagatctagatcaagctttgaaggcagcacaccctccaagtggaagtcacagctagtattccagagctgctattagaagctgcttcctgtgaagatcaaatcttcctgagtaattaaatggaccaacaatgagcctttgcaaaattttcaagcggaaattttaaggcacctcattatctttcataactgtaattttcttagggatcatctctgttaaaaagttttctgtatgtcatgttataattacaggtcaattctgttaatatctttttgttaattttgctctatgtttgcctctgaaggaggtgagatttgtgctactttgggagattatgttcttttttcatgtctaagatttattttgatcatgtttataatataatggtaattcatttttgatgttttgtgaagaatttaaatttaaacgaatgttcttaaatcaagtgtgatttttttgcatatcattgaaaagaacattaaaagcaatggtttacacttaaaaaaaaaaaaaaa

SEQ ID NO: 221062 - DNA, 1000 bp, Homo Sapiens; identical to SEQ ID NO: 115684

SEQ ID NO: 221063 - DNA, 1000 bp, Homo Sapiens
ttctgcggtggttctctcatcagccagtcctgggtggtcactgctgcccactgcaatgtcagccctggccgccattttgttgtcctgggcgagtatgaccgatcatcaaacgcagagcccttgcaggttctgtccgtctctcgggccattacacaccctagctggaactctaccaccatgaacaatgacgtgacgctgctgaagctcgcctcgccagcccagtacacaacacgcatctcgccagtttgcctggcatcctcaaacgaggctctgactgaaggcctcacgtgtgtcaccaccggctggggtcgcctcagtggcgtgggcaatgtgacaccagcacatctgcagcaggtggctttgcccctggtcactgtgaatcagtgccggcagtactggggctcaagtatcactgactccatgatctgtgcaggtggcgcaggtgcctcctcgtgccagggtgactccggaggccctcttgtctgccagaagggaaacacatgggtgcttattggtattgtctcctggggcaccaaaaactgcaatgtgcgcgcacctgctgtgtatactcgagttagcaagttcagcacctggatcaaccaggtcatagcctacaactgagctcaccacaggccctccccagctcaacccattaaagacccaggccctgtcccatcatgcattcatgtctgtcttcctggctcaggagaaagaagaggctgttgagggtccgactccctacttggacttctggcacagaaggggctgagtgactccttgagtagcagtggctcttcctagagtagccatgccgaggccggggcccccacccctcctccagggcaaccccttggtcctacagcaagaagccagaactgttggaatgaatggcagccctccctggagaggcagcctgtttactgaatacagaggatacgtttacaaactgaatacgcataataaataactgcacattctccatccaaaaaaaaaaaaaaaa

SEQ ID NO: 221064 - DNA, 1000 bp, Homo Sapiens
agcgagagcatggagagggactgtgccaccttctgcgccaagaagttcgctgaccacctgcacaagttccacgagaatgacaacggggctgcggctggtgacttgtggcagtgataccccggggcctcccccgtgacagtgacggctgcgcctccaccccgactgctcagtgcatctaatcacttagactcccctgaagaatcccccatggaaactgcccttatccgctgtccagcagctgccagaggccccaggtcacctcgggtccccttgaaagaatgtctcggtcacatcaggcccgctaggtccagagagcgagcccccaatgcccggccaggctaagccgcagagaccctctcagcccccacctcaggttagggctctgcccgcagcctgacctctagccctggtggcagaggtccctcagctgcgaggctaattgggtgaccaccgattccagctgcggttaatccagcttgggcctgtctgcactgcgatcctcttgggctctcctaggatccccccatgccccgtaagaggtggaagacgcttccttccaggacagcaggctttgagtccagcacccccagcctgcctttgccaccagccccaccctgcagagtatatgaggcttgacagagtctgccccctcccccactgcaccccaagagagagagccccagccagcggaacagtttctattaccccctccctgcccccagacccatgtgatttctgctttcttctttagcaagatattctggtttctagataaggaagagtctctaatgagcccccgagccccagtctcttcagactcatggattggtctgaggggtctgaacgtctcctagccaatcagaactggctgtggaccaccctagcacggccacctctcagggccactggcaggccttcctgagttagatttgtagttgcatatttagctttgcacatttgaaataaaccacggttgcagccaaaaaaaaaaaaaaaaaaa

SEQ ID NO: 221065 - DNA, 1000 bp, Homo Sapiens
cttttaacttttttggtcttcagctaaaaaataggataagaaattaaggtctattccattctccatatcctgggtaagaatgtaaataagaggagaaggaagagtctaatagtaattatggatataaaaaataagaaattttgtatagaaatgaaggtttcataatgatcattttgttaaaggtctactttaatcagaaatagcaacgagatgaatgtatccaacatttcaatttgcattcggaaatccatgttgtttctaatattgtccagttgaaaactgtatgccaaaattagttgtttaagtgaagttttgtgacagaaaaaaggttgttttaatatctacttggtttttctcaaaatggaaataattttaaaatcaggaaagaataaatcagccaggtgtgatgacttgtaactgtaatcccagttataggggaggctgaagcaggaggatcacttgaggccaggagtttgagaccagcctgggcaacatagtgagatcccatctcaaaaaacattatttttaaaattagcctggtggctcacgcctgtaatcccagcactttgggaggccgaggtggccagatcacctgaggtcaggagttcgagaccaccctggccaacatggtgaaaccccatctctacagttttgtaaaaatacaaaaattacctgggcctggtgcacaggcctgtagtcccagctacttgggaggctgaggcaggagaattgcttgagcccaagaggtggaggttacagtgagcagagatcacaccactgcactccagcctgggtggcagagcaacacttcgtctcagaaaaaaaaaaaaaaaccaaaaaccaaaaagccaagtgtggtggtgtgcacctatagtcccagctactcaggaagctgagacaagaggatcaattgagcccaggagttcaaagctgtagtgagctgtcattgtgccactatcctccagtatgggtgacagagtgagacctggtctctaaaaat

SEQ ID NO: 221066 - DNA, 1000 bp, Homo Sapiens
cattatctcaaaactgcactgtcaagatgatgatgatctttaaaatacacactcaaatcaagaaacttaaggttacctttgttcccaaatttcatacctatcatcttaagtagggacttctgtcttcacaacagattattaccttacagaagtttgaattatccggtcgggttttattgtttaaaatcatttctgcatcagctgctgaaacaacaaataggaattgtttttatggaggctttgcatagattccctgagcaggattttaatctttttctaactggactggttcaaatgttgttctcttctttaaagggatggcaagatgtgggcagtgatgtcactagggcagggacaggataagagggattagggagagaagatagcagggcatggctgggaacccaagtccaagcataccaacacgagcaggctactgtcagctcccctcggagaagagctgttcacagccagactggcacagttttctgagaaagactattcaaacagtctcaggaaatcaaatatgcaaagcactgacttctaagtaaaaccacagcagttgaaaagactccaaagaaatgtaagggaaactgccagcaacgcaggcccccaggtgccagttatggctataggtgctacaaaaacacagcaagggtgatgggaaagcattgtaaatgtgcttttaaaaaaaaatactgatgttcctagtgaaagaggcagcttgaaactgagatgtgaacacatcagcttgccctgttaaaagatgaaaatatttgtatcacaaatcttaacttgaaggagtccttgcatcaatttttcttatttcatttctttgagtgtcttaattaaaagaatattttaacttccttggactcattttaaaaaatggaacataaaatacaatgttatgtattattattcccattctacatactatggaatttctcccagtcatttaataaatgtgccttcattttttcagaaaaaaaaaaaaaaa

SEQ ID NO: 221067 - DNA, 1000 bp, Homo Sapiens
tccagtgctggatttgatgagttaactgtgaaataccacaagcctgagaactgaattttgggacttctacccagatggaaaaataacaactatttttgttgttgttgtttgtaaatgcctcttaaattatatatttattttattctatgtatgttaatttatttagtttttaacaatctaacaataatatttcaagtgcctagactgttactttggcaatttcctggccctccactcctcatccccacaatctggcttagtgccacccacctttgccacaaagctaggatggttctgtgacccatctgtagtaatttattgtctgtctacatttctgcagatcttccgtggtcagagtgccactgcgggagctctgtatggtcaggatgtaggggttaacttggtcagagccactctatgagttggacttcagtcttgcctaggcgattttgtctaccatttgtgttttgaaagcccaaggtgctgatgtcaaagtgtaacagatatcagtgtctccccgtgtcctctccctgccaagtctcagaagaggttgggcttccatgcctgtagctttcctggtccctcacccccatggccccaggccacagcgtgggaactcactttcccttgtgtcaagacatttctctaactcctgccattcttctggtgctactccatgcaggggtcagtgcagcagaggacagtctggagaaggtattagcaaagcaaaaggctgagaaggaacagggaacattggagctgactgttcttggtaactgattacctgccaattgctaccgagaaggttggaggtggggaaggctttgtataatcccacccacctcaccaaaacgatgaaggtatgctgtcatggtcctttctggaagtttctggtgccatttctgaactgttacaacttgtatttccaaacctggttcatatttatactttgcaatccaaataaagataacccttattccataaaaaaaaaaaaaaaaaa

SEQ ID NO: 221068 - DNA, 1000 bp, Homo Sapiens
gtgtccctgctggaggccctggacaccatcctgccccccacgcgccccacggacaagcccctgcgcctgccgctgcaggacgtgtacaagattggcggcattggcacggtgcccgtgggccgggtggagaccggcatcctgcggccgggcatggtggtgacctttgcgccagtgaacatcaccactgaggtgaagtcagtggagatgcaccacgaggctctgagcgaagctctgcccggcgacaacgtcggcttcaatgtgaagaacgtgtcggtgaaggacatccggcggggcaacgtgtgtggggacagcaagtctgacccgccgcaggaggctgctcagttcacctcccaggtcatcatcctgaaccacccggggcagattagcgccggctactccccggtcatcgactgccacacagcccacatcgcctgcaagtttgcggagctgaaggagaagattgaccggcgctctggcaagaagctggaggacaaccccaagtccctgaagtctggagacgcggccatcgtggagatggtgccgggaaagcccatgtgtgtggagagcttctcccagtacccgcctctcggccgcttcgccgtgcgcgacatgaggcagacggtggccgtaggcgtcatcaagaacgtggagaagaagagcggcggcgccggcaaggtcaccaagtcggcgcagaaggcgcagaaggcgggcaagtgaagcgcgggcgcccgcggcgcgaccctccccggcggcgccgcgctccgaaccccggcccggcccccgccccgcccccgccccgcgcgccgctccggcgccccgcacccccgccaggcgcatgtctgcacctccgcttgccagaggccctcggtcagcgactggatgctcgccatcaaggtccagtggaagttcttcaagaggaaaggcgcccccgccccaggcttccgcgcccagcgctcgccacgctcagtgcccgttttaccaataaactgagcgaccccag

SEQ ID NO: 221069 - DNA, 1000 bp, Homo Sapiens; identical to SEQ ID NO: 115698

SEQ ID NO: 221070 - DNA, 1000 bp, Homo Sapiens
agagatgggaatgtaaccggcctcactctccaaatggaccgctgaagttctctgaaaaattccagctcttcactcccttttctctaggatttgaattcaggccaggccgagaatatttctacatctcctctgcaatcccagataatggaagaaggtcctgtctaaagctcaaagtctttgtgagaccaacaaatagctgtatgaaaactataggtgttcatgatcgtgttttcgatgttaacgacaaagtagaaaattcattagaaccagcagatgacaccgtacatgagtcagccgagccatcccgcggcgagaacgcggcacaaacaccaaggatacccagccgccttttggcaatcctactgttcctcctggcgatgcttttgacattatagcacagtctcctcccatcacttgtcacagaaaacatcagggtcttggaacaccagagatccacctaactgctcatcctaagaagggacttgttattgggttttggcagatgtcagatttttgttttctttctttcagcctgaattctaagcaacaacttcaggttgggggcctaaacttgttcctgcctccctcaccccaccccgccccacccccagccctggcccttggcttctctcacccctcccaaattaaatggactccagatgaaaatgccaaattgtcatagtgacaccagtggttcgtcagctcctgtgcattctcctctaagaactcacctccgttagcgcactgtgtcagcgggctatggacaaggaagaatagtggcagatgcagccagcgctggctagggctgggagggttttgctctcctatgcaatatttatgccttctcattcagaactgtaagatgatcgcgcagggcatcatgtcaccatgtcaggtccggaggggaggtattaagaatagatacgatattacaccatttcctataggagtatgtaaatgaacaggcttctaaaaggttgagacactggttttttttttt

SEQ ID NO: 221071 - DNA, 1000 bp, Homo Sapiens; identical to SEQ ID NO: 115700

SEQ ID NO: 221072 - DNA, 1000 bp, Homo Sapiens
aggaacctcccagaacaccttcaccaccactgagttctcacccagacatcgacacagacattgattcagtggcttctcagccaatggaacttccagagaatttgtcactggagcctaaagaccaggattcagtcttgctagaaaaggacaaagtaaataattcatcaagatccaagaaacccaaagggttagaactggcacccacccttgtgatcacgagcagtgatccaagcccactgggaatactgagcccatctctccctacagcttctcttacaccagcatttttttcacagacacccatcatactgactccaagccccttgctctccagtatccacttctggagtactctcagtcctgttgctcccctaagtccagccagactgcaaggtgctaacacacttttccagtttccttctgtactgaacagtcatgggccattcactctgtctgggctggatggaccttccacccctggcccattttccccagacctacagaagacataacctatgcacttgtggaatgagagaaccgaggaacgaagaaacagacattcaacatgattgcatttgaagtgagcaattgatagttctacaatgctgataatagactattgtgatttttgccattccccattgaaaacatctttttaggattctctttgaataggactcaagttggactatatgtataaaaatgccttaattggagtctaaactccacctccctctgtcttttccttttctttttctttccttccttccttttcttttctcctttaaaaatattttgagctttgtgctgaagaagtttttggtgggctttagtgactgtgctttgcaaaagcaattaagaacaaagttactccttctggctattgggaccctttggccaggaaaaattatgcttagaatctattatttaaagaaatatttgtgaaatgaaaaaaaaaaaaaaaaaaaaaaaaaaaaaaaaaaaaaaaaaaaaaaaaaaa

SEQ ID NO: 221073 - DNA, 1000 bp, Homo Sapiens
tatgggaagaacatggcctggaattggatacaactcaactgggactatctagtcaacagatatacactcaataacagaaaccttggccgaattgtcacaatagcagagccattcaacactgaactgcaactgtggcagatggagagcttttttgcaaaatatccacaagctggagcaggagaaaaacctagggaacaagtgctggaaacagtgaaaaacaatatagagtggctaaaacaacatagaaacaccatcagagaatggttttttaatttacttgagagtggttaatgtattcaaatgttagagtttaattttgtgaatctattgtttctcctctgaagcatttggtggcctaatttacaagcacgatggagagagccttataaacagataatgcttttactaagcactgtgtttatatgtcttgcaaagcctttaaattgttcctctttgtttatgaagaaagatactaatagagtacttaatatactcagggattccttctaagtgtacttcataagatattctttacaaactgaagataatgaaatagttattttaatacctttaaatatcattctttgtatcttaaatctgtgaagtagaacaatttggtcttagctttacattttcagtaccaaagaaacaccacttaatcttctctcttgattgatttttaaagtttaaataccagtacttgagggaccaatattaccatcttaatctttattttattattcagaattatacagacctaatatcattttattcacatatgtcttactactttaaatcctaccaaagtaacctgggcttaagttttacttgaggatcatatgaattagccaaaagaatggctgactgttgcctttactcttataaaatcaataagagaactctcctctttttttaaaaataaatctaaatgattatcttgaaaaagtattgttttccagtgtcacttgactcttgaataaaaataactgcagtgttcccc

SEQ ID NO: 221074 - DNA, 1000 bp, Homo Sapiens
gcgggttgggaggggcaggaggtggggtggaaatagggtgggctcctttcctcaggtagagtggggggccaaaacctctgcagtccccggcagtgagctatggactttcttccccctcacgaggctgggggcctcctgctctcgtccctggccctccctgtacagggcaaagccagtctgggctctggcacacagagttcatgtttgccgccctctccctgcccctcaccccagaggtgagaggaatgaggggcattggtggttaggccggttggctgtcttgaacagctggagggaagatgcaggggtgggaagcggccaggcagaaagagctccaggctcttgtgtcgcccacccagccctcccatactcactcctgacagctttcctgcactgcagcttcctgctcctctgactctagtgggaacaggccccagctcagcctccgcgagggaggtcacccctccacttcagcttgccctgacctccgctcgcaaaccccgagcttccaagccttttgctccagccctgcggcttccccagaagcctgggcttagggtggagatgccgcctacccgatcctggccctccacctgcctccaggccacgaaatgggaattccagcactaagccaggcaccgggcagaagctgggccttccgcctcccttggatggggtcaagaggccaggcctggcacattttggagtgtcctggctaccagctctcacacctacacccacgcaccccctcacacactatgctctctcaagaatgtaatttattggggcccccccagctgctttcctcacctgcccctgccctaccttacacccccagcttgacttctttccagtccacgtggatataatgatatctatatttttgcccaggtctgggtattgctcctgcccagaccctgacatccctttccactgtgtgtgtgaccatgctgggggagggggactctgcttggaattaaaaggttgctttgggtcccta

SEQ ID NO: 221075 - DNA, 1000 bp, Homo Sapiens; identical to SEQ ID NO: 115704

SEQ ID NO: 221076 - DNA, 1000 bp, Homo Sapiens; identical to SEQ ID NO: 115705

SEQ ID NO: 221077 - DNA, 1000 bp, Homo Sapiens
aaggattactctccatatcccttcctctcaggctcttgactacttggaactaggctcttatgtgtgcctttgtttcccatcagactgtcaagaagaggaaagggaggaaacctagcagaggaaagtgtaattttggtttatgactcttaaccccctagaaagacagaagcttaaaatctgtgaagaaagaggttaggagtagatattgattactatcataattcagcacttaactatgagccaggcatcatactaaacttcacctacattatctcacttagtcctttatcatccttaaaacaattctgtgacatacatattatctcattttacacaaagggaagtcgggcatggtggctcatgcctgtaatctcagcactttgggaggctgaggcagaaggattacctgaggcaaggagtttgagaccagcttagccaacatagtaagacccccatctctttaaaaaaaaaaaaaaaaaaaaaaaaaaaactttagaactgggtgcagtggctcatgcctgtaatcccagccagcactttgggaggctgagatgggaagatcacttgagcccagaattagagataagcctatggaaacatagcaagacactgtctctacaggggaaaaaaaaaaaagaaactgagccttaaagagatgaaataaattaagcagtagatccaggatgcaaaatcctcccaattcctgtgcatgtgctcttattgtaaggtgccaagaaaaactgatttaagttacagcccttgtttaaggggcactgtttcttgtttttgcactgaatcaagtctaaccccaacagccacatcctcctatacctagacatctcatctcaggaagtggtggtgggggtagtcagaaggaaaaataactggacatctttgtgtaaaccataatccacatgtgccgtaaatgatcttcactccttatccgagggcaaattcacaaggatccccaagatccacttttagaagccattctcatcca

SEQ ID NO: 221078 - DNA, 933 bp, Homo Sapiens
gcagagaggggcgcggggggcgggggtggtggggcttctggactgagccgctgagggtgcgggctgaccctgtaagtggctgcggcgggaagatggcggagctgcgcgtgctcgtagctgtcaagagggtcatcgactacgccgtgaagatccgagtgaagcctgacaggaccggtgtggtcacggatggtgtgaagcactccatgaaccccttctgtgagatcgcggtggaggaggctgtgcggctcaaggagaagaagctggtgaaggaggtcatcgccgtcagctgtgggcctgcacagtgccaggagacgattcgtaccgccctggccatgggtgcagaccgaggtatccacgtggaggtgcccccagcagaagcagaacgcttgggtcccctgcaggtggctcgggtcctggccaagctggcagagaaggagaaggtggacctggtgctgctgggcaaacaggccatcgatgatgactgtaaccagacagggcagatgacagctggatttcttgactggccacagggcacattcgcctcccaggtgacgctggagggggacaagttgaaagtggagcgggagatcgatgggggcctggagaccctgcgcctgaagctgccagctgtggtgacagctgacctgaggctcaacgagccccgctacgccacgctgcccaacatcatgaaagccaagaagaagaagatcgaggtgatcaagcctggggacctgggtgtggacctgacctccaagctctctgtgatcagtgtggaggacccgccccagcgcacggccggcgtcaaggtggagaccactgaggacctggtggccaagctgaaggagattgggcggatttgagcccctcccagagatggcaataaaactgactctcaacatctatctctgttaacttaaaaaaaaaaaaaaaaaa

SEQ ID NO: 221079 - DNA, 1000 bp, Homo Sapiens; identical to SEQ ID NO: 115706

SEQ ID NO: 221080 - DNA, 1000 bp, Homo Sapiens
ccacttcttcccaagacagtgaattagaacgggtatttctgtgggacttggatgaaaccatcatcatcttccactcacttcttactggatcctatgcccagaaatatggaaaggacccaacagtagtgattggctcaggtttaacaatggaagaaatgatttttgaagtggctgatactcatctatttttcaatgacttagaggagtgtgaccaggtacatgtggaagatgtggcttctgatgacaatggccaagacttgagcaactacagtttctcaacagatggtttcagtggctcaggaggtagtggcagccatggttcatctgtgggtgttcagggaggtgtggactggatgaggaaactagctttccgctaccggaaagtgagagaaatctatgataagcataaaagcaacgtgggtggtctcctcagtccccagaggaaggaagcactgcagagattaagagcagaaattgaagttttaacagattcctggttaggaactgcattaaagtccttacttctcatccagtccagaaagaattgtgtgaatgttctgatcactaccacccagctggttccagccctggccaaggttctcctatatggactaggagaaatatttcctattgagaacatctatagtgctaccaaaattggtaaggagagctgctttgagagaattgtgtcaaggtttggaaagaaagtcacatatgtagtgattggagatggacgagatgaagaaattgcagccaaacagcacaacatgcctttctggaggatcacaaaccatggagacctagtatcccttcaccaggctttagagcttgattttctctaagaactggaatgaggagccttccccttgagctccttttcactcctgaagggagctggagactggaaccaactgagaactttctctgtctgtctctctctgtgtctctgtctctatctctctctctttctctctttctctctctccctctctccctccct

SEQ ID NO: 221081 - DNA, 1000 bp, Homo Sapiens
taaggtctctagggtccctgcctaaatcccactcctgagggagggggaagaagagagggtgggagattctcctccagtcctgtctcatctcctgggagaggcagacgagtgagtttcacacagaagaatttcatgtgaatggggccagcaagagctgccctgtgtccatggtgggtgtgccgggctggctgggaacaaggagcagtatgttgagtagaaagggtgtgggcgggtatagattggcctgggagtgttacagtagggagcaggcttctcccttctttctgggactcagagccccgcttcttcccactccacttgttgtcccatgaaggaagaagtggggttcctcctgacccagctgcctcttacggtttggtatgggacatgcacacacactcacatgctctcactcaccacactggagggcacacatgtaccccgcacccagcaactcctgacagaaagctcctcccacccaaatgggccaggccccagcatgatcctgaaatctgcatccgccgtggtttgtattcattgtgcatatcagggataccctcaagctggactgtgggttccaaattactcatagaggagaaaaccagagaaagatgaagaggaggagttaggtctatttgaaatgccaggggctcgctgtgaggaataggtgaaaaaaaaacttttcaccagcctttgagagactagactgaccccacccttccttcagtgagcagaatcactgtggtcagtctcctgtcccagcttcagttcatgaatactcctgttcctccagtttcccatcctttgtccctgctgtcccccacttttaaagatgggtctcaacccctccccaccacgtcatgatggatggggcaaggtggtggggactaggggagcctggtatacatgcggcttcattgccaataaatttcatgcactttaaagtcctgtggcttgtgacctcttaataaagtgttagaatccaaaaaaaaaaaaaaaa

SEQ ID NO: 221082 - DNA, 1000 bp, Homo Sapiens; identical to SEQ ID NO: 115707

SEQ ID NO: 221083 - DNA, 1000 bp, Homo Sapiens
ttctgccagtcatccagctgatacacacctgatgattttaaagaaagccacacagagctgaatgggcagtgtaatcaataatttaaaaaacatgaatgtcattagatcctttataacgtagatcgaagccaaagcagctcatttgtgacaacatttcatatcaccagacacaccaggcaacagaagttgaagcacaaccactgtagcaaaataccttgactgcttgtgagaccattagcattgcaggccaaaccgtactgtatttccttctcataacctcaaggaaccatatgtgctacccacaacacctcattcttacccagggtgcgctgcgtcctcatggtactgtaggcagctgaagaaccgccgttcccttgaaagggaacacctggcattctgtggtgtttcgtgctgtcttaaataatggtgcatttattatgttcaagttatttcaggattgccatatgtgcaaacaaatcatgcaatgcagccaaggaatatatgttgttgttgttgttttaaacccattttttttttagaattttcattaatactgtagttatacaccatatgcctcattttatcatagcctattgtgtatgaaagatgtttgtacaatgaattgatgtttagtttgctttagtcatttaaaaagatattgtaccaggatgtgctattaagagcacgtatccattattcttctcaacccaagaacctgtttcctggaccagtgaccaaacctcatatgtgaaatggccaaagcacatgcaggctcctggttgttcctctcaaacctgtgctgaccaaagattagtaaccagttatacccagtattttgaggttttattgtttttttaataactaaaaagaaaaaaggaacagtgtaaatttgtaatcaagagtttgtgaggaaaaacttatggtttttggttttgtttgtttttgtaggtctgtgtatcaaatatgacacttttcttgcaataaagcttattttggggta

SEQ ID NO: 221084 - DNA, 1000 bp, Homo Sapiens; identical to SEQ ID NO: 115711

SEQ ID NO: 221085 - DNA, 1000 bp, Homo Sapiens
gagagcatgaatggtattctgaactatcacctgattcaaggactttgctagctaggttttgaggtcaggcttcagtaactgtagtcttgtgagcatattgagggcagaggaggacttagtttttcatatgtgtttccttagtgcctagcagactatctgttcataatcagttttcagtgtgaattcactgaatgtttatagacaaaagaaaatacacactaaaactaatcttcattttaaaagggtaaaacatgactatacagaaatttaaatagaaatagtgtatatacatataaaatacaagctatgttaggaccaaatgctctttgtctatggagttatacttccatcaaattacatagcaatgctgaattaggcaaaaccaacatttagtggtaaatccattcctggtagtataagtcacctaaaaaagacttctagaaatatgtactttaattatttgtttttctcctatttttaaatttattatgcaaattttagaaaataaaatttgctctagttacacacctttagaattctagaatattaaaactgtaaggggcctccatccctcttactcatttgtagtctaggaaattgagattttgatacacctaaggtcacgcagctgggtagatatacagctgtcacaagagtctagatcagttagcacatgctttctactcttcgattattagtattattagctaatggtctttggcatgtttttgttttttatttctgttgagatatagcctttacatttgtacacaaatgtgactatgtcttggcaatgcacttcatacacaatgactaatctatactgtgatgatttgactcaaaaggagaaaagaaattatgtagttttcaattctgattcctattcaccttttgtttatgaatggaaagctttgtgcaaaatatacatataagcagagtaagccttttaaaaatgttctttgaaagataaaattaaatacatgagtttctaacaattaga

SEQ ID NO: 221086 - DNA, 1000 bp, Homo Sapiens; identical to SEQ ID NO: 115715

SEQ ID NO: 221087 - DNA, 1000 bp, Homo Sapiens
gaagcttataatctaattttaggaggaccaaattcagcggatggcaactggaacattgattgtaaggccagtgaagttttcacccaactggaatttgatggaaagaaggtttgtgtgtttaagacgccaagggcattgcagaatccctctcagtggacagtatgcactcagctgaccactctctctagaaatagtcaagatatgaactaagaaattttaatgcaaatacatacattcctgaaagacggggaattaaattactaattttttttttttaaatgatgacagtggtcccagaacttggaaaagttgtagggatttctaaactcaagcagattcgcaagtgctgtgcgcttgtcagaccatcagaccagggccaaccaatcagaaggcaacttactgtataaattatgcagagttattttcctatatctcacagtattaaaaaataaataattaaaaattaagaataaataaacgagttgacctcggtcacaaaagcagttttactatcgaatcaatcgctgttatttttttttaatgtaatttgtacatcttttttcaatctgtacatttgggctgtcttgtatgtttttatgctcctttttaaaaagcataatatgcctatagctgaaaaggaaacagggctgtttaagtcactgacttatgagaaagcaaagcactggtacagttatttaacaggcatacacaagcagggaaaagataatccatttagatctttaatgctttggaaatgcgtgtaacagtactgcaataatcacagctctgggaaaaacaacgaaactttcccttgtggagaggagggattttcctgctctatataagcaacatatttttagacattaaaatatatataattttgcaggtaattgttgacttttttaactatattaagtgttaagctgacaactgtcaaagaagaccatgttgtaaaataatttgactaaataaatggttccttctctcaaaaaaaaaaaaa

SEQ ID NO: 221088 - DNA, 1000 bp, Homo Sapiens
tttaagtgaaatttattgaggaaaaatatgtgaaggaccttcactctaagatgttatatttttcttaaaaagtaactcctagtaggggtaccactgaatctgtacagagccgtaaaaactgaagttctgcctctgatgtattttgtgagtttgtttctttgaattttcattttacagttacttttccttgcatacaaacaagcatataaaatggcaacaaactgcacatgatttcacaaatattaaaaagtcttttaaaaagtattgccaaacattaatgttgatttctagttatttattctgggaatgtatagtatttgaaaacagaaattggtaccttgcacacatcatctgtaagctgtttggttttaaaatactgtagataattaaccaaggtagaatgaccttgtaatgtaactgctcttgggcaatattctctgtacatattagcgacaacagattggattttatgttgacatttgtttggttatagtgcaatatattttgtatgcaagcagtttcaataaagtttgatcttcctctgctaaattgatgttgatgcaatccttacaaatgattgcttttaaaattttaagctaggaaaagaaatctatagaaagtgttctgttacaaaatgtaactgttaccattggaaatttcacgtcataggaagttagcctttatctacccaactttcaagaaggttctttaataaagcgaaaactcaaccaaatggtacttttccacagtgtaccattaaaatatgcactagtctctttttacaaggctgtattcagcaagggcctaacttgcttaaagtgtaattactaacttctaaaactgtactttgattcacatgttttcaaatggagttggagttcattcatattacaatatttgtgtgctaaacgtgtatgtttttcagttcaaagtcatgatgtttttaaaatcttattaaagtttcaaaaatctgaagattgtttatctagatgtaaatttt

SEQ ID NO: 221089 - DNA, 1000 bp, Homo Sapiens
tgagacacaagtcacaaatccaggcttctgagacttcggaccaaccagcttcaatcagggttcccactaccccctctttgggggtagagtggctcatggaactcagagaaacatttatttcggcttgctggtttattataaaagcaaggtttattataaaagatactacaaaggatacagatgaagaggcacatagggcaaggtacggggttccacgccctccctgagtgcatcaccctctgggaacctccgtgtgttcacgtctcatgaagctctccaaatccagtcctcttgggtttttatggaagcttcatgatgtcagcattctttcctccagtgtataggatgggatcctctctggggagggtcttaagacccacaattagaaaggcaagggaagattagagtcctgctttggggtagatgaaaggaaaggagagagattctgtttcctgaggcttaatacacccaacattataacaaaggactgtagcaagggctatgggagttctgaagcagaaaccatgggctaaaaccaacatacatcttaataccagataccctaatcccagtcctaacttcatttaaccttggtcacattgagtcattccaggatgagtggctcaagtatttcctcagggaaaatacttctgtgccccctgatttgagggtaagaagtagataatgaggccactgtgggtgttattttttcatgtctggacctcagcctatatcctgagactaagtggaagtgggaaaagagtacaagagaagagacaaagtggggatatttgtaaggcttagatgagatagtgtttttttagaaaaaaactttatcttaccattaagtaaaatgtttgccataggctttctggggctttctctttttaaagtcagactgttgaaggtttcttctattcttatttgttaagagttttcttttattgtttaaatcatgaatgaatgttgaattttattaaatgcagtttctgtaaatatt

SEQ ID NO: 221090 - DNA, 1000 bp, Homo Sapiens
agcctaaggaacgacctacatttgagacactgcgttggaaacttgaagactattttgaaacagactcttcatattcagatgcaaataacttcataagatgaacactggagaagaatatcaaataataaagtagcaaaacaaattcaaataatccattccaaaatacaatgttatcaaccaactgcacaatcagtttatcctgacatattcaagtgataggataaagttggccatgtattatgaaaaagattatttgtgcattttattgactgggcaacactgcaggacagtcaaggtgatatataatttcctcactgcctggtaaaattaagcacactaaaccaagttatttttctttttaagagatacttacatttccatttattgtttgaaatgtcgatcaagagaatcaacagatgatagtccaatttttactcagtgactgttgtagcattttcctgtttactgattagagtggttattcattattcctcagattgctgaatcccatcaggctgttattatgaaggaatttgattgctttgctgcacagcaggacctgtgctttgagatttttttttctcttttaaaatatcctgtaactacaatgatggtaaagccatgttaaatgacttgattgtacttggagtaattgcacatttttttctatgcataaaaaaatgatgcagctgttgagaaaacgaagtctttttcattttgcagaaggaaatgatggaatttttctgtacttcagtatgtgtcaactgagagtcatatacattagttttaatctcttaatattgagaatcaggttgcaaaacggatgagttattatctatggaaatgtgagaaatgtctaatagcccataaagtctgagaaataggtatcaaaatagtttaggaaaatgagaggagaacagtaggattgctgtggcctagacttctgagtaattaataaagaaaaagaagtaccctttggcctacaaaaaaaaaaaaaaaa

SEQ ID NO: 221091 - DNA, 1000 bp, Homo Sapiens
aaggaaaaagctcaaaggagagaagaaggatgatgtccaagctgctgaggctgaagctaataagaaggatgaagcccctgttgccgatggggtggagaagaagggagaaggcaccactactgccgaagcagccccagccactggctccaagcctgatgagcccggcaaagcaggagaaactccttccgaggagaagaagggggagggtgatgctgccacagagcaggcagccccccaggctcctgcatcctcagaggagaaggccggctcagctgagacagaaagtgccactaaagcttccactgataactcgccgtcctccaaggctgaagatgccccagccaaggaggagcctaaacaagccgatgtgcctgctgctgtcactgctgctgctgccaccacccctgccgcagaggatgctgctgccaaggcaacagcccagcctccaacggagactggggagagcagccaagctgaagagaacatagaagctgtagatgaaaccaaacctaaggaaagtgcccggcaggacgagggtaaagaagaggaacctgaggctgaccaagaacatgcctgaactctaagaaatggctttccacatccccaccctcccctctcctgagcctgtctctccctaccctcttctcagctccactctgaagtcccttcctgtcctgctcacgtctgtgagtctgtcctttcccacccactagccctctttctctctgtgtggcaaacatttaaaaaaaaaaaaaaaaagcaggaaagatcccaagtcaaacagtgtggcttaaacattttttgtttcttggtgttgttatggcaagtttttggtaatgatgattcaatcattttgggaaattcttgcactgtatccaagttatttgatctggtgcgtgtggccctgtgggagtccactttcctctctctctctctctctgttccaagtgtgtgtgcaatgttccgttcatctgaggagtccaaaatatcgagtgaattc

SEQ ID NO: 221092 - DNA, 1000 bp, Homo Sapiens; identical to SEQ ID NO: 115723

SEQ ID NO: 221093 - DNA, 1000 bp, Homo Sapiens
tttgtgggtaaaaaaaaaacctgtggacataatgaattttgagacattgattggtgaggcttttatttcccttgaggagtctcttgtacctagcatacatgatagctccttgttgggaagataacaagaaggatctttgaatactctattgctgatataatgcaagatttaaatttatacatataactaatttcaaatgtaattatcacactatgttaaaattacttttttcccttagataattcaaatttctccacttgcttgagattatatcatttctttttcaattatactattatttctgagaatgaaatggacgattacacttagaaaatgagtaatagtgtttaataagtcagtgattatatgtgtgctcaaataagtgttatgtatcagctagatactgagctttgatagaataattttcttttgattattcatgatgtgtcatctctgaccttgtttcagcaaagtaaacagcactccccaccccaccctcctttttttactcatcttggaaaaggttagtctttcagtacacgttgctggtaagtagtttccaagttacgtgttgtcactgggttgaagtatatttgtgtgtgtgtgtgtgtgtgtgtgtgtgtgtgtaaccataaactatattcatatctgtttcatttggaggattttcttctttgtaatgtaaagaaattcaaagttatcaaagttccttaaatgtgttagtttagattctttatgtgcctttcatgaaagatatgttttcattaattttactggtggacctgtaatatccacattgtgaagctgtgtatgaaattcaactataatatgaataaatttgaatcatgagaattatgggttaaaaagccacaaagaagcacatattggtgaccatcattaatgaaatcctgaactttattctgtgtaattgtgttaataaatcctaataaatttaaatttttaaaattttacaaacaaaaaaaaaaaaaaaaaaaaaaaa

SEQ ID NO: 221094 - DNA, 1000 bp, Homo Sapiens
ttgttttatggattcctcgtttactgaggaaagggaacatgctggttctggaaaagccacaatattgaatctaaaaggaaaccgtttattgtttgatgaaagtttcactggttaaataaaaaactaaattaataactggagcctctaaatttattatccattatccagtgatggaaagttgtatttctcaatcatgcttagggccaaaataggtatataaaatgtgtcacagaaaaacacgcatttgcaacgttaacctaacgaaatttccatgaagaaccaagtcagggcagcatctccttagtcccagctcaggctctctgccttccagaggccgcttctccagtgactaacctcctcctctggctcctccttgcagacagttatcccttgtttagaacacgaatttccatttacctggtgggaacacgaaacaggagtctcttctgttctgcaagtttgatgggtaagaggtagccttttttcaaagtaggatttcctttttcaactgttccaggaaagaatctctaagactgggtagctcacagccagccaaaggcagctacatttccacagaagcccgtccgctgcctccgtggcttctccagccattgaactggtcccacacgcaccccaggccccactcctcggcagtttcaggtgtagctgtggggcccgttcctaggtctgtactcactttagggaggcttcactgactaggctttcctcctgcatgttgaatttccttcagctttaagaggaagagtggaataaatattctaagtgatttaatgcactttgacttgtataaaactttctgtgttagcgacggtatctatagccctttatacgagcgatggatcttgagctctccttccatgttgtaaatagggattgtattcttgaaaactgctgtagcaaattcatctgtggtgcaatacactttttgattaaagctcttcaatccagatgcaactacaatggattttactaaaaaaaa

SEQ ID NO: 221095 - DNA, 1000 bp, Homo Sapiens; identical to SEQ ID NO: 115731

SEQ ID NO: 221096 - DNA, 1000 bp, Homo Sapiens; identical to SEQ ID NO: 115732

SEQ ID NO: 221097 - DNA, 1000 bp, Homo Sapiens
gcggttgcggctggacacgggaccccagagcctgtctgggaagtcgacaccccagccaccatcaggcaagacaacacccaacagcggcgacgtgcaggtgactgaggatgccgtgcgccgctacctgacacggaagcccatgaccactaaggacctgctgaaaaagttccagaccaagaagacagggctgagcagcgagcagacagtgaacgtgttggcccagatcctcaagcgactcaaccccgagcgcaagatgatcaacgacaaaatgcacttctccctcaaggagtgaggcttggtccaatacatggctctgccccccagaacttaaggctctcactgccccttcgccatcctagagtgaggctctgtccaatacatggctctgccctccagaacttcaggctctcagtgacccttcgacatcctgcttgctccctgactcccagggccccgtagttagcaattctggaaaagttaagccatctcctcctctggcccttccttctggaatcttcagatgcctgttaggccttcttattgtcctcctcctcctggctcggcctccctcacactgaccaagggcctgtgctgcccactgggtaacttctacagttctcccttccacttccctaagtctctcttcagctgtgacttatccaccacatagcccagtaagtcttcagttttggctgggcatgatggtgagcgcctgcagtcccagctacttgggaggctaagcccagttcaaggctgcagtgaactatgatggtgccactgcattccagcctgggtgacagaatgaaatcctggcacaaaaaaaaaaaagtagccaggcatggtggcgggagcctgttgtcccagctgttccgtaggctgaggcacgagattcacttgaacctgggaggtggaggttgctgtgagctgacaccacgccactgcactccagcctgggtgacagtgagactctgtctcaataaataaaaaataataataaatt

SEQ ID NO: 221098 - DNA, 1000 bp, Homo Sapiens
ccgggagcgcgaccctcccccggcccggcctggcccggcctggccagtccccgcggtctctgcccgggctgacgcccaggaatgtggtcgacgagaagccccaacagcacggcgtggcctctcagcctcgagcctgatccggggatggcctctgcctccaccacaatgcatactaccaccattgcagagcctgatccagggatgtctggatggccggatggcagaatggagacctccacccccaccataatggacattgtcgtcattgcaggtgtgattgctgctgtggccatcgtcctagtctccctcctcttcgtcatgctgcgctacatgtaccggcacaagggcacgtaccacaccaatgaggccaagggcacggagtttgctgagagtgcagatgcagccctgcagggagaccctgccctccaagatgctggtgatagcagcagaaaggagtactttatttgagggacaacagacttcacttccctgaatgcctcccccatctccatcaggaaaaatacaccccatcgcccagcacccctgctgataccaccagacagagagagagagcacttgattcttcccgagatagccacctggaaacactaggtgcctgcccagggaggaacggaggaggactcgcgctacaagaggccactcccagggacccagggaggcgatggccaccccagaggccaccttttgctccacggaggtgggagaaaatctgggcacatggggccccctgggcagtgcaggacaacatcagctcactggcaggaaagtccttgttgagggtgagggggtgctggggtacccgggggctggggaagcaaggaaataagtcatctgtatgctgactggggataatggcatcaaatgtcagtccttgacatttggggggaacagcaggtgccagagctaaaaggtacctttgtctgccattgatccagctcagaacgattggaaataaatttgaaatgtaaccgagcaaaaa

SEQ ID NO: 221099 - DNA, 1000 bp, Homo Sapiens
ttcctaatagttggggcttatatgactcatgtgtgtttcaatatggaaattattggagggaaagaagtgtcacctcattccaggccatttatggcctccatccagtatggcggacatcacgtttgtggaggtgttctgattgatccacagtgggtgctgacagcagcccactgccaatatcggtttaccaaaggccagtctcccactgtggttttaggcgcacactctctctcaaagaatgaggcctccaaacaaacactggagatcaaaaaatttataccattctcaagagttacatcagatcctcaatcaaatgatatcatgctggttaagcttcaaacagccgcaaaactcaataaacatgtcaagatgctccacataagatccaaaacctctcttagatctggaaccaaatgcaaggttactggctggggagccaccgatccagattcattaagaccttctgacaccctgcgagaagtcactgttactgtcctaagtcgaaaactttgcaacagccaaagttactacaacggcgacccttttatcaccaaagacatggtctgtgcaggagatgccaaaggccagaaggattcctgtaagggtgactcagggggccccttgatctgtaaaggtgtcttccacgctatagtctctggaggtcatgaatgtggtgttgccacaaagcctggaatctacaccctgttaaccaagaaataccagacttggatcaaaagcaaccttgtcccgcctcatacaaattaagttacaaataattttattggatgcacttgcttcttttttcctaatatgctcgcaggttagagttgggtgtaagtaaagcagagcacatatggggtccatttttgcacttgtaagtcattttattaaggaatcaagttctttttcacttgtatcactgatgtatttctaccatgctggttttattctaaataaaatttagaagactcaaaaaaaaaaaaaaaaaaaaaaaaaaaaa

SEQ ID NO: 221100 - DNA, 1000 bp, Homo Sapiens; identical to SEQ ID NO: 115736

SEQ ID NO: 221101 - DNA, 1000 bp, Homo Sapiens
tgcagcatgacaagctggtcaaacttcatgcggtggtcaccaaggagcccatctacatcatcacggagttcatggccaaaggaagcttgctggactttctgaaaagtgatgagggcagcaagcagccattgccaaaactcattgacttctcagcccagattgcagaaggcatggccttcatcgagcagaggaactacatccaccgagacctccgagctgccaacatcttggtctctgcatccctggtgtgtaagattgctgactttggcctggcccgggtcattgaggacaacgagtacacggctcgggaaggggccaagttccccatcaagtggacagctcctgaagccatcaactttggctccttcaccatcaagtcagacgtctggtcctttggtatcctgctgatggagatcgtcacctacggccggatcccttacccagggatgtcaaaccctgaagtgatccgagctctggagcgtggataccggatgcctcgcccagagaactgcccagaggagctctacaacatcatgatgcgctgctggaaaaaccgtccggaggagcggccgaccttcgaatacatccagagtgtgctggatgacttctacacggccacagagagccagtaccaacagcagccatgatagggaggaccagggcagggccagggggtgcccaggtggtggctgcaaggtggctccagcaccatccgccagggcccacacccccttcctactcccagacacccaccctcgcttcagccacagtttcctcatctgtccagtgggtaggttggactggaaaatctctttttgactcttgcaatccacaatctgacattctcaggaagcccccaagttgatatttctatttcctggaatggttggattttagttacagctgtgatttggaagggaaactttcaaaatagtgaaatgaatatttaaataaaagatataaatgccaaagtctttaccaaaaaaaaaaaaaaaaaaaa

SEQ ID NO: 221102 - DNA, 1000 bp, Homo Sapiens; identical to SEQ ID NO: 115738

SEQ ID NO: 221103 - DNA, 1000 bp, Homo Sapiens; identical to SEQ ID NO: 115739

SEQ ID NO: 221104 - DNA, 1000 bp, Homo Sapiens
gccaagggattggcctcgtcgtcggggggcccatctccagccggcagccccccgcagcccatgcagtccacggccggcttcatgaacgccttacactccatgacccccagctacgagagcccgtccccacccgccttcggtaaagcccaccagaatgcctacgcgctgccctccaactaccagccccctctcaaaggctgcggcgccccgcagaagtaccctccgaccccggcgcccgagtatgagccgcacgtcctccaagccaacgggggcgcctacgggacgcccaccatgcagggcagtccggtgtacgtgggcgggggcggctacgcggatccgctgccgccccctgccggcccctccctctatggcctcaaccacctttcccatcacccttccgggaacctggactacaacggggcgccccctatggcgcccagccagcaccacggaccctgcgaaccccaccccacctacacagacctctcctctcaccacgcgcctcctcctcagggtagaatccaagaagcgcccaaattaacacacctgtgatgggaaagggcgaacgaggattaggggatggggaggaagagagagactgtggagctctggggggcaacctggaggtctgaaaagaggagccagagaaggtggtacccaggcttcctggtcagaaccggcctggagctccttcccttccccctggcctgagaggttgcttttaagtcttccaccccttgttccatctgcctgccaacccatcggaaaggaatccacatcatattggagatgaccccatcaaccccagggctccagcactaccaagttggaattccacgcccgggagtggggtagaggaagacgagacaggacgaggcagaaaagcacattttaaaaaccagacaagatggctaggccatcaccaaccaacggacttaccttacatctttgtaggtaattccccccaaatcttgattttttttttcctcaattatccttt

SEQ ID NO: 221105 - DNA, 1000 bp, Homo Sapiens
attgaaaagtatgagcctggctacagctggcagcgccttccagccctgagcccgcccagaggagcccagcggcccaagagcccgtgccacccccagccctggcccctccaatcctccccgctctgccgccgcccgctggggaccggttcccacaagcctgcctcgccttgtgttacgatatttcgtttgatcttaggtcttcctgtggctccctctctcctggactggttatcttgttattattgttaataataataattattattattttccttccatgctcccaactcccttctgcttgtcccaaatccgccagtgtttctgaatgtttgtgtctgtggttgcagtctttcccccaggaaaaaaaaaaaaagaaattcgcatgtttaatgtgaactctcccctccccatctgtgttctaacttatttataaaaagatgatcgctgtattttgagtttcagctggaaacttctgtaaggggcagcagttgaggtggggtagtgccgcagtggggtcaagctgagctggcttcggagatggagtcccttttcattctcctcctcctccctcctcactccctaggcccaagtctcctaggggcttggtcctagggtgggaaggggctagggaggaccaaagggatggtattgagaagagagaaagaagatagtgagatttaagttcctgctgcctgggtaggccccacaaggcctggtctgggagtatacggaaacaaaaatgatcctcagtgcaaaatgtcttgtgtatttctctgtgaatccatgggtctggctagagggcccaaagcttgtaaatatggggatagtctgggtcagacccatctctcccttacccatcttgcttccaagaccatttgtagtgagcgagtggatgctgtgctacgtgtgaaatctgtctttgcggggcctgtctcagtgattcgcttttggtatttgtttgtagctttcctggaagtcaaataaatgtttcccccactcc

SEQ ID NO: 221106 - DNA, 1000 bp, Homo Sapiens
gacaggtggtgattgcgggcttggccatgctttgtgcaagtatctggatgagctgggcttcacggtatttgccggagttttgaatgaaaatggcccaggagctgaggaattgcgaagaacctgctctccgcgcctctcggtgctccaaatggacatcacgaagccagtgcagataaaagatgcttacagcaaggttgcagcaatgctgcaggacagaggactgtgggctgtgatcaacaatgctggggtgcttggctttccaactgatggggagcttcttcttatgactgactacaaacaatgcatggccgtgaacttctttggaactgtggaggtcacaaagacgtttttgcctcttcttagaaaatccaaagggaggctggtgaatgtcagcagcatgggaggaggggccccaatggaaaggctggcatcttatggctcatcaaaggcggctgtgaccatgttctcatcagttatgagactggagctttccaagtggggaattaaagttgcttccatccaacctggaggcttcctaacaaatatcgcaggcaccagtgacaagtgggaaaagctggagaaggacattctggaccacctccccgctgaggtacaggaagactacggccaggactacatcttagcacagcggaatttcctcctattgatcaactcgttagccagcaaggacttctctccggtgctgcgggacatccagcatgctatcttggcgaagagcccttttgcctattacacgccagggaaaggcgcttacttgtggatctgccttgctcactatttgcctattggcatatatgattactttgctaaaagacattttggccaagacaagcccatgcccagagctctaagaatgcctaactacaagaaaaaggccacctaggcaatggaagccctcaaagaagtcggaatgtcatagtcttgaaatgaaagggaaactgggaaactgggtttctcattaaagttgtttcccactctg

SEQ ID NO: 221107 - DNA, 1000 bp, Homo Sapiens
aggaacgccactatccccaccaagcagacccagactttcaccacctactcggacaaccagcctggggtcttcatccaggtgtatgagggtgagagggccatgaccaaggacaacaacctgctggggcgttttgaactcagtggcatccctcctgccccacgtggagtcccccagatagaggtgacctttgacattgatgctaatggcatcctgagcgtgacagccactgacaggagcacaggtaaggctaacaagatcaccatcaccaatgacaagggccggctgagcaaggaggaggtggagaggatggttcatgaagccgagcagtacaaggctgaggatgaggcccagagggacagagtggctgccaaaaactcgctggaggcccatgtcttccatgtgaaaggttctttgcaagaggaaagccttagggacaagattcccgaagaggacaggcgcaaaatgcaagacaagtgtcgggaagtccttgcctggctggagcacaaccagctggcagagaaggaggagtatgagcatcagaagagggagctggagcaaatctgtcgccccatcttctccaggctctatggggggcctggtgtccctgggggcagcagttgtggcactcaagcccgccagggggaccccagcaccggccccatcattgaggaggttgattgaatggcccttcgtgataagtcagctgtgactgtcagggctatgctatgggccttctagactgtcttctatgatcctgcccttcagagatgaactttccctccaaagctagaactttcttcccaggataactgaagtcttttgactttttggggggagggcggttcatcctcttctgcttcaaataaaaagtcattaatttattaaaacttgtgtggcactttaacattgctttcacctatattttgtgtactttgttacttgcatgtatgaattttgttatgtaaaatatagttatagacctaaataaaaaaaaaaaaaa

SEQ ID NO: 221108 - DNA, 1000 bp, Homo Sapiens
tcctgtcctcatagccagcatgacttcttttaacttggattcctttgtatatagtaaagtttagtatatatatatttttttctttttgctactttctgaggcattatgtaaagggctcatactagatgttcagttaaatatactttagcacaaagtcaaactagagaatgtgttaaggagggaatgtatatgtcttggtagaccaggaggcctttgccagcaatttaagcaacagatgtgaatacttcacaaagctgtaaagaccattgtcttaaatactacaacaacttaacacccttttgtgaagatcacagcatttatctaagaaactgtgaggctttctggtttacatatatcttacaggtgtttttttgtatttttttttttttttagtttgaaatgtgtaagctttgatttaaaccaagtttacttcagtatgttaatgatgtagtaaaaatatttattgaaaggtgaattcgagtattttaatgttatacctgccattttttttcttaaagcatattctttgcatctaactgccagtgccattgtcaaaacttattttttaaatcgttgtacatttcttattaaactaagtgcttaattttaaagtattatgttgccatcatatagtgtataaaaatgtataattgccaattgattgtaactattatttatttttaaatgaaagtgtaagaatgctttctgattcaacaaatttgttatcaaactgtttccttatcctcttttctgatgtagcataaaaattgtcccggtttgagttataactgccagtagatgaccagtcacaagtgaaccacttctcagttgccaatctttgctcatattaaaaacaacttacaaatacttagtttttgtatctaatctctgattattaaaatgtttataaagtttatttttaccaaagagatgcaattcattatgagaaagtattgcataataaattttgttttataacttttaaaaaaaaaaaaaaaaa

SEQ ID NO: 221109 - DNA, 1000 bp, Homo Sapiens
ttcctactgtattcaaggcaatgcaaatgcaagaacgggacactttgctaaaggcgctgttggaaatagcttcttgcttggagaaagcccttcaagtgtttcaccaaatccacgatcatgtgaacccaaaagcatttttcagtgttcttcgcatatatttgtctggctggaaaggcaacccccagctatcagacggtctggtgtatgaagggttctgggaagacccaaaggagtttgcagggggcagtgcaggccaaagcagcgtctttcagtgctttgacgtcctgctgggcatccagcagactgctggtggaggacatgctgctcagttcctccaggacatgagaagatatatgccaccagctcacaggaacttcctgtgctcattagagtcaaatccctcagtccgtgagtttgtcctttcaaaaggtgatgctggcctgcgggaagcttatgacgcctgtgtgaaagctctggtctccctgaggagctaccatctgcaaatcgtgactaagtacatcctgattcctgcaagccagcagccaaaggagaataagacctctgaagacccttcaaaactggaagccaaaggaactggaggcactgatttaatgaatttcctgaagactgtaagaagtacaactgagaaatcccttttgaaggaaggttaatgtaacccaacaagagcacattttatcatagcagagacatctgtatgcattcctgtcattacccattgtaacagagccacaaactaatactatgcaatgttttaccaataatgcaatacaaaagacctcaaaatacctgtgcatttcttgtaggaaaacaacaaaaggtaattatgtgtaattatactagaagttttgtaatctgtatcttatcattggaataaaatgacattcaataaataaaaaaaaaaaaaaaaaaaaaaaaaaaaaaaaaaaaaaaaaaaaaaaaaaaaaaaaaaaaaaaaaaaaaaaaaaaaaaaaaaaaaaaa

SEQ ID NO: 221110 - DNA, 1000 bp, Homo Sapiens
ggtcctctatgccggcagcgggaccaagaacggatccctggacccagccaagagggcccagctgcagaggaggctggataagaagctgagtgagctcagcaaccagaggaccagccggaggaaggagagggggacgtgaccggccgcatccttgcacgccccgcggagctctctccatggtagcccagggcgctggcagaccatgctccgcctccaccagggccacagaggagcggaggggcctatgggggaggagcggagggccctgttggggaaggttgggtttttggaccccagggataagcttttccgatgtcacaatgtggaggaaagcacctgggggacaacagtgctcgtgcaggtggggcttgggaaatgcacgtcccttccccttactccccgccaaaacccacatcccagcctctggatcctggggaaggttccagtccctggagaatacccagggcctcaaacttgaagtcactcctccaatgtctgggacttgccagctcagcccgttaggatgagggtgctgagaggaaacaggaaacaagactgcgaatggcgctcaggcagggagcagggagtggcgtttggcttgcacgttcccatgtggccagatgctggggccactttccttctgtctgctggtgactgcagtgttccccctcctcctcaccacggggctcctgtgagtctggggggcacctctttctggcctgtgcacctctctctggcttataaaggtgcctggcctgtgccaacccctccttgttgcgcctcaccgtggggaccaggtgagccggctctcccacgtggttgtcccgggaaaagctgccccacagcctcagcatcttcagcacttaccgatccagagcctcccggccttctccggtgtcctgtaccaactcttctatttaagagaacctcagatgatgtacctgagcctcagggttttgtttcagagggatataaattatttaaaaattaaatgaaaacg

SEQ ID NO: 221111 - DNA, 1000 bp, Homo Sapiens
atcttactaaccatcagcattttgagttttttctctgtcgctctgttggtcatcttggcctgtgtgttatggaaaaaaaggattaagcctatcgtatggcccagtctccccgatcataagaagactctggaacatctttgtaagaaaccaagaaaaaatttaaatgtgagtttcaatcctgaaagtttcctggactgccagattcatagggtggatgacattcaagctagagatgaagtggaaggttttctgcaagatacgtttcctcagcaactagaagaatctgagaagcagaggcttggaggggatgtgcagagccccaactgcccatctgaggatgtagtcatcactccagaaagctttggaagagattcatccctcacatgcctggctgggaatgtcagtgcatgtgacgcccctattctctcctcttccaggtccctagactgcagggagagtggcaagaatgggcctcatgtgtaccaggacctcctgcttagccttgggactacaaacagcacgctgccccctccattttctctccaatctggaatcctgacattgaacccagttgctcagggtcagcccattcttacttccctgggatcaaatcaagaagaagcatatgtcaccatgtccagcttctaccaaaaccagtgaagtgtaagaaacccagactgaacttaccgtgagcgacaaagatgatttaaaagggaagtctagagttcctagtctccctcacagcacagagaagacaaaattagcaaaaccccactacacagtctgcaagattctgaaacattgctttgaccactcttcctgagttcagtggcactcaacatgagtcaagagcatcctgcttctaccatgtggatttggtcacaaggtttaaggtgacccaatgattcagctatttaaaaaaaaaagaggaaagaatgaaagagtaaaggaaatgattgaggagtgaggaaggcaggaagagagcatgagaggaaaaaaa

SEQ ID NO: 221112 - DNA, 1000 bp, Homo Sapiens; identical to SEQ ID NO: 115752

SEQ ID NO: 221113 - DNA, 1000 bp, Homo Sapiens
tgagcagggaaagaactctcccaaccctggggcctagctgtataggaggaattgcctaagggtggcccactcttgtgattgccccatttcctctggcaacaaaagccagagtgttgtgggccaagtccccccacagggcctctgcagggcatggccctgatttccctggtttgagactcacttcctcatctccctgtcctctgagataatatgagtgagcacttaggtatcatatcagatgctcaaggctggcagctacccccttcttgagagtccaagaacctggagcagaaataatttttatgtatttttggattaatgaatgttaaaaacagactcagctgtttctttccttttactactaccagttgctcccatgctgctccaccaggccctgtttcggatgccaactggcccactccccaagcacttgcccccagcttgcgaccattggcactgggagggcctggcttctgggctgatgggtcagttgggccttcataaacactcacctggctggctttgccttccaggaggaagctggctgaagcaagggtgtggaattttaaatgtgtgcacagtctggaaaactgtcagaatcagttttcccataaaagggtgggctagcattgcagctgcatttgggaccattcaaatctgtcactctcttgtgtatattcctgtgctattaaatatatcagggcagtgcatgtaaatcatcctgatatatttaatatatttattatattgtcccccgaggtggggacagtgagtgagttctcttagtccccccagagctggttgttaaagagcctggcacctacccgctctcacttcatctgtgtcatctctgcacactccagcccactttctgccttcagccattgagtggaagctgccccaggcccttaccaggtgcagatgcccaatcttgatgcccagccatcagaactgtgagccaaataaacctttttctgtataaaaaaaaaaaaaaaaaaaa

SEQ ID NO: 221114 - DNA, 1000 bp, Homo Sapiens; identical to SEQ ID NO: 115755

SEQ ID NO: 221115 - DNA, 1000 bp, Homo Sapiens
gcatgtctggggccgtctctggaacagcacctttctggaggagtactcagctgtgaagtccctggaagtgattgtccgggccaacatcacagtgaagtcctccataaagaacttgatgctccgagatgcctccacagtgatcccagtgatggtatacttggaccccatggctgtggtggcagaaggagtgccctggtgggtcatcctcctggctgtactggctgggctgctggtgctagcactgctggtgctgctcctgtggaagatgggattcttcaaacgggcgaagcaccccgaggccaccgtgccccagtaccatgcggtgaagattcctcgggaagaccgacagcagttcaaggaggagaagacgggcaccatcctgaggaacaactggggcagcccccggcgggagggcccggatgcacaccccatcctggctgctgacgggcatcccgagctgggccccgatgggcatccagggccaggcaccgcctaggttcccatgtcccagcctggcctgtggctgccctccatcccttccccagagatggctccttgggatgaagagggtagagtgggctgctggtgtcgcatcaagatttggcaggatcggcttcctcaggggcacagacctctcccacccacaagaactcctcccacccaacttccccttagagtgctgtgagatgagagtgggtaaatcagggacagggccatggggtagggtgagaagggcaggggtgtcctgatgcaaaggtggggagaagggatcctaatcccttcctctcccattcaccctgtgtaacaggaccccaaggacctgcctccccggaagtgccttaacctagagggtcggggaggaggttgtgtcactgactcaggctgctccttctctagtttcccctctcatctgaccttagtttgctgccatcagtctagtggtttcgtggtttcgtctatttattaaaaaatatttgagaacaaaaaaaaaaaaaaaaaa

SEQ ID NO: 221116 - DNA, 1000 bp, Homo Sapiens
caatctggagccccgtggctacgtcgtggggtggatcatcgccatcagtttgttggtgggaatcctcatcttcctgctgctggccgtgctgctctggaagatgggcttctttcgccgaaggtacaaagaaattatcgaagctgagaagaaccggaaagagaatgaagacagttgggactgggtccagaaaaaccagtgagctgccacaccagtcacatgacctgatcactagcctgtcatccttggtctttgtatcttccatatttggaagaaaaaaatcttctccagatttttcggaggccccactgatgctgttctcttcttcattctatcaagcccaggtgccagcctgaggcagccacttcggccaggtcacacgaccggggccagcaccacttcctttaaagatgaactctgaactttggagagtgagctacagagccgagcaatatttatggatgcaacacgcatggtcaaccctcaggggaaaactgttacctaaagtatttttataaatataagccttttatactgattatgtcttttatatttgtatcgatgttttattatttctattaaatagttatataattcactcaagcactgatatctggcctaaaatcttggaagtacatgtccatgaatacaaattttaaaggatgaaaatcttaccgtactttggaacttgctgtttaaaaagacagatgaaataagttgaagaaacctcatgtaatgaatccaccaggctggcagtggtgcatataaactgtgggtgtggcaagaccccgaagacatttcacatctttatcgcctcgatcaagtgtggagtcacatgctaatgtgtgctaaagaactgtaagtgttttttcatatgtacttttcattggaagattcccaacaagaatttggatggaaaacctgatccctagcaagaagtctgctctgtatcacctttatatagcagacatgtcaccctgcttctacacagatgatggatgaa

SEQ ID NO: 221117 - DNA, 1000 bp, Homo Sapiens
aggacagcagacatcactgtgactgtcaccaattccaatgaaagacggtctttggccaacgagacccacacccttcaattcaggcatggcttcgttgcagttctgtccaaaccatccataatgtacgtgaacacaggccaggggctttctcaccacaaagaattcctcttccatgtacatggggagaacctctttggagcagaataccagttgcaaatttgcgtcccaaccaaattacgaggtctccaggttgcagcagtgaagaagctgacgaggactcaggcctccacggtgtgcacctggagtcaggagcgcgcttgtgcgtacagttcggttcagcatgtggaagaatggcattcagtgagctgtgtcatcgcttcagataaagaaaatgtcaccgtggctgcagagatctcctgggatcactctgaggagttactaaaagatgtaactgaactgcagatccttggtgaaatatctttcaacaaatctctatatgagggactgaatgcagagaaccacagaactaagatcactgtcgtcttcctgaaagatgagaagtaccattctttgcctatcatcattaaaggcagcgttggtggacttctggtgttgatcgtgattctggtcatcctgttcaagtgtggcttttttaaaagaaaatatcaacaactgaacttggagagcatcaggaaggcccagctgaaatcagagaatctgctcgaagaagagaattaggacctgctatccactgggagaggctatcagccagtcctgggacttggagacccagcatcctttgcattactttttccttcaggatgatctagagcagcatggagctgttggtagaatattagtttttaaccatacattgtcccaaaagtgtctgtgcattgtgcaaaaagtaaacttaggaaacatttggtattaaataaatttacacttttctttgcaaaaaaaaaaaaaaaaaaaaaaaaaaaaaaaaaaaaaaaaaaaa

SEQ ID NO: 221118 - DNA, 1000 bp, Homo Sapiens
attagacaggtgatactacaatggaatagtaataaaattaagtcctcatcagattacagagtgtcagcctcaaaaaaggataagttgattctgcaaagtgtttgcacaagagcagtcacctaccgacgtgagaagcctgaagaaataaaaatggatatcagcaaattaaatgctcatgaaactttcaggtgcaacttctaaaaaaagatttttaaacacttaatgggaaactggaattgttaataattgctcctaaagattataattttaaaagtcacaggaggagacaaattgctcacggtcatgccagttgctggttgtacactcgaacgaagactgacaagtatcctcatcatgatgtgactcacatagctgctgactttttcagagaaaaatgtgtcttactactgtttgagactagtgtcgttgtagcactttactgtaatatataacttatttagatcagcatagaatgtagatcctctgaagagcactgattacactttacaggtacctgttatccctacgcttcccagagagaacaatgctgtgagagagtttagcattgtgtcactacaagggtacagtaatccctgcactggacatgtgaggaaaaaaataatctggcaagtatattctaaggttgccaaacacttcaacagttggtggttgaatagacaagaacagctagatgaataaatgattcgtgtttcactctttcaagaggtgaacagatacaaccttaatcttaaaagattattgctttttaaagtgtgtagttttatgcatgtgtgtttatggtttgcttatttttgcaagatggatactaattccagcattctctcctctttgcctttatgttttgttttcttttttacaggataagtttatgtatgtcacagatgactggattaattaagtgctaagttactactgccataaaaaactaataatacaatgtcactttatcagaatactagttttaaaagctgaatgttaa

SEQ ID NO: 221119 - DNA, 1000 bp, Homo Sapiens
catgctggcacaaggatctcaggtgctagagtccacgccacccccacatgtgatgagagttgaaaatgacccacatttcatcatttatctaccaaaaagccaaaagaacatttgtttcaatattgactcagaacctggaaaaatcctcaacctggtttctgacccagaatcaggaattgtagtcaacggtcagcttgttggtgccaagaagcccaacaatggaaaactaagcacctattttggaaaactgggattttatttccaaagtgaagacataaaaatagaaatcagcactgagaccatcaccctgagccatggttctagcacattctccttgtcctggtccgacacggctcaagtcacgaatcagagggtgcagatctcagtgaagaaagaaaaagtggtaactatcaccctggataaagagatgtccttttctgttttacttcatcgtgtttggaagaagcatcccgtcaatgttgactttctgggaatctacataccccctacaaacaagttctcacctaaagcccacggactaataggccagttcatgcaggaaccaaagatacacatcttcaatgagagaccaggaaaggaccctgagaagccagaggccagcatggaagtgaaggggcagaagctgatcatcaccaggggcttacagaaagactacagaacggatctagtgtttggaacggacgttacctgctggtttgtgcacaacagtggaaaaggattcattgacgggcattacaaggattacttcgtgcctcagctctacagctttctcaaacggccttaaaggtttatagtttgggaaattatatatattaatatacatctttcccctgtcacttttgcagatattcttcggtttgaataattaaaatgaaccagatatcagggtggttaattaaaatgaaccagatatcagggtggtttataaagcctgtaaacacacctaagaaaataaacattttacaaatgaaaaaaaaaa

SEQ ID NO: 221120 - DNA, 1000 bp, Homo Sapiens
aaaaaaaaatccaagaaatgtattgaatactcaagaaaatgccacatttcaattacatatttaaaactgtatctgtaagggcttttcaaaatgtagcaagataaaaatctcttattcaaattgtttttgtattaaatcatgcactcagaatttgtcgagggagagaataacctggtgtgttcaggttattcttagagactacacatttggaatagcagagcaaaatatggataatgaaagtgttgggaaaaaagtgatgtgacagggagtgaagacacttgataccagactctgggagatactctgcaagttgacctggcctctcccccacaggaacaaaacactgcctccagagtctttaaattctcagttatcaacgccaaggtttaaggtctagatagggtttgctatagggtttgctctgacaatttttaaagcttttggattgttctaacatagcttaagctattggttcctaaaaatcccaaatcaagatctatgtagaatataaaggaagcctgaaccaatccttccacatactgttaagatgtagacttggaacaaagctgttgggacccagagcaatgaatttttgaactgaagctactggtactccccagcaccacctcatactaagaattcctcactctgacatgacagtattttttctgaccaggagctgaaagaccctgacattcatgatccaaagatataagaaattttgatatgtctgcatgcagcacagaactttgaacctaggaggcagtcaataaatacatgagaaattcagctgtcattcagttactcttaattctttataaaactttaaatgataccacatatttgtttgtttaaaatggctttcccaaaatcaaagtagactaaagcagccatctttaaaatccaggatcatcaatgctattaacagtatcaggtaaaaagtacactttaaaatattttaatcaggcagagttttatggataggagatgtactcactcg

SEQ ID NO: 221121 - DNA, 1000 bp, Homo Sapiens
cttgggctcatgcaagcggtcctggaccacaccattccctacctgcacgtgagggaagcctttggccagaagatcggccacttccagttgatgcaggggaagatggctgacatgtacacccgcctcatggcgtgtcggcagtatgtctacaatgtcgccaaggcctgcgatgagggccattgcactgctaaggactgtgcaggtgtgattctttactcagctgagtgtgctacacaggtagccctggacggcattcagtgttttggtggcaatggctacatcaatgactttcccatgggccgctttcttcgagatgccaagctgtatgagataggggctgggaccagcgaggtgaggcggctggtcatcggcagagccttcaatgcagactttcactagtcctgagacccttcgcccccttttcctgcacctagtggcctttcttgggaagtagagatgtggcggctttcccaccctgcccacagcaggccctcctgcccagctgctcttgtcagccctctggcctctggatgaggttgagttctccacaacagctcccaagcatcatgggcctcgcagccgggcctgtgccacggctagtgttgtgtgatttaaaatggactcagcaggaagcatattgtctggggattgttgggacaggttttggtgactctgtgcccttgctctctaacttctgagcccacctcccagggtaggcacctgggggcatgcaggtgcccacctcccagggtaggcacctgggggcatgcaggtacccacctctttctcttgggtgaggctctggcaaggagatctctctgctcaagcacagcagaatcatggcccctctccatgaattggaacttggtacaggttaagtatccctaatcctgaaatctgaaacacttgtggttccaagcattttggataaggcaaattcaactttcagtctcttttctgggggaaaaaaataataaacctagcctagccaggcgtggtg

SEQ ID NO: 221122 - DNA, 1000 bp, Homo Sapiens; identical to SEQ ID NO: 115762

SEQ ID NO: 221123 - DNA, 1000 bp, Homo Sapiens
cccaagccaagccttaagtgtggaattcggattgatagaaaggaagactaacgttaccttgctttggagagtactggagcctgcaaatgcattgtgtttgctctggtggaggtgggcatggggtctgttctgaaatgtaaagggttcagacggggtttctggttttagaaggttgcgtgttcttcgagttgggctaaagtagagttcgttgtgctgtttctgactcctaatgagagttccttccagaccgttagctgtctccttgccaagccccaggaagaaaatgatgcagctctggctccttgtctcccaggctgatcctttattcagaataccacaaagaaaggacattcagctcaaggctccctgccgtgttgaagagttctgactgcacaaaccagcttctggtttcttctggaatgaataccctcatatctgtcctgatgtgatatgtctgagactgaatgcgggaggttcaatgtgaagctgtgtgtggtgtcaaagtttcaggaaggattttacccttttgttcttccccctgtccccaacccactctcaccccgcaacccatcagtattttagttatttggcctctactccagtaaacctgattgggtttgttcactctctgaatgattattagccagacttcaaaattattttatagcccaaattataacatctattgtattatttagacttttaacatatagagctatttctactgatttttgcccttgttctgtcctttttttcaaaaaagaaaatgtgttttttgtttggtaccatagtgtgaaatgctgggaacaatgactataagacatgctatggcacatatatttatagtctgtttatgtagaaacaaatgtaatatattaaagccttatatataatgaactttgtactattcacattttgtatcagtattatgtagcataacaaaggtcataatgctttcagcaattgatgtcattttattaaagaacattgaaaaacttga

SEQ ID NO: 221124 - DNA, 1000 bp, Homo Sapiens
ggcgggggttattctctttccttcaggaaatgaacccttcttacatcattcaagttctgctctgaggatcaagcttgggtctgatttaactcagcgacactgtcatttctgcttcattactggactagagggttgagccacccacttgccatttgctcctgtccttccaggaaatcacaattttcatcagagcccaagagattatttgagactcaggattcagatcagaggttcgactgtggctgggacaggagttgtgtgtagaaattcaccaggtggcctgagcgcagggggacctccagggctgcgttgagcagcctctcccactgacctctttctcgtttgtggacaaagcagcacgtatcacctcattcatcacttggacacatcgcctttgcattgtcttgtcacacctccctcacagtcttatagcacaatatacccaaatcagcccccccagtccgagggctgggcccaaggtatggtcggaggaggagctcctgcctgcggttttgtgtatgtgtgtatgtgtgtgcgtgtttgtgtgcgtgtttacctccacaggggacactctacactcagtgtaagatctgctgggaacagggccaccaggagtggctggatctcagtctctctgtctctctttctctccttttccttttggtgtatcaaatatttgattgacaaagtaagggccttgattaggaccaaattctcgtgtgttgctatggtctttatttaggacaacaattaacaatgcagtggcccattcttgtcactctacacatatgactatacgggacatatgtaatatataaatatatatataaaacattcccctctgtccccttggcttcggatggaggcctttctgttgagctgaaatgcacctgcagctgggtgctgccagcagcttgcaggccccagccctgttccaatcaatgcagttgacaataaaggaatgagtatcgtcacggaaaaaaaaaaaaaaaaaaaaaaa

SEQ ID NO: 221125 - DNA, 1000 bp, Homo Sapiens; identical to SEQ ID NO: 115764

SEQ ID NO: 221126 - DNA, 1000 bp, Homo Sapiens
ctgcctcaagagcaaccatgagcaggaggtcaataccctgcgctgccagcttggagaccgcctcaatgtggaggtggatgctgctcccactgtggacctgaatcgggtgctgaacgagaccaggagtcagtatgaggccctggtggaaaccaaccgcagggaagtggagcaatggttcaccacgcagaccgaggagctgaacaagcaggtggtatccagctcagagcagctgcagtcctaccaggcggagatcatcgagctgagacgcacagtcaacgccctggagatcgagctgcaggcccagcacaacctgcgagactctctggaaaacacgctgacagagagtgaggcccgctacagctcccagctgtcccaggtgcagagcctgatcaccaacgtggagtcccagctggcggagatccgcagtgacctggagcggcagaaccaggagtaccaggtgctgctggatgtgcgtgcccggctggagtgtgagatcaacacataccggagcctgctggagagcgaggactgcaatctgcccagcaatccctgtgccacgaccaacgcgtgcagcaagcccatcggaccctgtctctccaatccctgtacctcttgtgtccctcctgccccctgcacaccctgtgccccacgcccccgctgtgggccctgcaattccttcgtgcgctagaacctagggaatgccagaggagcaaggatgcagggcccaggactccagagctgtgacctggctctggttcaacaaaaggggcctgaaaacatcatttgcatggctggagttgcccgcgtaaggcagccaagaaactcacccaaagcctgtagcctccccaactactccagactgtcctgctcaccctttccttcctgggggtctgttccttcctatgctcacccagagaactctctgatgtgccagtgggcctcccttttaacctcctaataaatatcatttccttggcaaaaaaaaaaaaaaaaaaaaaaa

SEQ ID NO: 221127 - DNA, 1000 bp, Homo Sapiens
gagtccccccatcaccacttagcggaaagcttcctcttcctgccccaagtcagccccatggactctgggccctggggctgcatcctcacctacagagatggcttcaacgtctccatcatgtataacctcactgttctgggtctggagcccccaactcccttgacagtgtacgctggagcaggttccagggtggggctgccctgccgcctgcctgctggtgtggggacccggtctttcctcactgccaagtggactcctcctgggggaggccctgacctcctggtgactggagacaatggcgactttacccttcgactagaggatgtgagccaggcccaggctgggacctacacctgccatatccatctgcaggaacagcagctcaatgccactgtcacattggcaatcatcacagtgactcccaaatcctttgggtcacctggatccctggggaagctgctttgtgaggtgactccagtatctggacaagaacgctttgtgtggagctctctggacaccccatcccagaggagtttctcaggaccttggctggaggcacaggaggcccagctcctttcccagccttggcaatgccagctgtaccagggggagaggcttcttggagcagcagtgtacttcacagagctgtctagcccaggtgcccaacgctctgggagagccccaggtgccctcccagcaggccacctcctgctgtttctcacccttggtgtcctttctctgctccttttggtgactggagcctttggctttcacctttggagaagacagtggcgaccaagacgattttctgccttagagcaagggattcaccctccgcaggctcagagcaagatagaggagctggagcaagaaccggagccggagccggagccggaaccggagcccgagcccgagcccgagccggagcagctctgacctggagctgaggcagccagcagatctcagcagcccagtccaaataaacgtcctgtctagcagc

SEQ ID NO: 221128 - DNA, 1000 bp, Homo Sapiens
cagcagacaaggccacagtcaatggacttcctgagaaggacagagagacggacacctcggccctggctgcagggagttcccaggaggtgacgtatgctcagctggaccactgggccctcacacagaggacagcccgggctgtgtccccacagtccacaaagcccatggccgagtccatcacgtatgcagccgttgccagacactgaccccatacccacctggcctctgcacctgagggtagaaagtcactctaggaaaagcctgaagcagccatttggaaggcttcctgttggattcctcttcatctagaaagccagccaggcagctgtcctggagacaagagctggagactggaggtttctaaccagcatccagaaggttcgttagccaggtggtcccttctacaatcgagcagctccttggacagactgtttctcagttatttccagagacccagctacagttccctggctgtttctagagacccagctttattcacctgactgtttccagagacccagctaaagtcacctgcctgttctaaaggcccagctacagccaatcagccgatttcctgagcagtgatgccacctccaagcttgtcctaggtgtctgctgtgaacctccagtgaccccagagactttgctgtaattatctgccctgctgaccctaaagaccttcctagaagtcaagagctagccttgagactgtgctatacacacacagctgagagccaagcccagttctctgggttgtgctttactccacgcatcaataaataattttgaaggcctcacatctggcagccccaggcctggtcctgggtgcataggtctctcggacccactctctgccttcacagttgttcaaagctgagtgagggaaacaggacttacgaaaacgtgtcagcgttttctttttaaaatttaattgatcaggattgtacgtaaaaaaaaaaaaaaaaaaaaaaaaaaaaaaaaaaaaaaaaaaaaaaaaaaa

SEQ ID NO: 221129 - DNA, 1000 bp, Homo Sapiens
cagcacggtggttttacaatgttccagagcaggaacgccaggttgacaagctatggtaggattaggaaagtttgctgaagaggatctttgacgccacagtgggactagccaggaatgagggagaaatgccctttttggcaattgttggagctggataggtaagttttataagggagtacattttgactgagcacttagggcatcaggaacagtgctacttactggtgggtagactgggagaggtggtgtaacttagttcttgatgatcccacttcctgtttccatctgcttgggatataccagagtttaccacaagtgttttgacgatatactcctgagctttcactctgctggcttctcccaggcctcttctactatggcaggagatgtggtgtgctgttgcaaagttttcacgtcatcgtttcctggctagttcatttcattaagtggctacatcctaacatatgcattggtcaaggttgcagcaagaggactgaagattgactgccaagctagtttgggtgaagttcactccagcaagtctcaggccacaatggggtggtttggtttggtttccttttaactttctttttgttatttgcttttctcctccacctgtgtggtatattttttaagcagaattttattttttaaaataaaaggttctttacaagatgataccttaattacactcccgcaacacagccattattttattgtctagctccagttatctgtattttatgtaatgtaattgacaggatggctgctgcagaatgctggttgacacagggattattatactgctatttttccctgaattcttttccttggaattccaactgtggaccttttatatgtgccttcactttagctgtttgccttactctacagccttgctctccggggtggttaataaaatgcaacacttggcatttttatgttataagaaaaacagtattttatttataataaaatctgaatattttgtaacccttta

SEQ ID NO: 221130 - DNA, 1000 bp, Homo Sapiens
ttggaggaaggatttgtgtgtcggaggccactccgagggcaattctgttaggatttttggatctttctacagctacggggctccgggctactttgcagggatgcgatgcgtaggtgcctttctcttcctgctgaccacaagctctgtgctgggggtacctgtgccctgaagtcctggcccctgtgtcatagccccaagtacgactcactgagccatgctcattgcaggggaggctgggtctgggggtgcgtgacccaatccccttcctcctggcctggacgctgtggcttaagagtaacagcagccaccgcccagttccagtggccccacgaagcccccagtggctggctgtccagctgggcaaacagtggcacccctcccagctcttctgagtggggagtcttccaggcctcctcagaggtcttccctttgcctccccaggacagggtgagtcagagctcagcatttaatctcctctccaaagtagagagcaagtcgcccacagtgggcgtgtctgtaaatattgtgacagtatttttttactgtgctgttttttttgaaaggggatgggtaaaaagtagggtgttcttgttttttgcttgggagggtgggggtgggggagggtcttattttatcttatcttttctgtggatcagaaaaaacagaagccaaactcggggtcatctttgtttttaaagctgaagtgggactgtctggcactctgtgtatttatgcgttccagcatctggaacctcccatccctgccctcctcctgtgtagctgccacctccccgctgggcccagcatggctcacctgtcccgtgggctgtgtttcttgttgtttttctctttgcaaagacatagctaggaaagcgaatgataagggaaaagttctcagggaattgaagtgttgttgctatggtgacgtccttttgctgtgaataaaggtgctctttgcagcaaaaaaaaaaaaaaaaaaaaaaaaaaaaaaaaaaaaaaa

SEQ ID NO: 221131 - DNA, 1000 bp, Homo Sapiens
cccgcctatccgatgcctttcatcaccaccattctgggagggctgtacccatccaagtccatcctcctgtcaggcactgtcctgcccagtgctcagaggttccacatcaacctgtgctctgggaaccacatcgccttccacctgaacctccgttttgatgagaatgctgtggtccgcaacacccagatcgacaactcctgggggtctgaggagcgaagtctgccccgaaaaatgcccttcgtccgtggccagagcttctcagtgtggatcttgtgtggagctcactgcctcaaggtggccgtggatggtcagcacctgtttgaatactaccatcgcctgaggaacctgcccaccatcaacagactggaagtggggggcgacatccagctgacccatgtgcagacataggcggcttcctggccctggggccgggggctggggtgtggggcagtctgggtcctctcatcatccccacttcccaggcccagcctttccaaccctgcctgggatctgggctttaatgcagaggccatgtccttgtctggtcctgcttctggctacagccaccctggaacggagaaggcagctgacggggattgccttcctcagccgcagcagcacctggggctccagctgctggaatcctaccatcccaggaggcaggcacagccagggagaggggaggagtgggcagtgaagatgaagccccatgctcagtcccctcccatcccccacgcagctccaccccagtcccaagccaccagctgtctgctcctggtgggaggtggcctcctcagcccctcctctctgacctttaacctcactctcaccttgcaccgtgcaccaacccttcacccctcctggaaagcaggcctgatggcttcccactggcctccaccacctgaccagagtgttctcttcagaggactggctcctttcccagtgtccttaaaataaagaaatgaaaatgcttgttggcaaaaaaaaaaaaaaaaaaaaa

SEQ ID NO: 221132 - DNA, 1000 bp, Homo Sapiens
gggccacactcacccttgtccaggatgcagggactgccttctccttcctgcttcatccggcttagcttggggctggctgcattcccccaggatgggcttcgagaaagacaaacttgtctggaaaccagagttgctgattccacccggggggcccggctgactcgcccatcacctcatctccctgtggacttgggagctctgtgccaggcccaccttgcggccctggctctgagtcgctctcccacccagcctggacttggccccatgggacccatcctcagtgctccctccagatcccgtccggcagcttggcgtccaccctgcacagcatcactgaatcacagagcctttgcgtgaaacagctctgccaggccgggagctgggtttctcttccctttttatctgctggtgtggaccacacctgggcctggccggaggaagagagagtttaccaagagagatgtctccgggcccttatttattatttaaacatttttttaaaaagcactgctagtttacttgtctctcctccccatcgtccccatcgtcctccttgtccctgacttggggcacttccaccctgacccagccagtccagctctgccttgccggctctccagagtagacatagtgtgtggggttggagctctggcacccggggaggtagcatttccctgcagatggtacagatgttcctgccttagagtcatctctagttccccacctcaatcccggcatccagccttcagtcccgcccacgtgctagctccgtgggcccaccgtgcggccttagaggtttccctccttcctttccactgaaaagcacatggccttgggtgacaaattcctctttgatgaatgtaccctgtggggatgtttcatactgacagattatttttatttattcaatgtcatatttaaaatatttattttttataccaaatgaatcacttttttttttaagaaaaaaaagagaaatgaataaagaatctactcttcg

SEQ ID NO: 221133 - DNA, 1000 bp, Homo Sapiens
ggctttttcttaaatacatttaaattcagaattgcttgcaaaagattggcctggatagatagacatcctagatttaagatagtaccatcttaaaagtatgttgaaaggtaaaataaatcatttcaaaatacttaactttcctaataaggatgttaggttttcttctctttcattagctggccataagtcaaggtccttataacactaggaaattacctttttttactttcaaaattgcattatagtgaattactgtttacaaaatacacatactgtgaacagatataagtttctgtcttttataaggtttgtagaatgaatgtttttttaaagtgagtattatatgttaaatattttaagttttttataaatactagtaactgtttactaatttttgtttggtcaaatgcttgtaaatgtagctgaaagaagatagggagaaactgcggatcccaaactgttccctttttcatttcttgaaatgttaccactacagacatttttttaaggtgaataaacagttgtgatgtgctgtacctaaaatcatgtttaatcgtataaggaaacatttcaatacacttatacaggaagaaaactatagatgaagtacatgtgtgtgattcagtctgattcacagaattctgagagtaatatggaataaaacaactccacttagatgataactgaagcatttcctgccttgtgaaaatttggattttaaattgctgttagaatgggaaatttggacactttatatcattgtataatttcagaatttagtttctgtatcttttggaaaacatgattatagcaaaaacatagaaaataatctattactaaaacaccataaatgtaaaactagtatgcttggctgttaactctaaagatgttacttatgtctgtttttaaaacatgcatgtatttaacaattttatcatagtattgtcatggaaaaaataaatatattttcttacatcttaaaaaaaaaaaaaaaaaaaaa

SEQ ID NO: 221134 - DNA, 1000 bp, Homo Sapiens
ctgtaacctctgtcttggcagggctgtcccctcttgcttctccttgcatgagctggagggcctgtgtgagttacgcccctttccacacgccgctgccccagcaaccctgttcacgctccacctgtctggtccatagctccctggaggctgggccaggaggcagcctccgaaccatgccccatataacgcttgggtgcgtgggagggcgcacatcagggcagaggccaagttccaggtgtctgtgttcccaggaaccaaatggggagtctggggcccgttttccccccagggggtgtctaggtagcaacaggtatcgaggactctccaaacccccaaagcagagagagggctgatcccatggggcggaggtccccagtggctgagcaaacagccccttctctcgctttgggtcttttttttgtttctttcttaaagccactttagtgagaagcaggtaccaagcctcagggtgaagggggtcccttgagggagcgtggagctgcggtgccctggccggcgatggggaggagccggctccggcagtgagaggataggcacagtggaccgggcaggtgtccaccagcagctcagcccctgcagtcatctcagagccccttcccgggcctctcccccaaggctccctgcccctcctcatgcccctctgtcctctgcgttttttctgtgtaatctattttttaagaagagtttgtattattttttcatacggctgcagcagcagctgccaggggcttgggattttatttttgtggcgggcgggggtgggagggccattttgtcactttgcctcagttgagcatctaggaagtattaaaactgtgaagctttctcagtgcactttgaacctggaaaacaatcccaacaggcccgtgggaccatgacttagggaggtgggacccacccacccccatccaggaaccgtgacgtccaaggaaccaaacccagacgcagaacaataaaataaattccgtactccccaccc

SEQ ID NO: 221135 - DNA, 1000 bp, Homo Sapiens
ctccgaccgcttcctgatgcgagtcaacgagtcgtcctggcacgaggagtgtttgcagtgcgcggcgtgtcagcaagccctcaccaccagctgctacttccgggatcggaaactgtactgcaaacaagactaccaacagctcttcgcggccaagtgcagcggctgcatggagaagatcgcccccaccgagttcgtgatgcgggcgctggagtgcgtgtaccacctgggctgcttctgctgctgcgtgtgtgaacggcagctacgcaagggcgacgaattcgtgctcaaggagggccagctgctgtgcaagggtgactacgagaaggagaaggacctgctcagctccgtgagccccgacgagtccgactccgtgaagagcgaggatgaagatggggacatgaagccggccaaggggcagggcagtcagagcaagggcagcggggatgacgggaaggacccgcggaggcccaagcgaccccggaccatcctcaccacgcagcagcgaagagccttcaaggcctccttcgaggtctcgtcgaagccttgccgaaaggtccgagagacactggcagctgagacgggcctcagtgtgcgcgtggtccaggtctggtttcagaaccaaagagcaaagatgaagaagctggcgcggcggcaccagcagcagcaggagcagcagaactcccagcggctgggccaggaggtcctgtccagccgcatggagggcatgatggcttcctacacgccgctggccccaccacagcagcagatcgtggccatggaacagagcccctacggcagcagcgaccccttccagcagggcctcacgccgccccaaatgccagggaacgactccatcttccatgacatcgacagcgatacctccttaaccagcctcagcgactgcttcctcggctcctcagacgtgggctccctgcaggcccgcgtggggaaccccatcgaccggctctactccatgcagagttcctacttcgcctcctga

SEQ ID NO: 221136 - DNA, 1000 bp, Homo Sapiens
ccttccactgcggtaccaacctgtgcatcttcgagacgtggcgctgtgacggccaggaagactgccaggacggcagcgatgagcatgggtgcctggccgccgtgccccgcaaggtcatcacggcggcgctcattggcagcctggtgtgtggcctgctgctggtcatcgcgctgggctgcgccttcaagctctactcactgcgcacgcaggaatacagggccttcgagacccagatgacgcgcctggaggctgagtttgtgcggcgggaggcacccccatcctatggtcagctcatcgcccagggcctcattccacccgtggaggactttcctgtctacagtgcgtcccaggcctctgtgctgcagaatcttcgcacagccatgcggagacagatgcgtcggcacgcctcccgccgggggccctcccgccgccgcctcggccgcctctggaaccggctctttcaccggccgcgggcgccccgaggccagatcccactgctgaccgcagcacgcccctcacagaccgtgctgggcgatggcttcctccagcctgctccaggggctgcccccgaccccccagcaccgctcatggacacaggcagcaccagggcggccggagacaggccccccagtgcccccggccgtgcaccggaggtgggaccttcagggccacccttgccctcgggcctgcgagacccagagtgcaggcccgtggacaaggacagaaaggtctgcagggagccactggcagacggcccagctcctgcagatgcacctcgggagccctgctcagcccaggacccgcacccccaggtctccactgccagcagcaccctgggcccccactcgccagagccactgggggtctgcaggaaccccccgcccccctgctccccaatgctggaggccagcgatgatgaggccctgttggtctgttgaccgctgggctcgctggtgaccgccacagccccgctttgtaaccagggaatacacagtcattt

SEQ ID NO: 221137 - DNA, 1000 bp, Homo Sapiens
atgactaatgactatgtagttcatggaccagcttctgtgcctcttggttatgtgccacacccaagttctttgtcaggatctcttccaggaatgtctcgaggtaaatcaatgatcagctccctcagtatcatggggggaagcagtggacccccctatgaccgagcccatgttacaggagcatcatcaagtagttcttcaagcaccaaaggcacttacttccctgcaattttgaaccctccaccatccccagccacagagcgatcacattacactatggaatttggatattcttcaaacagtccttccactcataggtcatacagctacaggccatatagctaccggcactttgcaccccccaccacaccctgcagcacagatgtttgtgacagtgactatgctcctagtcggagaatgacctcagtggcaacagccaagggctataccagtgacttgaactatgattcagaacctgtgcccccacctcccacaccccgaagccaatacttgtcagcagaggagaactatgaaagctgcccaccttctccatacacagagaggagctattctcatcacctctacccaccgccaccctctccctgtacagactcctcctgaggaggggccctcctcctctgactgcctccaacgtaaaaatgtaaatataaatttggttgagatctggagggggggagggagctattagagaaggatgaggcagaccatgtacagttaaaattataaaatggggtagggaatactggagatatttgtacagaagaaaaggatatttatatattttcttaaaacagcagatttgctgcttgtgccataaaagtttgtataaaaaaaatttgtactaaaagttttatttttgcaaactaaatacacaaagcatgccttaaacccagtgaagcaactgagtacaaaggaaacaggaataataaaggcatcactgaccaggaatatctgggctttattgataccaaaaaaaaaaaaa

SEQ ID NO: 221138 - DNA, 1000 bp, Homo Sapiens
tttcaccatgttggccaggctggtctcgaactcgtgaccgcagtgatcctcccgcctcggcctcccaaagtgctgggattacaggcatgagccaccgcgcctggcctctgcttactttttatatagcaaaatgattccccttggcaagatgtttcttatattattccaaagttatttcataccattattatgtaaatatgaagagtttttttctgtttataattgtttataaaacaatgacttttaaagatttagtgcttaacattttcccaagtgtgggaacattatttttagattgagtaggtaccttgtagcagtgtgctttgcattttctgatgtattacatgactgtttcttttgtaaagagaatcaactaggtatttaagactgataattttacaatttatatgcttcacatagcatgtcaacttttgactaagaattttgttttacttttttaacatgtgttaaacagagaaagggtccatgaaggaaagtgtatgagttgcatttgtaaaaatgagactttttcagtggaactctaaaccttgtgatgactactaacaaatgtaaaattatgagtgattaagaaaacattgctttgtggttatcactttaagttttgacacctagattatagtcttagtaatagcatccactggaaaaggtgaaaatgttttattcagcatttaacttacatttgtactttagagtatttttgtataaaatccatagatttattttacatttagagtatttacactatgataaagttgtaaataattttctaagacagtttttatatagtctacagttgtcctgatttcttattgaatttgttagactagttctcttgtcttgtgatctgtgtacaattttagtcactaagactttcctccaagaactaagccaacttgatgtgaaaagcacggctgtatataatggtgatgtcataataaagttgttttatcttttaagtaaaaaaaaaaaaaaaaaaaaa

SEQ ID NO: 221139 - DNA, 1000 bp, Homo Sapiens
tatggttgtattattttttaaaaaaattccaagtgattgaaacctacacgagatacagaattttatgcggcattttcttctcacatttatatttttgtgattttgtgattgattatatgtcactttgctacagggctcacagaattcattcactcaacaaacataatagggcgctgagggcatagaagtaaaaacacctggtccctgctctcagttcactgtcttgttggacgagaaaagaaacaataacgataaaagacagtgaaagaaaataacgataaaagacagtgaaagaaaataacaataaaagacaaggaaaaaataacaatgaaagttgataagtacatgataagcgaggttccccgtgtgtaggtagatctggtctttagaggcagatagataggtcagtgcaaatactctggtccatgggccatatgaaaaggctaagcttcactgtaaaataataactgggaattctggattgtgtatgggtgttggtgaacttggttttaattagtgaactgctgagagacagagctattctccatgtactggcaagacctgatttctgagcatttaatatggatgccgtgggagtacaaaagtggagtgtggcctgagtaatgcattatgggtggtttaccatttcttgaggtaaaagcatcacatgaacttgtaaaggaatttaaaaatcctactttcataataagttgcataggtttaataatttttaattatatggcttgagtttaaattgtaataggcgtaactaattttaactctataatgtgttcattctggaataatcctaaacatatgaattatgtttgcatgttcacttccaagagcctttttttgaaaaaaagctttttttgaatcatcaagtctttcacatttaaataaagtgtttgaaagctttatttaaaaaaaaaaaaaaaaaaaaaaaaaaaaaaaaaaaaaaaaaaaaaaaaaaaaaaaaaaaaaaaaaaaaagaaaaaaa

SEQ ID NO: 221140 - DNA, 1000 bp, Homo Sapiens
gtcatggcccccgcagcggcgacggggggcagcaccctgcccagtggcttctcggtcttcaccaccttgcccgacttgctcttcatctttgagtttatcttcgggggcctggtgtggatcctggtggcctcctccctggtgccctggcccctggtccagggctgggtgatgttcgtgtctgtgttctgcttcgtggccaccaccaccttgatcatcctgtacataattggagcccacggtggagagacttcctgggtcaccttggacgcagcctaccactgcaccgctgccctcttttacctcagcgcctcagtcctggaggccctggccaccatcacgatgcaagacggcttcacctacaggcactaccatgaaaacattgctgccgtggtgttctcctacatagccactctgctctacgtggtccatgcggtgttctctttaatcagatggaagtcttcataaagccgcagtagaacttgagctgaaaacccagatggtgttaactggccgccccactttccggcataactttttagaaaacagaaatgcccttgatggtggaaaaaagaaaacaaccacccccccactgcccaaaaaaaaaagccctgccctgttgctcgtgggtgctgtgtttactctcccgtgtgccttcgcgtccgggttgggagcttgctgtgtctaacctccaactgctgtgctgtctgctagggtcacctcctgtttgtgaaaggggaccttcttgttcgggggtgggaagtggcgaccgtgacctgagaaggaaagaaagatcctctgctgacccctggagcagctctcgagaactacctgttggtattgtccacaagctctcccgagcgccccatcttgtgccatgttttaagtcttcatggatgttctgcatgtcatggggactaaaactcacccaacagatctttccagaggtccatggtggaagacgataaccctgtgaaatactttataaaatgtcttaatgttc

SEQ ID NO: 221141 - DNA, 1000 bp, Homo Sapiens
ccaatagtaatttatgtgacctggggcaggataccgtcagtgaggtgcccagagctgcaccctttcctccatttcccatcccccatctcctcaaccaccagggtctgagttctagcagggtcctgggggtatcccactgctatactgttctactgcttccctcagtatctgaatgtctcaatttaaaacttgaagctctttagaccaatagactggtgagaggagaaaggagcttatcccccagaccctgctttataccattcacatcccagggctgtgtccagacagcacaaaacggcaaggagagcccaagccccaatgccagaattcttccaaactccctgactctttgaagtttttactcaccccatttcaattatcctgatcccttctcatcccctgcttggcttctctgcatgtggtcatctgctgtggcttggtgtttaatgggttaaaaataagccactgcctgacatcccaacatttgacaccccagcaatgtgtgactcccccaacattccactatgccatcctgcagctgaaatgggaacactggctgcctctccaaacccgctcttggacagaggatctgggaggtggaagccaggccagaggacttggggaaaatgagatggaggaaggaaaaagggagaagctgagccacagcttaactcctacagagtgaaatgaaaacgggctgaaaataccaccccaggagaggacctcgccccaagcaagccagtgagcagccctgccagactactgccagactgagaaacccagaagctggtagtcatgtgggcttgccttctctgccaaacgactgggaaaccaaaatgagcccaccttgtgttcttcctagctccaccctccccgtgctgctgtgttctgctcctccccacgcttccctgctatagttcccagctgctgtaacggagccacctccaactctaacaataaaccaagttcattgcagatagtgtaaaaaaaaaaaaaaaaa

SEQ ID NO: 221142 - DNA, 1000 bp, Homo Sapiens
aacttcagagagcatgctaaagcccgtgtggaccatggggctgagatcattacacagtccccaggcagatccagcgtggcatcaccccgacgactcagcaatgtctcctcgtctggaagcatcaacctgctcgaatctcctcagcttgccactttggctgaggatgtcactgctgcactcgctaagcagggcttgtgaatatttctcatttagcattgaaataataatatttaggcatgagctcttggcaggagtgggctctgagcagttgttatattcattctttataaaccataaaataaataatctcatccccaaactgtagtaattgttacaattttctatttaaaaaatgaatagtacatgcagaaattgacctgatttccatttgcaacaggaagacactggctttacatgggttcaattggacaattatttttgctctgctctgttttgcatggagtattattattttaaaaattgcatttttacctttcatgtgcctgaaggctatccactacattctgaaggccttgttaaaatccaagctgctcatttcactattctgtttctgagtgagaagataaaaactgcccattgtaacttatttcaggttaaattaaaccaaggagtctgattgcaggaagggaagagcatgtaagaaataagtttttttaaagtgttattttgtataaatgggaagaaagattcaattaagttattaacatttgggacctggataattatatcagagtatgtcagtccaataaattatttaactaattaaaaaatagttgcaaagcatttgagctgtggttgaggaagtggtgtttagaatgtcagttgatcagctagatttgtgtccacactaccagtttcaccccccctttcatctgtttgatacagtattatagatataaatatatatatatttctctgaggccatttgggatacttcctcatatactcgaatattataacttcttattcacaggatctg

SEQ ID NO: 221143 - DNA, 1000 bp, Homo Sapiens
tttgtagtcattgtatcacggattacaatgaacgcagtgcagagccccaaagctcaggctattgttaaatcaataatgttgtgaagtaaaacaatcagtactgagaaacctggtttgccacagaacaaagacaagaagtatacactaacttgtataaatttatctaggaaaaaaatccttcagaattctaagatgaatttaccaggtgagaatgaataagctatgcaaggtattttgtaatatactgtggacacaacttgcttctgcctcatcctgccttagtgtgcaatctcatttgactatacgataaagtttgcacagtcttacttctgtagaacactggccataggaaatgctgtttttttgtactggactttaccttgatatatgtatatggatgtatgcataaaatcataggacatatgtacttgtggaacaagttggattttttatacaatattaaaattcaccacttcagagaatggtattcagtgcaaaaattcttagtttaactttaaatggaagatatgtatgtatgagaaatggccaacatgcctatgaaaaaaatgctgaatctcatcagtaatcaggaaaatgcaggttaaaacaataccatttttcacccatcagcttagcaaaaatgagtatattttttaacaagtgttggtaaggatgtggaaatgtgaggttcttgtagtaagaatgcaaatggcactctttgtagagtaagtctgttgacatctcataaaactgaaaatgcacacaaccctgtaaatctagcaactgcactcagttgatttcagcccatacatacaaagagacctgcataagaatgttactaggctttgtaaaagcaaaaaataaggaacaacttaaacatcatcagaaggggaactgataaactctggtgtaatccataccacagaaatacaacaccgcatgtacaggaatgtgctacatctatacaaataaatggtcaaactcaaaaaaaaaaaaaaaa

SEQ ID NO: 221144 - DNA, 1000 bp, Homo Sapiens
tattgccaatgttcctgctaataatttgccattatctgtattaatgcttgaatattactggataaattgtatgaagatcttctgcagaatcagcatgattcttccaaggaaatacatatgcagatacttattaagagcaaactttagtgtctctaagttatgactgtgaaatgattggtaggaaatagaatgaaaagtttagtgtttctttatctactaattgagccatttaatttttaaatgtttatattagataaccatattcacaatggaaactttaggtctagtttcttttgatagtatttataatataaatcaatcttattactgagagtgcaaattgtacaaggtatttacacatacaacttcatataactgagatgaatgtaattttgaactgtttaacactttttgttttttgcttattttgttggagtattattgaagatgtgatcaatagattgtaatacacatatctaaaaatagttaacacagatcaagtgaacattacattgccatttttaattcattctggtctttgaaagaaatgtactactaaagagcactagttgtgaatttagggtgttaaactttttaccaagtacaaaaatcccaaattcactttattattttgcttcaggatccaagtgacaaagttatatatttataaaattgctataaatcgacaaaatctaatgttgtctttttaatgttagtgatccacctgcctcagcctcccaaagtgctgggattacaggcttgaaagtctaacttttttttacttatatatttgatacatataattcttttggctttgaaacttgcaactttgagaacaaaacagtcctttaaattttgcactgctcaattctgtttttcgtttgcattgtctttaatataataaaagttattacctttacatattatcatgtctatttttgatgactcatcaattttgtctattaaagatatttctttaaattaaaaaaaaaaaaaaaaa

SEQ ID NO: 221145 - DNA, 1000 bp, Homo Sapiens
aagaaataaaaccaactgccctcataggagttgctgcaattggtggtgcattctcagaacaaattctcaaagatatggctgccttcaatgaacggcctattatttttgctttgagtaatccaactagcaaagcagaatgttctgcagagcagtgctacaaaataaccaagggacgtgcaatttttgccagtggcagtccttttgatccagtcactcttccaaatggacagaccctatatcctggccaaggcaacaattcctacgtgttccctggagttgctcttggtgttgtggcgtgtggattgaggcagatcacagataatattttcctcactactgctgaggttatagctcagcaagtgtcagataaacacttggaagagggtcggctttatcctcctttgaataccattagagatgtttctctgaaaattgcagaaaagattgtgaaagatgcataccaagaaaagacagccacagtttatcctgaaccgcaaaacaaagaagcatttgtccgctcccagatgtatagtactgattatgaccagattctacctgattgttattcttggcctgaagaggtgcagaaaatacagaccaaagttgaccagtaggataatagcaaacatttctaactctattaatgaggtctttaaacctttcataatttttaaaggttggaatcttttataatgattcataagacacttagattaagattttactttaacagtctaaaaattgatagaagaatatcgatataaattgggataaacatcacatgagacaattttgcttcactttgccttctggttatttatggtttctgtctgaattattctgcctacgttctctttaaaagctgttgtacgtactacggagaaactcatcatttttatacaggacactaatgggaagaccaaaattactaataaattgaaataaccaacattaaaactcataattattttgttgaccattttgttaaaatctacttttc

SEQ ID NO: 221146 - DNA, 1000 bp, Homo Sapiens; identical to SEQ ID NO: 115787

SEQ ID NO: 221147 - DNA, 1000 bp, Homo Sapiens; identical to SEQ ID NO: 115788

SEQ ID NO: 221148 - DNA, 1000 bp, Homo Sapiens
gtaaagatcctctggaaaaagactccgagagttataactactgtagtataaatataggaactaagttaaacttgtacatttctgttgatcacgccgttatgttgcctcaaatagttttagaagagaaaaaaaaatatatccttgttttccacactatgtgtgttgttcccaaaagaatgactgttttggttcatcagtgaattcaccatccaggagagactgtggtatatattttaaacctgttgggccaatgagaaaagaaccacactggagatcatgatgaacttttggctgaacctcatcactcgaactccagcttcaagaatgtgttttcatgcccggcctttgttcctccataaatgtgtcctttagtttcaaacagatctttatagttcgtgcttcataagccaattcttattattatttttgggggactcttcttcaaagagcttgccaatgaagatttaaagacagagcaggagcttcttccaggagttctgagccttggttgtggacaaaacaatcttaagttgggcagctttcctcaacacaaaaaaaagttattaatggtcattgaaccataactaggactttatcagaaactcaaagcttgggggataaaaaggagcaagagaatactgtaacaaacttcgtacagagttcggtctattaattgtttcatgttagatattctatgtgtttacctcaattgaaaaaaaaaagaatgtttttgctagtatcagatctgctgtggaattggtattgtatgtccatgaattcttcttttctcagcacgtgttcctcactagaagaaaatgctgttacctttaagctttgtcaaatttacattaaaatacttgtatgaggactgtgacgttatgttaaaaaaaaaaaggtgttaagtcacaaaaagcggtaataaatatttcatttttgaaaaaaaaaaaaaaaaaaaaaaaaaaaaaaaaaaaaaaaaaaaaaaaaaaaaaaaaaaaaaaaa

SEQ ID NO: 221149 - DNA, 1000 bp, Homo Sapiens
tacgtaggccaacctcaaaactttcagtaggaatgttgctatgatcaagttgttctaacactttagacttagtagtaattatgaacctcacatagaaaaatttcatccagccatatgcctgtggagtggaatattctgtttagtagaaaaatcctttagagttcagctctaaccagaaatcttgctgaagtatgtcagcaccttttctcaccctggtaagtacagtatttcaagagcacgctaagggtggttttcattttacagggctgttgatgatgggttaaaaatgttcatttaagggctacccccgtgtttaatagatgaacaccacttctacacaaccctccttggtactgggggagggagagatctgacaaatactgcccattcccctaggctgactggatttgagaacaaatacccacccatttccaccatggtatggtaacttctctgagcttcagtttccaagtgaatttccatgtaataggacattcccattaaatacaagctgtttttactttttcgcctcccagggcctgtgcgatctggtcccccagcctctcttgggctttcttacactaactctgtacctaccatctcctgcctcccttaggcaggcacctccaaccaccacacactccctgctgttttccctgcctggaactttcccaccagccccaccaagatcatttcatccagtcctgagctcagcttaagggaggcttcttgcctgtgggttccctcacccccatgcctgtcctccaggctggggcaggttcttagtttgcctggaattgttctgtacctctttgtagcacgtagtgttgtgaaactaagccactaattgagtttctggctcccctcctggggttgtaagttttgttcattcatgagggccgactgtatttcctggttactgtatcccagtgaccagccacaggagatgtccaataaagtatgtgatgaaatggtcttaaaaaaaaaaaaaaaaaaaaaa

SEQ ID NO: 221150 - DNA, 1000 bp, Homo Sapiens; identical to SEQ ID NO: 115793

SEQ ID NO: 221151 - DNA, 1000 bp, Homo Sapiens
tgaagtccagaagcttcgtctattcccggggaagaaagctggtcggtggggttaaccaggatgtagagtacagttcaatcacggaccagcaattgacgacggaatggcaatgccaagttcaaaagatcacgcgctctcatagcacagatattccttacattgtgtcggaagctgcagtgcaagctgagcataaagagcagtttgcagatatgcaagatgaacaccatgtcgctgaagcaattcctcgaatccctcgcttgtccctaaccattactgacagaaatgggatggaaaacttactgtctgtgaagccagatcaaactttgggattcccatctctcaggtcaaaaagtttacatggacatcctaggaatgtgaaatccattcagggaaagttagacagatctggacatgccagtagtgtaagcagcttagtaattgtgtctggaatgacagcagaagaaaaaaaggttaagaaagagaaagcttccacagaaactgaatgctagtctgttttgtttctttaatttttttttttaacagtcagaaccactaatgggtgtcatcttggccatctaaacatcatcaatttctaaaaacattttcccttaaaaaattttggaaattcagacttgatttacaatttaatgcactaaaagtagtattttgttagcatatgttagtaggcttagttttttcagttgcagtagtatcaaatgaaagtgatgatactgtaacgaagataaattggctaatcagtatacaagattatacaatctctttattactgagggccaccaaatagcctaggaagtgccctcgagcactgaagtcaccattaggtcacttaagaagtaagcaactagctgggcacagtggctcatgcctgtaatcctagcactttgggaggccaaggcagaaagatagcttgagtccaggagtttgagaccagcctgggcaacatagtgataccccatctcttaaaaaaaaaaaaaaaaaa

SEQ ID NO: 221152 - DNA, 1000 bp, Homo Sapiens
acacatggtctgtcaatgagagcataatttaaaaatatatttataaggaaattttacaagggcataaagtaaatacatgcatataatgaataaatcattcttactaaaaagtataaaatagtatgaaaatggaaatttgggagagccatacataaaagaaataaaccaaaggaaaatgtctgtaataatagactgtaacttccaaataaataattttcattttgcactgaggatattcagatgtatgtgcccttcttcacacagacactaacgaaatatcaaagtcattaaagacaggagacaaaagagcagtggtaagaatagtagatgtggcctttgaattctgtttaattttcacttttggcaatgactcaaagtctgctctcatataagacaaatattcctttgcatattataaaggataaagaaggatgatgtctttttattaaaatatttcaggttcttcagaagtcacacattacaaagttaaaattgttatcaaaatagtctaaggccatggcatccctttttcataaattatttgattatttaagactaaaagttgcattttaaccctattttacctagctaattatttaattgtccggtttgtcttggatatataggctattttctaaagacttgtatagcatgaaataaaatatatcttataaagtggaagtatgtatattaaaaaagagacatccaaatttttttttaaagcagtctactagattgtgatcccttgagatatggaaggatgcctttttttctctgcatttaaaaaaatcccccagcacttcccacagtgcctattgatacttggggagggtgcttggcacttattgaatatatgatcggccatcaagggaagaactattgtgctcagagacactgttgataaaaactcaggcaaagaaaatgaaatgcatatttgcaaagtgtattaggaagtgtttatgttgtttataataaaaatatattttcaacagaaaaaaaa

SEQ ID NO: 221153 - DNA, 1000 bp, Homo Sapiens
gccacattaagaatgccctgctcagccagaatccggagaagtttgtgtaccctgtcccatatacaacacggccgccaaggaagagtgaggaagatgggaaggagtaccactttatctcaacggaggagatgacgaggaacatctctgccaatgagttcttggagtttggcagctaccaaggcaacatgtttggcaccaaatttgaaacagtgcaccagatccataagcagaacaagattgccatccttgacattgagccccagaccctgaaaattgttcggacagcagaactttcgcctttcattgtgttcattgcacctactgaccagggcactcagacagaagccctgcagcagctgcagaaggactctgaggccatccgcagccagtacgctcactactttgacctctcactggtcaataatggtgttgatgaaacccttaagaaattacaagaagccttcgaccaagcgtgcagttctccacagtgggtgcctgtctcctgggtttactaagcttgtagaatgggggaacccactgtatgcccctctccagcatttggaattccacccgccttgctttaagacaaacagggctgctccaactagttttgtgtcagcttccagctctctgcagctatcctaattcagccagtaaggttcagtcttcttgctcaggctcctgaagggttgattctcctgatagatggggccccactgatctggatttgaaaaggatttctagaaattgggggtaagaagtactaccaaaatgtaactgctaatcaagggtgatgcacagcaaaagcaatggaccccatccctctaaagcctgccctcctttgccttcaactgtatatgctgggtatttcatttgtctttttattttggagaaagcgtttttaactgcaactttctataatgccaaaatgacacatctgtgcaatagaatgatgtctgctctagggaaaccttcaaaagcaataaaaatgctgtgttgg

SEQ ID NO: 221154 - DNA, 1000 bp, Homo Sapiens; identical to SEQ ID NO: 115797

SEQ ID NO: 221155 - DNA, 1000 bp, Homo Sapiens
acagacttctcttcttcattaaaatgaagactacatttgtgaacaaaaaatggagaattaaaaataccaactgtacaaaataactctccagtaacagcctatctttgtgtgacatgtgagcataaaattatgaccatggtatattcctattggaaacagagaggtttttctgaagacagtctttttcaagtttctgtcttcctaacttttctacgtataaacactcttgaatagacttccactttgtaattagaaaattttatggacagtaagtccagtaaagccttaagtggcagaatataattcccaagcttttggagggtgatataaaaatttacttgatatttttatttgtttcagttcagataattggcaactgggtgaatctggcaggaatctatccattgaactaaaataattttattatgcaaccagtttatccaccaagaacataagaattttttataagtagaaagaattggccaggcatggtggctcatgcctgtaatcccagcactttgggaggccaaggtaggcagatcacctgaggtcaggagttcaagaccagcctggccaacatggcaaaaccccatctttactaaaaatataaagtacatctctactaaaaatacgaaaaaattagctgggcatggtggcgcacacctgtagtcccagctactccggaggctgaggcaggagaatctcttgaacctgggaggcggaggttgcaatgagccgagatcacgtcactgcactccagcttgggcaacagagcaagactccatctcaaaaaaaaaaaaagaaaaaagaaaagaaatagaattatcaagcttttaaaaactagagcacagaaggaataaggtcatgaaatttaaaaggttaaatattgtcataggattaagcagtttaaagattgttggatgaaattatttgtcattcattcaagtaataaatatttaatgaatacttgctataaaaaaaaaaaaaaaaaaaaaaaaaa

SEQ ID NO: 221156 - DNA, 1000 bp, Homo Sapiens
aatcagctcaatcttcaatgaatactggtctctttccaaagcatttttgatcaaagtaaagactgagtcaagggctttttttttttctttttcttgttttaagagacagagccttgttctattgcacaggctggactacacgcattcacctagagtctagaacacaatttaatttattgggttctaggagaactgtcatgagtattgataatatgagagttctttatattcaaacattattctcaaccagagatagggatgtcatagaagaaaatccattcattcaatcattaattcacatgtccattatgtacctccatgagctggacataacagctaataagagataattgtctctggttttacagagctaattgtccctaagagatgtagacaaatgaacaagcaattacaatacatctaagctatactgggggaggaacagggctggataggtatgcagaggagataaaaaaattttaattccttagaatattttttaaaaattgattcttattttaccttctcatcttcttattttccaaattacagcatatatatatatttttttaagttttgaagtgtagtcgagcttgggcaatttatccaacccatttaaaccaaaaataaaacttttcatgtattacctggtcatttcaaacaaaaatattttgatcatgaaaaagaataccaatattcttttgttctaaaaatctcttatgggattacatgttatatttttggtttctctctactgatcaacagactacattttcacaactcttctttcctttacgttttaacacacagacccaagattcatactattaagattctagtagaactctagatggtatgcctctgtgtatctcagcatttttattcccactcttgtataatgaacatgttaacacctacctcacagggttgttgtgaggatcaagtaagatattgtgtgtgtgaagatgctctgtgaaatcataaagtcctttaaagatgt

SEQ ID NO: 221157 - DNA, 1000 bp, Homo Sapiens
ccggccgcttcccgcggggcctcagcccacccgcgcgtccccacggccgccgcgaagacgtgggccccggcctgggcctggcgccctcggccaccctcgtgtcgctgtcgtccgtgtccgactgcaactccacgcgttcactgctgcgctctgacagtgacgaggccgcaccggccgcgccctccccaccaccctccccgcccgcgcccacacccacgccctcgcccagcaccaaccccctggtggacctggagctggagagcttcaagaaggacccccgccagtcgctcacgcccacccacgtcacggctgcatgcgctgtgagccgcgggcaccggcggacgccatcggatggggcgctggggcagcgggggccgcccgagcccgcgggccatggccctggccctcgtgaccttctggacttcccccgcctgcccgacccccaggccctgttcccagcccgccgccggccccctgagttcccaggccgccccaccaccctgacctttgccccgagacctcggccggctgccagtcgcccccgcttggacccctggaaactggtctccttcggccggacactcaccatctcgcctcccagcaggccagacactccggagagccctgggccccccagcgtgcagcccacactgctggacatggacatggaggggcagaaccaagacagcacagtgcccctgtgcggggcccacggctcccactaaggcctgcccaccaccgcccgcctgggcagccatgaatgtagcgccccaggccctgccccagcccgccatgccacaaggtgggggaggccctgggcaggatgttcactctatttattggggaaggagggaggggggggacacttaacttattcctttgtaccccagggggtggagccctgtgcccaccctgcactggggggagggtgggcagggatactcagggacagggcatcatgggggatttggcacaaaatggagcattaaaggtaacccct

SEQ ID NO: 221158 - DNA, 1000 bp, Homo Sapiens
ttcatccgctcacctcagcggaaccccaccgtgaaggacctcatcagctttggcctgcaggtagcccgcggcatggagtacctggcagagcagaagtttgtgcacagggacctggctgcgcggaactgcatgctggacgagtcattcacagtcaaggtggctgactttggtttggcccgcgacatcctggacagggagtactatagtgttcaacagcatcgccacgctcgcctacctgtgaagtggatggcgctggagagcctgcagacctatagatttaccaccaagtctgatgtgtggtcatttggtgtgctgctgtgggaactgctgacacggggtgccccaccataccgccacattgacccttttgaccttacccacttcctggcccagggtcggcgcctgccccagcctgagtattgccctgattctctgtaccaagtgatgcagcaatgctgggaggcagacccagcagtgcgacccaccttcagagtactagtgggggaggtggagcagatagtgtctgcactgcttggggaccattatgtgcagctgccagcaacctacatgaacttgggccccagcacctcgcatgagatgaatgtgcgtccagaacagccgcagttctcacccatgccagggaatgtacgccggccccggccactctcagagcctcctcggcccacttgacttagttcttgggctggacctgcttagctgccttgagctaaccccaaggctgcctctgggccatgccaggccagagcagtggccctccaccttgttcctgccctttaactttcagaggcaataggtaaatgggcccattaggtccctcactccacagagtgagccagtgagggcagtcctgcaacatgtatttatggagtgcctgctgtggaccctgtcttctgggcacagtggactcagcagtgaccacaccaacactgacccttgaaccaataaaggaacaaatgactattaaagcacaaaaaaaaaa

SEQ ID NO: 221159 - DNA, 1000 bp, Homo Sapiens
aaaatttatatacatatgtgctttttttctatatctcaccttcccaaaagacactgtgtaagtccatttgttgtattttcttaaagagggagacaaattatttgcaaaatgtgctaaagtcaatgatttttacgggattattgacttctgcttatggaaaacaaagaaacagacacaatgcacacagaaaatattagatatggagagattattcaaagtgaaggggacacatcatatttctgcattttacttgcattaaaagaaacctctttatatactacagttgttcctatctctcccccgccccccaccgccccaccacacacatatttttaaagtttttccttttttaagaatatttttgtaagaccaatacctgggatgagaagaatcctgagactgcctggaggtgaggtagaaaattagaaatacttcctaattcttctcaaggctgttggtaactttatttcagataattggagagtaaaatgttaaaacctgttgagaggaattgatggtttctgagaaatactaggtacattcatcctcacagattgcaaaggtgatttgggtgggggtttagtaattttctgcttaaaaaatgagtatcttgtaaccattacctatatgctaaatattcttgaacaattagtagatccagaaagaaaaaaaaatatgctttctctgtgtgtgtacctgttgtatgtcctaaacttattagaaaattttatatacttttttacatgttggggggcagaaggtaaagccatgttttgacttggtgaaaatgggattgtcaaacagcccattaagttccctggtatttcaccttcctgtccatctgtcccctccctccggtatacctttatccctttgaaagggtgcttgtacaatttgatatattttattgaagagttatctcttattctgaattaaattaagcatttgttttattgcagtaaagtttgtccaaactcacaattaaaaaaaaaaaaaaaaa

SEQ ID NO: 221160 - DNA, 1000 bp, Homo Sapiens
gtgcccgctgggattcgaagtgaagagcaagatggtgcctggaaggtgctgtcccttctactggtgtgagtccaagggggtgtgtgttcacgggaatgctgagtaccagcccggttctccagtttattcctccaagtgccaggactgcgtgtgcacggacaaggtggacaacaacaccctgctcaacgtcatcgcctgcacccacgtgccctgcaacacctcctgcagccctggcttcgaactcatggaggcccccggggagtgctgtaagaagtgtgaacagacgcactgtatcatcaaacggcccgacaaccagcacgtcatcctgaagcccggggacttcaagagcgacccgaagaacaactgcacattcttcagctgcgtgaagatccacaaccagctcatctcgtccgtctccaacatcacctgccccaactttgatgccagcatttgcatcccgggctccatcacattcatgcccaatggatgctgcaagacctgcacccctcgcaatgagaccagggtgccctgctccaccgtccccgtcaccacggaggtttcgtacgccggctgcaccaagaccgtcctcatgaatcattgctccgggtcctgcgggacatttgtcatgtactcggccaaggcccaggccctggaccacagctgctcctgctgcaaagaggagaaaaccagccagcgtgaggtggtcctgagctgccccaatggcggctcgctgacacacacctacacccacatcgagagctgccagtgccaggacaccgtctgcgggctccccaccggcacctcccgccgggcccggcgctcccctaggcatctggggagcgggtgagcggggtgggcacagcccccttcactgccctcgacagctttacctcccccggaccctctgagcctcctaagctcggcttcctctcttcagatatttattgtctgagtctttgttcagtccttgctttccaataataaactcagggggacatgc

SEQ ID NO: 221161 - DNA, 1000 bp, Homo Sapiens
ttgttaaagagcactgggtcatatggaaaaaatgtatgtgtctccccaggtgcattttcttggtttatgtcttgttcttgagattttgtatatttaggaaaacctcaagcagtaattaatatctcctggaacactatagagaaccaagtgaccgactcatttacaactgaaacctaggaagcccctgagtcctgagcgaaaacaggagagttagtcgccctacagaaaacccagctagactattgggtatgaactaaaaagagactgtgccatggtgagaaaaatgtaaaatcctacagtggaatgagcagcccttacagtgttgttaccaccaagggcaggtaggtattagtgtttgaaaaagctggtctttgagcgagggcataaatacagctagccccaggggtggaacaactgtgggagtcttgggtactcgcacctcttggctttgttgatgctccgccaggaaggccacttgtgtgtgcgtgtcagttacttttttagtaacaattcagatccagtgtaaacttccgttcattgctctccagtcacatgcccccacttccccacaggtgaaagtttttctgaagtgttgggattggttaaggtctttatttgtattacgtatctccccaagtcctctgtggccagctgcatctgtctgaatggtgcgtgaaggctctcagaccttacacaccattttgtaagttatgttttacatgccccgtttttgagactgatctcgatgcaggtggatctccttgagatcctgatagcctgttacaggaatgaagtaaaggtcagttttttttgtattgattttcacagctttgaggaacatgcataagaaatgtagctgaagtagaggggacgtgagagaagggccaggccggcaggccaaccctcctccaatggaaattcccgtgttgcttcaaactgagacagatgggacttaacaggcaatggggtccacttccccctcttcagcatcccccgtacc

SEQ ID NO: 221162 - DNA, 1000 bp, Homo Sapiens
cttgcaagacctgcaagagaaaatctgcccccactgaccggcgaaaagccgccaccctgcgcgaaaggaggaggctaaagaaaatcaacgaggccttcgaggcactgaagcggcgaactgtggccaaccccaaccagaggctgcccaaggtggagattctgcggagcgccatcagctatattgagcggctgcaggacctgctgcaccggctggatcagcaggagaagatgcaggagctgggggtggaccccttcagctacagacccaaacaagaaaatcttgagggtgcggatttcctgcgcacctgcagctcccagtggccaagtgtttccgatcattccagggggctcgtgataacggctaaggaaggaggagcaagtattgattcgtcagcctcgagtagccttcgatgcctttcttccatcgtggacagtatttcctcggaggaacgcaaactcccctgcgtggaggaagtggtggagaagtaactgagcctgcgcttgagaccttctccacgcagcaggaagatcccaccgacccttcctggcctaatcctttagattaggtcacattacattaacatttaggaacccagaccgaaaagttgctgaaagggaaggagacacattcacaaagaaaagttgcgaaaattgcgaaatctgttgtgcacgctcaaatgaaaacgcctttcggctttgggcttttatttttttggaactgcgagtggcttaggtctagcctcattttgtttttgtttggttggttttatactatattaacttttattacggtgatccttttgtgccatgttcaaaagaagttcattcctgtctgaagtgggaaagttgcatttaatgttaggggtatttaatgtatttttgtaaatagtttagcactttctttttttacgtaaacctgaaatatattttaaatgtggaatgatgtatataaaatgtgcgaggatcctggtattgtaatattaaaaagaagtttctatatg

SEQ ID NO: 221163 - DNA, 1000 bp, Homo Sapiens
atctggtggcaacagctcagcccattcaaagagcaaggattcaggaaaggcacactgatggtggggagcctcttaagagcctctaatgttctcccaaaaccagagttgagagtcggagtgccagtcgtcggggcccactattcctgaataagggacatgcaagggccagaagtagcttgactctcgcctaaatatctgtgcctttgcctgtcctttctcccactctactgaaacccggaacagattcccgcttgccttctgatgaagagaggttaggtaaagagagtttggaggaaaaaagacaccaggaggcaggctgcggggtaggagagggttctgagaggaggcagcaatccagaatacctccttttctagccagcatcccttgaacttttgaaaggttgtgcctaccactggctggcacaccagggcaatgatttccctgcagaaggaaggaaagaatgtttcacccttgcatccttcttggagaagctacagcctgtgctcagttgagtggttcacactcagactttggctttatggttttccttcctccttgtctttgccctgaccttgatcaacaggggtgaaaagaaccaccctgaggtttccatgcctctcccattttagtggtagcattttgtgtctttactccacccttcaccctagttccaccaaggttcacacaccagatgtaactgtttttcagctgagttgtatggattaacttcagtccactgtaaatacacctgggatggggtggggttggggttgtttagggagaagcagccagacttgctttgtgaactgaatgtatttttatgcaattttgagtggcctttcaaccctaagatgaatggttttgttttactggttgttgttatatagttttgagtattctgtgtttgaaagtttgggaataataatattcacttctatatgatgcctgtaaacacaacagtatttataaatgagtaaataaaactgtgttttaactttg

SEQ ID NO: 221164 - DNA, 1000 bp, Homo Sapiens; identical to SEQ ID NO: 115810

SEQ ID NO: 221165 - DNA, 1000 bp, Homo Sapiens
gttggtagtttcctcccccctttcccggcgcccctcccgcccccattcaacatctctcatcctatccccgaccccctccggggaacaccgggaaggctcgacgctccaggacaggaccagccacgcagacaggtcgatttgcccaggcccgcgcccgcacgcacgcacgcacacggccccgcacacagccccgccccaccccgcaaccagccctgtcgactgccttatacacccgcccccgcgctggccggccgacctagtgccttgttctcacccccgtgctggcggagcggacgccgcgctctgggtcccagaggggccgggtggctcagacgacccaccactcccccaccctgaccgtgctgaacagacccccccacacgagagaaaataaaggagcaataaagtcacgagaactttcgtcccccaatcgagagcccgaggggcaccccagccccgcctctgctcccccccaccccacccaccctcggggcgcccccctccccccgcaagccagcctgggccagccccgcttcggcccctcccgggagatccgtgcgcccgaccagcaccagcatcgcggaccgcaaaggccgcccgtcccgtcaaacaagtttcttcttaggctaagaaacgcagtatatacgagtatctctatatatagtactaatggatttggtgtgcttcccccttagcgtccccctccctctgctcctcctccttcagcctggtctccccctcttctctgccctccacccccgtctctgcactgagatacataagaaacaagggtagtttactgtctgttttgttttctgggttttcagtgtcctagcggaatgcaagtaggcagccagcccgtctgttccctctccgccccgccccgccccgcccccgtcactgcgcttctgttataccatctttgcctgactctctccggcttctccattgaatggctaatgtgtatgtgaaataaagaaataaagaaaaacaaacgcga

SEQ ID NO: 221166 - DNA, 1000 bp, Homo Sapiens
atactcggtaatttgcatgttttgtggagcatttttatgtcaccaaccagacagtatttcctgcatgcttatttagaagaggcagcttatcttgagaggtagtgttatctacctttgtcaggctttttgacaggtcatttcagagtaagcctttgttcccaagacccaacaactgtcaccctcttctgtacctctcctgagtgccaactgtccaggccatttgacacaccatctgttaacctctgagtttgcccactcaaggccactcataggggcatccatccccaagcacctcctcatgctgtgcatgcagtcttaaattcaatggacaaaaataaaatgctggctacctctggatcatctggctgagcaactgaattacaaaagagaattacttccatctcaacttcaacccattgattacgtccatcctagcaagctaaatggcatcccagctgctcctttctgtgcaaccaattaaagaacaatgagtgtgatgctccatgtctgaatttcgtccagcctctctctgaactgtgatctttgtcctcatgaactttcccttttgttcattgaactatatggactcttcatttcatattgatttactgtgcaatttacttttggacattgagaacttgaaattatttcctgatcccttccccttccactattaataattcatttctgtcaaactgtaagagtagactcatttttttttttttagtttttaacattggactgttatttcatttagagttctctatctctaaatatttatttagagaatgattttaaaagggaatgatatgcttgtttaaatgaaagagaaaagctgtagtaaactgtgttaattggtaatgactatttatcgtcgatactctgtagctgtgtaagttttgacaaatagtgtatctcgtggaatcagtggttagcattgccgctattatatttactcattttatcattataaatgtgcttagttcatcatgtagcatca

SEQ ID NO: 221167 - DNA, 1000 bp, Homo Sapiens; identical to SEQ ID NO: 115814

SEQ ID NO: 221168 - DNA, 1000 bp, Homo Sapiens
ttgctgtaagtattatatttctggaatttcacactttacctactctgatcactctgttctctttgttttaaagagagaattttgtaaaccatttattgaatgttctgatctttcatttataacttaagattttttacagaactttaagtggttagactattgagccataaaattttggtttgtagtagagatttctcggtatgtacttttcccctaaatgctggggatttaaagaattgcactaattcatagaactctttacattgtagtgaccaatgcacatataatttaaatcttgtgttctatgtgagagtttatgtggaggattatcttctggtgttgtgtccatcataagatgtaaaaagagaaatcatagttttatattttagtttctcctacaatgggtatgttaaataactatatctatacttagatatagtgcattgtctgtgtcccttaaagtgttacaaagagtttctctcaaaaggtccttaaggagagtgagagatgagagaggtgccttctctgtattagactcacacacatcagtccagttgaagaattggtttaaacttttaaatgagaacagaaattataattagtacctgaccaattgtgcctagatattaaagtatgttctctttagtactttccgttcaattaaatatcagtatattagggatttttttctacaggtgtatattttgttgaagagtcactttcctcaaccatttttttgtactgggcctttaaaaaaataaatccatccaactttaacacaacatttctcagtgtagaaatcatgtcttcttaattgctgaaccttactgcaaaaacttgtgatgttaagaaatttgtatggtgtggcagtggtctattcctaaggaactaaatatcatatagttaatgtttatttaactcagcttgagactgtactacagttaggtttgaataaatattttcattaacttcaaaaaaaaaaaaaaaaaaaaaaaaaaaa

SEQ ID NO: 221169 - DNA, 1000 bp, Homo Sapiens
aacaagagtatttttatgaaagaaaaggacaaacctataaattaactcaacctatatctcccttgaaaatactttcaggctccaccaaaacgtagaactgaaagcatgtattttggaagaaagagatacattttgtatgctttcttttccttttgtagattcccagtttattttctaagactgcaaagatcactttgtcaccagccctgggacctgagaccaagggggtgtcttgtgggcagtgagggggtgaggagaggctggcatgaggttcagtcattccagtgagctccaaagaggggccacctgttctcaaaagcatgttggggaccaggaggtaaaactggccatttatggtgaacctgtgtcttggagctgacttactaagtggaatgagccgaggatttgaatatcagttctaaccttgatagaagaaccttgggttacatgtggttcacattaagaggatagaatcctttggaatcttatggcaaccaaatgtggcttgacgaagtcgtggtttcatctcttaaacacagtgtgtaaatttattcaactaacgatgggaaatgtattacttctgtacacagtggactgaagtgcaatttgttgaaagggaacaagtcattgaagagaaaaaaaaaaagcccaatacttagagtcccaattttgtctcatttgccaaaaaaaaaaaaaaaaaaaaaaagcaaaccccctatggttgatattgttataatgtatatactgtataatatgaaagagaatcgatgtatctcactttttcattatttgctaaccaaagctgtacatttttcatatgatctgcagccttttgggtatcaaatgggtcaaaaccatgggacctgccacctcccatcagcaattctggaaatgcactatttctactggtattcttgctttttttttttttttcattttcttgctgaaatgacatgaattgttgagtttatttttacccagtaaagagtggagaaagact

SEQ ID NO: 221170 - DNA, 1000 bp, Homo Sapiens; identical to SEQ ID NO: 115816

SEQ ID NO: 221171 - DNA, 1000 bp, Homo Sapiens
gctcaattccctcattattaagctgatccaggcagatattttgaaaaacaagctctccaagcagatggtggacgttaaggaaaattaccagagcaccctgcccaaagctgaggctccccgagagccggagcggggagggcccgccaagtcagcattccagccggtgattgcaatggacaccgaactgctgcgacaacagagacgctacaactcaccgcgggtcctgctgagcgacagcacccccttggagcccccgcccttgtatctcatggaggattacgtgggcagccccgtggtggcgaacagaacatcacggcggaaacggtacgcggagcataagagtcaccgaggggagtactcggtatgtgacagtgagagtctgtgggtgaccgacaagtcatcggccatcgacattcggggacaccaggtcacggtgctgggggagatcaaaacgggcaactctcccgtcaaacaatatttttatgaaacgcgatgtaaggaagccaggccggtcaaaaacggttgcaggggtattgatgataaacactggaactctcagtgcaaaacatcccaaacctacgtccgagcactgacttcagagaacaataaactcgtgggctggcggtggatacggatagacacgtcctgtgtgtgtgccttgtcgagaaaaatcggaagaacatgaattggcatctctccccatatataaattattactttaaattatatgatatgcatgtagcatataaatgtttatattgtttttatatattataagttgacctttatttattaaacttcagcaaccctacagtatataagcttttttctcaataaaatcagtgtgcttgccttccctcaggcctctcccatctgttaaaacttgttttgtgatccggctctcaggagtcactctgtaaaatctgtgtacaccagtattttgcattcagtattgtcaaggccatgactgttgttttagtaaacttgttaaaatcaaaaa

SEQ ID NO: 221172 - DNA, 1000 bp, Homo Sapiens; identical to SEQ ID NO: 115818

SEQ ID NO: 221173 - DNA, 1000 bp, Homo Sapiens
ggcggcgagtcctgtgatgagctggaggaggactggatcagggaatatccacctatcacttcagatcaacaaagacaactgtacaagaggaattttgacactggcctacaggaatacaagagcttacaatcagaacttgatgagatcaataaagaactctcccgtttggataaagaattggatgactatagagaagaaagtgaagagtacatggctgctgctgatgaatacaatagactgaagcaagtgaagggatctgcagattacaaaagtaagaagaatcattgcaagcagttaaagagcaaattgtcacacatcaagaagatggttggagactatgatagacagaaaacatagaaggctgatgccaagttgtttgagaaattaagtatctgacatctctgcaatcttctcagaaggcaaatgactttggaccataaccccggaagccaaacctctgtgagcatcacaaagttttggttgctttaacatcatcagtattgaagcattttataaatcgcttttgataatcaactgggctgaacactccaattaaggattttatgctttaaacattggttcttgtattaagaatgaaatactgtttgaggtttttaagccttaaaggaaggttctggtgtgaactaaactttcacaccccagacgatgtcttcatacctacatgtatttgtttgcataggtgatctcatttaatcctctcaaccacctttcagataactgttatttataatcacttttttccacataaggaaactgggttcctgcaatgaagtctctgaagtgaaactgcttgtttcctagcacacacttttggttaagtctgttttatgacttcattaataataaattccctggcctttcatattttagctactatatatgtgatgatctaccagcctccctattttttttctgttatataaatggttaaaagaggtttttcttaaataataaagatcatgtaaaagtaaaaaaaaaa

SEQ ID NO: 221174 - DNA, 1000 bp, Homo Sapiens
cgcactaaagcactcaaagacgtaccactttcccaaaactgtcactcagagtctaaagaagaccatcaggttccttcacagcttcacaatgtacaaattgtatcagaagttatttttagaaatgataggtaaccaggtccaatcagtaaaaataagctgcttataactggaaatggccattgagctgtttcctcacaattggcgagatcccatggatgagtaaactgtttctcaggcacttgaggctttcagtgatatctttctcattaccagtgactaattttgccacagggtactaaaagaaactatgatgtggagaaaggactaacatctcctccaataaaccccaaatggttaatccaactgtcagatctggatcgttatctactgactatattttcccttattactgcttgcagtaattcaactggaaattaaaaaaaaaaaactagactccattgtgccttactaaatatgggaatgtctaacttaaatagctttgagatttcagctatgctagaggcttttattagaaagccatatttttttctgtaaaagttactaatatatctgtaacactattacagtattgctatttatattcattcagatataagatttgtacatattatcatcctataaagaaacggtatgacttaattttagaaagaaaattatattctgtttattatgacaaatgaaagagaaaatatatatttttaatggaaagtttgtagcatttttctaataggtactgccatatttttctgtgtggagtatttttataattttatctgtataagctgtaatatcattttatagaaaatgcattatttagtcaattgtttaatgttggaaaacatatgaaatataaattatctgaatattagatgctctgagaaattgaatgtaccttatttaaaagattttatggttttataactatataaatgacattattaaagttttcaaattattttttaaaaaaaaaaaaaaaaaa

SEQ ID NO: 221175 - DNA, 1000 bp, Homo Sapiens
agttttagaagcagaaaaggtcttggtgcctctgcagtacttgatgtattggggtcaaatctctacaaatttttctgtggtgatagcaaaatcaagagatggcttacaaaaagaaatattgaatttttatttttgaagtttttgttttttaaaaggttgggggtgttcagccactgagggacaaaacttagcatctaatttcaattatagtgtcatgcagagtatttctaaagtaattggttatcatgggaaagtattctcttttcaagaagttctttgattctgtaataactagaacaaataaagtagtaaaagaagaaatagttctgtgactaggaaaaaattgcttttgagagaacatagatcaattatactacttctaaggtagctgcagataagtggccttgacacattacaagcctggaaaaaaacatcagaaataataaaaaatttcagagagaatcaagatacctttttttttcttttttttttcttttttttattatactctaagttttagggtacatgtgcacattgtgcaggttagttacatatgtatacatgtgccatgctggtgcgctgcacccactaatgtgtcatctagcattaggtatatctcccagtgctatccctcccccctcccccgaccccaccacagtccccagagtgtgatattccccttcctgtgtccatgtgatctcattgttcaattcccacctatgagtgagaatatgcggtgtttggttttttgttcttgcgatagtttactgagaatgatggtttccaatttcatccatgtccctacaaaggatatgaactcatcattttttatggctgcatagtattccatggtgtatatgtgccacattttcttaatccagtctatcattgttggacatttgggttggttccaagtctttgctattgtgaatagtgccgcaataaacatacgtgtgcatgtgtctttatagcagcatgatttatactcatttgggtatat

SEQ ID NO: 221176 - DNA, 1000 bp, Homo Sapiens
tcaagttcccagtgggaaaagctacagaaagatgacacagatccggggcaactgaaaggcctctcagcgcatactcatgtggaacttccatattactctaagttcattctaattgctgcataccttgcttcatacaatccagcaagaactgacaagaggttttttcttaagcatcatggaaaaatcaagaaaaccaactttctaaaaaaacacgaaaagacaagcaatcatctccttgggccaaaaccatttccactagacagattattagcaatattatatagtatcgtggacagcagagttgctccaacagcaaatattttttcccagattacctctctagtgacccttcagctgttaaccctggttggccatgacgatcagcttgatggaccaaaatacaaatgcacagtgtctctagacttcatcagagctattgcaaggacggtgaactttgacataataaaatacttgtatgatttcttgtgaaaacaagcttcaaagccatatggacactgtgacaatgactaagccaagctgtgttcatccagctacttagctggccaaggagaggagttctttggctctattggatttgtccaaacaggtgctggcccagcatggaatctgatgaaaatattctgattggtctgggtggatgtgagcagaagactatttaccagggaccctggagtatttggaagcaacgtgttaattataaacagcagggtttgagcacaatctgttctactcttaatgatgttatcttaacactgaaattgcctgaaacccatttacttaggactacattttgctctgtgaactatcccctgcgctttgaacgtgccagcagcccttgtttatatgcccattcttttcacttcctctccacaggagcctctgcagtcgcttgccaaagcagattttcctaaggccactgttttaaaagatcatagttgcaaaatataataaatacaagttctttttaaaatccaaaaaa

SEQ ID NO: 221177 - DNA, 1000 bp, Homo Sapiens; identical to SEQ ID NO: 115825

SEQ ID NO: 221178 - DNA, 1000 bp, Homo Sapiens; identical to SEQ ID NO: 118855

SEQ ID NO: 221179 - DNA, 1000 bp, Homo Sapiens
ccctgtgctccgtgcctccaccaccactggccaccaggctggcgcagccaaggccgaagctctggctgaaccctgtgctggtgtcctgaccaccctcccctctcttgcacccgcctctcccgtcagggcccaagtccctgttttctgagcccgggctgcctgggctgttggcactcacagacctggagcccctgggtgggtggtggggaggggcgctggcccagccggcctctctggcctcccacccgatgctgctttcccctgtggggatctcaggggctgtttgaggatatattttcactttgtgattatttcactttagatgctgatgatttgtttttgtatttttaatgggggtagcagctggactacccacgttctcacacccaccgtccgccctgctcctccctggctgccctggccctgaggtgtgggggctgcagcatgttgctgaggagtgaggaatagttgagccccaagtcctgaagaggcgggccagccaggcgggctcaaggaaagggggtcccagtgggaggggcaggctgacatctgtgtttcaagtggggctcgccatgccgggggttcataggtcactggctctccaagtgccagaggtgggcaggtggtggcactgagcccccccaacactgtgccctggtggagaaagcactgacctgtcatgcccccctcaaacctcctcttctgacgtgccttttgcacccctcccattaggacaatcagtcccctcccatctgggagtccccttttcttttctaccctagccattcctggtacccagccatctgcccaggggtgccccctcctctcccatccccctgccctcgtggccagcccggctggttttgtaagatgctgggttggtgcacagtgatttttttcttgtaatttaaacaggcccagcattgctggttctatttaatggacatgagataatgttagaggttttaaagtgattaaacgtgcagactatgcaaaccag

SEQ ID NO: 221180 - DNA, 1000 bp, Homo Sapiens; identical to SEQ ID NO: 115827

SEQ ID NO: 221181 - DNA, 1000 bp, Homo Sapiens
gttttggactgtaaagacaaagagcctgatgtactgttcgtgggagactccatggtgcagttaatgcagcaatatgagatatggcgagagcttttttccccacttcatgcactgaattttggaattgggggagatacaacaagacatgttttgtggagactaaagaatggagaactggagaatattaagcctaaggtcattgttgtctgggtaggaacaaataaccacgaaaatacagcagaagaagtagcaggtgggatcgaggccattgtacaacttatcaacacaaggcagccacaggccaaaatcattgtattgggtttgttacctcgaggtgagaaacccaatcctttgaggcaaaagaacgccaaggtgaaccaactcctcaaggtttcgctgccgaagcttgccaacgtgcagctcctggataccgacgggggttttgtgcactcggacggtgccatctcctgccacgacatgtttgattttctgcatctgacaggagggggctatgcaaagatctgcaaacccctgcatgaactgatcatgcagttgttggaggaaacacctgaggagaaacaaaccaccattgcctgactggctcttatcagtgttaatagcatctcagcttcctcagatcagttctatcactggcactacagaatccttctctttcttaaggcactttgcattgtagaatgttcctggatgttcatatctagtgtttgaaggggaggagggatttaaactggtcctgtacatagaaggtttgtttgacagaggagaaaaattagccaaggaagattgttgtttaaattcatttgaaaccagaaggggactttttagttgtatgtgtaacacattcattgaattattatcactgttttcttgggacaacatcaagcctaaatactgaacaatatgaagattcttttcttggcctttctgtggattatgtcatatataataattatcagaatcattctacttggctttttcc

SEQ ID NO: 221182 - DNA, 1000 bp, Homo Sapiens
actggcttggagctgctggaaagtgaaataacctatgacaaactcaacaagtggaccagcaaagacaaaatggctgaagatgaagttgaggtatacataccccagttcaaattagaagagcattatgaactcagatccattctgagaagcatgggcatggaggacgccttcaacaagggacgggccaatttctcagggatgtcggagaggaatgacctgtttctttctgaagtgttccaccaagccatggtggatgtgaatgaggagggcactgaagcagccgctggcacaggaggtgttatgacagggagaactggacatggaggcccacagtttgtggcagatcatccttttctttttcttattatgcataagataaccaactgcattttatttttcggcagattttcctcaccctaaaactaagcgtgctgcttctgcaaaagatttttgtagatgagctgtgtgcctcagaattgctatttcaaattgccaaaaatttagagatgttttctacatatttctgctcttctgaacaacttctgctacccactaaataaaaacacagaaataattagacaattgtctattataacatgacaaccctattaatcatttggtcttctaaaatgggatcatgcccatttagattttccttactatcagtttatttttataacattaacttttactttgttatttattattttatataatggtgagtttttaaattattgctcactgcctatttaatgtagctaataaagttatagaagcagatgatctgttaatttcctatctaataaatgcctttaattgttctcataatgaagaataagtaggtaccctccatgcccttctgtaataaatatctggaaaaaacattaaacaataggcaaatatatgttatgtgcatttctagaaatacataacacatatatatgtctgtatcttatattcaattgcaagtatataataaataaacctgcttccaaacaac

SEQ ID NO: 221183 - DNA, 1000 bp, Homo Sapiens
ctttggatttcctgcactcaaaccaggtgatccatagagatataaagagtgacaatattcttctcgggatggatggctctgttaaattgactgactttgggttctgtgcccagatcactcctgagcaaagtaaacgaagcactatggtgggaaccccatattggatggcacctgaggtggtgactcgaaaagcttatggtccgaaagttgatatctggtctcttggaattatggcaattgaaatggtggaaggtgaacccccttaccttaatgaaaatccactcagggcattgtatctgatagccactaatggaactccagagctccagaatcctgagagactgtcagctgtattccgtgactttttaaatcgctgtcttgagatggatgtggataggcgaggatctgccaaggagcttttgcagcatccatttttaaaattagccaagcctctctccagcctgactcctctgattatcgctgcaaaggaagcaattaagaacagcagccgctaagactgcaagccttacacctcaccatctccctcatgagtaagactgaaataaaactctgctgcaggaaagatggaagaaaagacagtcaaatggggtgggggttctttacctttcaaatgaatagaaacttcttataagcctttttcctactccctcagattatgtaatttatttgtaagcctgaatcgcagcccaaacagggcagcaatgttgaagtgaccataaagtggtcacttccaccgtgaagcgaaagagccagtagtgaatcccctcattttgtgcattcactttgaagaaaaaggtttctcaaagatgcacactccctcttcatagtgttgtgtttgtttttaagttagagagtagtccctcttgcattcaaacctccttcaaaactccttacccaatgtgatgtttttcacttgcattgtcattagatgtccagaaaaaaaaaagatgtcaaaatgtttttctaaaaaaagaaagca

SEQ ID NO: 221184 - DNA, 1000 bp, Homo Sapiens
ttgtcattggcgtggttgctggcattatgacggtgattctaatcatcttaattgtagtgatggcaaggtactgcaggtccaaaaataaaaatggctatgaagccggcaaaaaagatcacgaagacttttttacaccccaacagcatgacaaatctaaaaagcctaaaaaggacaagaaaaacaaaaaatctaagcagcctctctacagcagcattgtcactgtggaggcttctaagccaaatggacagaggtatgatagtgtcaatgagaagctgtcagacagcccaagcatggggcgatacaggtccgttaatggtgggcccggcagtcctgacctggcaaggcattacaaatctagttccccattgcctactgttcagcttcatccccagtcaccaactgcaggaaaaaaacaccaggccgtacaagatctaccaccagccaacacatttgtgggagcaggagacaacatttcaattggatcagatcactgctctgagtacagctgtcaaaccaataacaagtacagcaaacagatgcgtctacatccatacattactgtgtttggctgaattccactctaatatgatgctccattatgcaccatactgtgatgacctttctactccgaaacctgctggagcctgcccttggccgtggggtgtcagccaatcactgcttgttccacttgttgtacattttatttttgagtctttttctttctcatatacagaaaaatagtatgaaaataaaataaatgtatgaaacagtattaatgcagaaatgtgctactaatggatgtctgagtcaccagaaattccattcttaaagaggcggttagcacctattagacgtaacagtgatgtcttttaaaaaatccaaaagcatattgcaacaataagtttgagactttgtgtgaacaaagggaaattcagcctcttatgtctttgtctttaatacattaaatactgattttgaataaaaatctaaattgatcaat

SEQ ID NO: 221185 - DNA, 1000 bp, Homo Sapiens
gcatcttcctcttctgctgccgcgagcagccgtgctgtgccggcctgcgagtttttaggaatcaactacccaggaaaaacgatttttactcatatgagccaccttctgagaatcctcccccagaaacaggagaatcagtgtgtctccagcttaagtctggtgctcatctctgcagggtttgtggctgtttaggccccaaaacgtgctccagatgccacaaagcatattactgcagcaaggagcatcagaccctagactggagattgggacataagcaggcttgtgcacaaccagatcatctggaccatataattccagaccacaacttcctttttccagaatttgaaattgtaatagaaacagaagatgagattatgcctgaggttgtggaaaaggaagattactcagagattatagggagcatgggtgaagcacttgaggaagaactggattccatggcaaaacatgaatccagggaagataaaatttttcagaagtttaaaactcagatagcccttgaaccagaacagattcttagatatggcagaggtattgcccccatctggatttctggtgaaaatattcctcaagaaaaggatattccagattgcccctgtggtgccaagagaatattggaattccaggtcatgcctcagctcctaaactacctgaaggctgacagactgggcaagagcattgactggggcatcctggctgtcttcacctgtgctgagagctgcagcttgggtactggctatacagaagaatttgtgtggaagcaggatgtaacagatacaccgtaaaggcatcttaaagccttgaaaaatgttaataatcttttataccttgcaattccatttctgggattttatcctaaggaaatacttataccaaaaatagaggtgcagagatgttgacagattgcttacacagtgtctacttattagtgaaacaaaagtgtccagtgacagggaattaaataaattttggtacatccaca

SEQ ID NO: 221186 - DNA, 1000 bp, Homo Sapiens
aagcccccaaagaaaggcgttcaagggtttggggacgacatccctggaatggaaggcctgggaacagacatcacagtcatctgcccttgggaggccttcaaccacctggagctgcacgagctggcccaatatggcatcatctagcacgaggccctgctgaagtccagaccctccccctcctgcccactgtgctctaaaccctgctcaggattcctgttgaggagatgcctccctagcccagatggcacctggacaccaggatgggactgcaacctcaggtctccccctacatattaataccagtcaccaggagcccaccacctccctctaggatgccccctcagggtggccaggccctgctcaacatctggagatacaggcccacccctcagtcctgcccacagagaggcttggtcggtctccactcccagggagaacgggaagtggaccccagcccgggagcctgctggaccccagatcgtcccctcctcccagctggaaagctagggcaggtctccccagagtgcttctgcaccccagcccctgtcctgcctgtaaggggatacagagaagctccccgtctctgcatcccttcccaggggggtgcccttagtttggacatgctgggtagcaggactccagggcgtgcacggtgagcagatgaggccccaagctcatcacaccagggggccatccttctcaatacagcctgcccttgcagtccctatttcaaaataaaattagtgtgtccttgcctgtctgtggcatatttgtgcatgggacagggcctgtggtggggtcacttgagttgagccggagcacatgggggaaggggtgggcagtggggcaggaggggctggcctgcctgagtgggaagcacgcccttgggctcacactctcactgagccttgctggtggccccaagacacgcaatgtcaggccatggctgggtcaaggcagaaggccttggtgcacacccaggggccatagtcaacgaagc

SEQ ID NO: 221187 - DNA, 1000 bp, Homo Sapiens
agcaggatcgggagcggctccgagccatgcagaagcagcagcctcggttttctgaggaccagcggcgggaactgggtgctgtgcactcctgggtccggaagggccaactgcctcgggctcttgatgtgatggcctgtgtggactgtgggagcagcacccaagatcctggtcaccctgatgacccactcttctcagagctggatggactggggctggagcccatggaagagggtggaggcgagcagggcagcagcggtggcggcagtggtgagggagagggctgcgaggaggcccaaggcggggccaaggcttcaagctctcaggacttggctatggaggaggaggaagaaggcaggagctcatccagtccagccttacctacagcaggaaactgcaccagctagactccattctgggaccatctccaggagtccatgagaggctttcttctcctatgtcccaattctcagaactcagatgtggctagaccaaccagtgggaaactgccccagcttctcccaccatagggggccggacccccatcaccagcctaggatccaggggctgcctctggcctcttagggagcagagagcagaactccgcagcccagcccagaggagtgtcacctcccacctttggagaggaatccttccctcccctggacaaagttgctgacaagctgctgaagtggcctctccatattccagctgagcctgaatctgactcttgagggttggggctgcacttatttattgcggggagacagctctctctcccacctcctccccagatgggaggagagcctgaggcccaagcaggacccgggggttccagcccctagctgctctggagtgggggaggttggtggaccatggagtccctggtgctgcccctcaggtgggacccaggggttctcagctgtaccctctgccgatggcatttgtgtttttgatatttgtgtctgttactacttttttaatacaaaaagataaaaacgcc

SEQ ID NO: 221188 - DNA, 1000 bp, Homo Sapiens
aaagggacccggacccgcaggcgagcctgtaatcaccctgctcccaagtgtgggggccactgcccaggacaggcacaggaatcagaggcctgtgacacccagcaggtctgccccacacacggggcctgggccacctggggcccctggaccccctgctcagcctcctgccacggtggaccccacgaacctaaggagacacgaagccgcaagtgttctgcacctgagccctcccagaaacctcctgggaagccctgcccggggctagcctacgagcagcggaggtgcaccggcctgccaccctgcccagtggctgggggctgggggccttggggccctgtgagcccctgccctgtgacctgtggcctgggccagaccatggaacaacggacgtgcaatcaccctgtgccccagcatgggggccccttctgtgctggcgatgccacccggacccacatctgcaacacagctgtgccctgccctgtggatggggagtgggactcgtggggggagtggagcccctgtatccgacggaacatgaagtccatcagctgtcaagaaatcccgggccagcagtcacgcgggaggacctgcaggggccgcaagtttgacggacatcgatgtgccgggcaacagcaggatatccggcactgctacagcatccagcactgccccttgaaaggatcatggtcagagtggagtacctgggggctgtgcatgcccccctgtggacctaatcctacccgtgcccgccagcgcctctgcacacccttgctccccaagtacccgcccaccgtttccatggtcgaaggtcagggcgagaagaacgtgaccttctgggggagaccgctgccacggtgtgaggagctacaagggcagaagctggtggtggaggagaaacgaccatgtctacacgtgcctgcttgcaaagaccctgaggaagaggaactctaacacttctctcctccactctgagccccctgaccttccaaacctcaataaa

SEQ ID NO: 221189 - DNA, 1000 bp, Homo Sapiens; identical to SEQ ID NO: 115834

SEQ ID NO: 221190 - DNA, 1000 bp, Homo Sapiens
agccggaaaggaggagacccaagggcagggggaagaggaggagagagaagcagagacccacagactgccacctgtgcggcgatgctgttccccggaggtaacccaccccttggaggagagagaccccgcacccggctcgtgtatttattaccgtcacactcttcagtgactcctgctggtacctgccctctatttattagccaactgtttccctgctgaatgcctcgctcccttcaagacgaggggcagggaaggacaggaccctcaggaattcagtgccttcaacaacgtgagagaaagagagaagccagccacagacccctgggagcttccgctttgaaagaagcaagacacgtggcctcgtgaggggcaagctaggccccagaggccctggaggtctccaggggcctgcagaaggaaagaagggggccctgctacctgttcttgggcctcaggctctgcacagacaagcagcccttgctttcggagctcctgtccaaagtagggatgcggatcctgctggggccgccacggcctggctggtgggaaggccggcagcgggcggaggggatccagccacttccccctcttcttctgaagatcagaacattcagctctggagaacagtggttgcctgggggcttttgccactccttgtcccccgtgatctcccctcacactttgccatttgcttgtactgggacattgttctttccggccaaggtgccaccaccctgccccccctaagagacacatacagagtgggccccgggctggagaaagagctgcctggatgagaaacagctcagccagtggggatgaggtcaccaggggaggagcctgtgcgtcccagctgaaggcagtggcaggggagcaggttccccaagggccctggcacccccacaagctgtccctgcagggccatctgactgccaagccagattctcttgaataaagtattctagtgtggaaaaaaaaaaaaaaaaaaaaaaaaaaaaaa

SEQ ID NO: 221191 - DNA, 1000 bp, Homo Sapiens
tcacgctctcggaacatcacctacctgccagcggggcagtccgtgctcctccagctgccccagtgagggcccaccctgcctgcacctccgcgggctgactgggccacagccccgatgattcttaacacagccttccttctgctcccaccccagaaatcactgtgaaatttcatgattggcttaaagtgaaggaaataaaggtaaaatcacttcagatctctaattagtctatcaaatgaaactctttcattcttctcacatccatctacttttttatccacctccctaccaaaaattgccaagtgcctatgcaaaccagctttaggtcccaattcggggcctgctggagttccggcctgggcaccagcatttggcagcacgcaggcggggcagtatgtgatggactggggagcacaggtgtctgcctagatccacgtgtggcctccgtcctgtcactgatggaaggtttgcggatgagggcatgtgcggctgaactgagaaggcaggcctccgtcttcccagcggttcctgtgcagatgctgctgaagagaggtgccggggaggggcagagaggaagtggtctgtctgttaccataagtctgattctctttaactgtgtgaccagcggaaacaggtgtgtgtgaactgggcacagattgaagaatctgcccctgttgaggtgggtgggcctgactgttgccccccagggtcctaaaacttggatggacttgtatagtgagagaggaggcctggaccgagatgtgagtcctgttgaagacttcctctctaccccccaccttggtccctctcagatacccagtggaattccaacttgaaggattgcatcctgctggggctgaacatgcctgccaaagacgtgtccgacctacgttcctggccccctcgttcagagactgcccttctcacgggctctatgcctgcactgggaaggaaacaaatgtgtataaactgctgtcaataaatgacacccagaccttcc

SEQ ID NO: 221192 - DNA, 1000 bp, Homo Sapiens
atctcagctgagagtcagtcacctggaacctctatgactccaagtagtgggtcctttcctagtgcatatgatcagcagtcatctaaagatagtcgtcaaggtcaatggcaacgccgaagaaggctggatggggcactgaatagagttccagttggattttatcagaaagtatggaaagttttgcagaagtgtcacggactttctgttgaagggtttgtccttccttcctctaccactagagagatgactccaggtgagattaaattctctgttcatgtggagtctgtcctgaatcgtgtacctcagccagagtaccgtcagctgctggttgaagccatccttgtcctcaccatgctggcagatattgaaattcatagcatcggaagcatcattgctgtggaaaaaatagtgcatattgccaatgacttgttccttcaagaacagaaaacccttggcgcagatgataccatgttggcaaaggatcccgcatctggcatctgtactcttctgtatgacagtgcacccagtggcaggtttggcaccatgacctacctctccaaggcagccgccacctacgtgcaggagttcctgccccacagcatctgtgccatgcaatgagggctttggttcctggcttctgggagccttttgacagctggtccctgcctcggttgattgtgcatggaactaaaatgttattgcctaatcactccaaccctgcccctttctgtcccatccttcccaagaagagagaactttttcgataaactaactactgtagaagaagtgaacacttacctggaggctcaccttgcagaaccagtgacaatcttatgagtataatgaacactcagccaggcctgtcatgattggctttatttctttcatcattcataaaagtttgcatgtgtttttattctctagatctgttaccaatatagttttctaactcctgtttggggagcaagtgttaataataacttattcctaaaaaaaaaaa

SEQ ID NO: 221193 - DNA, 623 bp, Homo Sapiens
aggccaagctggactgcataaagattggtatggccttagctcttagccaaacaccttcctgacaccatgagggccagcagcttcttgatcgtggtggtgttcctcatcgctgggacgctggttctagaggcagctgtcacgggagttcctgttaaaggtcaagacactgtcaaaggccgtgttccattcaatggacaagatcccgttaaaggacaagtttcagttaaaggtcaagataaagtcaaagcgcaagagccagtcaaaggtccagtctccactaagcctggctcctgccccattatcttgatccggtgcgccatgttgaatccccctaaccgctgcttgaaagatactgactgcccaggaatcaagaagtgctgtgaaggctcttgcgggatggcctgtttcgttccccagtgagagggagccggtccttgctgcacctgtgccgtccccagagctacaggccccatctggtcctaagtccctgctgcccttccccttcccacactgtccattcttcctcccattcaggatgcccacggctggagctgcctctctcatccactttccaataaagagttccttctgctccaaaaaaaaaaaaaaaaaaaaaaaaaaaa

SEQ ID NO: 221194 - DNA, 1000 bp, Homo Sapiens; identical to SEQ ID NO: 115838

SEQ ID NO: 221195 - DNA, 1000 bp, Homo Sapiens
tagagatgcacttcaaccccaaactacagacgcagaagctacaattttctttactaggcttattgaatcaagtttgggaagcattgccacaaagtttaacttcttcattcacaaccttgctcagcttcgtttttctggtcttccttctaatgatgagcccatcctttcattttcacctaaaacatactcctttagacaagatggtcgaatcaaggaagtctctgtttttacatatcataagaaatacaacccagataaacattatatttatgtagtccgaattttgtgggaaggacagattgaaccatcatttgtcttccgaacatttgtcgaatttcaggaacttcacaataagctcagtattatttttccactttggaagttaccaggctttcctaataggatggttctaggaagaacacacataaaagatgtagcagccaaaaggaaaattgagttaaacagttacttacagagtttgatgaatgcttcaacggatgtagcagagtgtgatcttgtttgtactttcttccaccctttacttcgtgatgagaaagctgaagggatagctaggtctgcagatgcaggttccttcagtcctactccaggccaaataggaggagctgtgaaattatccatctcttaccgaaatggtactcttttcatcatggtgatgcatatcaaagatcttgttactgaagatggagctgacccaaatccatatgtcaaaacatacctacttccagataaccacaaaacatccaaacgtaaaaccaaaatttcacgaaaaacgaggaatccgacattcaatgaaatgcttgtatacagtggatatagcaaagaaaccctaagacagcgagaacttcaactaagtgtactcagtgcagaatctctgcgggagaattttttcttgggtggagtaaccctgcctttgaaagatttcaacttgagcaaagagacggttaaatggtatcagctgactgcggcaacatacttgtaa

SEQ ID NO: 221196 - DNA, 1000 bp, Homo Sapiens
ggcctcttttatgcctgacatttcttcccttcctttttccctgcctccctttttcatcaattgcaatgctcccacaactctttacagacttgtgaaatcttcaagaacacctttactctataactcaaaaattagttgaaaaataattacttctcaaggattattagaatcttaggtacttatttgtaaagatgtttagtgacttttttttcaagtatcttattaaaggaggcattctagaaaatatgaattagtttccaaatgccttaattttaaactttggcctgaacagttttttctttttcttaatggaagaagatatttaatatcttaaaaatattccaagttaggaagaacactacttgccttatccatttcccatttaaaggacttttaaactttgacacatccttcagatttcctgaaaataattgaaatatcttactttaaaaatattttcatctctgaaatatctcgttatttattggaggtattgtttaaccttagagagaccattaaattatttataaaatattttgtaattacctgtagctaatacattacatagaaaaaaactatgttaacagtgtctctgtttaagtataatcagatataaatatatacttaattttttaattttaaaaatagatacctgtttgactttgaggtagtccagaccttttctttttttttttttttttaatgtgtgcaaaagcccaaaggttcctaagcctggctgcaaagaagaatcaacagggacactttttaaaaacactcttatcagcctgggcaacacagtgagactccatctcttaaaaaaaaaattagctgggtatagtggtatgtgcctgtagtcccaggtactcaggaggctgaggcaggaggattgcctgagcccaggaggtggaaactgcagagagtcatgatcatgtccttacactccagcctggataacagagcgagaccctgtctcaaaaaaataaaataaaaaataaaaaca

SEQ ID NO: 221197 - DNA, 1000 bp, Homo Sapiens
caccacgcgggccggcggccggagcggggaagggcgcgggcgcggaggacgcacgcggggccccggctcgcaagccccagctcaccgcgccgcggacctcacacctgcgcagccccctcctcccacttcccactccgggttggttttgtgtttgcttttccggaccccactctgccctccaaaaagacaaaaaaaaaaaaaaaaaaaaaagcaaaaagacgtcggagaaaagtgccgcgaaaaaatggatgagttgcaatttctctcgggatggcgcgggtggtgtgtgtgtgttcccacgggccccggaggcccactccgcggagggcacgcggcgcggtaggcgagcgccgaggcccagcggccgggggaggacgacctcgtatcccgcgtccccgccgcgctggatccggactgagtggccgggcctgcggactggatgtgcggggcctggacttgcctaggatttcccgaccccgtacaaaccaagttgccctctccgagctaggcccggccgagagcgccttagctcgagtcggatccgtgttggggcgggcgttgggtttggggggacggtgcccccagcccaggatcgggcactcagtggagccgcacacggccccggcgcgcctggtagagcctcgctggccccgcgccccggagccctatattaaggccacggagcgacagcgggcagtgcgggcctggcgggaggtgggggaggtccatctcagaacaccccagccttgagcttagctgcaggcccaggccctctgctctgctcccgggctaggaggtggccctctgtctgggcgaacagccccctcctcaccgcccgccgtgcaagagtcgagccggcagagcaaggggcgcggccccagggccctgcgcccactttgcacacccgctctccggcccgcgcccctgtttacagcgtccctgtgtatgttggactgactgtaataaatctgtctatatcgactaaaaaaaaaaaaaaaaa

SEQ ID NO: 221198 - DNA, 1000 bp, Homo Sapiens
aactattgctaatgtataaaacacttcattatataagcttcagtggtacagatgaaccagaatgaatgtttatcttctcagaaacactccttcaatattatattggatcatgctgctaatgtaacttgggctacaactcttcatggtgctacaaacttctctgtctcattcagtcgtatttttttatccatagaaaaaggactacattaggtgtaaaagtgtacaatatatttttatactgtgacttaatttgtcattaacaaacttttacaccaccacaatgtattcatgtgcacttgcaaaaggagatctcggacatgcaaatgttaccagaacaaacccagcttttgtccacaaggtgactgtaactcagaatggaaagtgggctttataatagggtgtggagtgaagaacatgctgtatgttactaacagccctttgaatttaacaaaaactgggaatccattaggaaacggattgcatcatacctgaacataagctggactgctgaaattgtatttttagctaatgaaaaagtgtttggactagtactctaaaaatgttctaatgataaagttttgagtcaaaatagaaaagaaaaaaatctgcattccaggccgaattttgtatatttttattgcatttaaaattgctattctgtaatattgggaaatcaagtggcttatcatgtatatcgtgtacttaaaatgtattcacaaactactgttgtatttgtataaaatatagacaaagatcatattttttgtgtgtgtataagctctgtaaaatagcaatcacattatgaagctgcagtgatactacattttaaacattcacatccaaagaagcagactatttattgtccatataccagatttaaaatattaatttgctgctaattaaataatagtactgcagcttcttgtggcctacagtgttatgtttgctgtaagaataagatatgtgaattccacaaaatatatgaataaaatctcgtgcc

SEQ ID NO: 221199 - DNA, 1000 bp, Homo Sapiens; identical to SEQ ID NO: 115841

SEQ ID NO: 221200 - DNA, 1000 bp, Homo Sapiens; identical to SEQ ID NO: 115843

SEQ ID NO: 221201 - DNA, 1000 bp, Homo Sapiens
aacgggcgcacgggctacgttctgcagcctgagagcatgaggacagagaaatatgacccgatgccacccgagtcccagaggaagatcctgatgacgctgacagtcaaggttctcggtgctcgccatctccccaaacttggacgaagtattgcctgtccctttgtagaagtggagatctgtggagccgagtatggcaacaacaagttcaagacgacggttgtgaatgataatggcctcagccctatctgggctccaacacaggagaaggtgacatttgaaatttatgacccaaacctggcatttctgcgctttgtggtttatgaagaagatatgttcagcgatcccaactttcttgctcatgccacttaccccattaaagcagtcaaatcaggattcaggtccgttcctctgaagaatgggtacagcgaggacatagagctggcttccctcctggttttctgtgagatgcggccagtcctggagagcgaagaggaactttactcctcctgtcgccagctgaggaggcggcaagaagaactgaacaaccagctctttctgtatgacacacaccagaacttgcgcaatgccaaccgggatgccctggttaaagagttcagtgttaatgagaaccactccagctgtaccaggagaaatgcaacaagaggttaagagagaagagagtcagcaacagcaagttttactcatagaagctggggtatgtgtgtaagggtattgtgtgtgtgcgcatgtgtgtttgcatgtaggagaacgtgccctattcacactctgggaagacgctaatctgtgacatcttttcttcaagcctgccatcaaggacatttcttaagacccaactggcatgagttggggtaatttcctattattttcatcttggacaacttctaacttatatctttatagaggattccccaaaatgtgctcctcatttttggcctctcatgttccaaacctcattgaataaaaagcaatgaaaaccttg

SEQ ID NO: 221202 - DNA, 1000 bp, Homo Sapiens
aactaaattttactaagctgaacaactctgacagtctaaagagctaatgtgggttaccaaaaggcctgtacctgtaaaacaaaatgcaggtgtaatgattatacatgtatatggattacctggacatactctcatttgggttgttcttcaaagaagcaagcagccgatccctgttttcataaagctaatacttcagttggaaaaattaaacaggagcacaaagtcagggataggggttagcagaagagagaaatagtgtcacatcaagggcaggatctcatagctagggaacatttcacaaataaggtgagattttgtaaccaataataaaaatgaatgtttttataagtaaataacttatttttcatatggctaaagatggtaaaatgacttcattctatagccattgtaaataagaatttgctattgatgaaagaagttcagattggcatttgaagtattgagtgtatgggatctctaaggatttcttagattttatatttaaatattttttaaaccttagaggagtcaacaaactggctcttgattttcagcaccctactctcatgaaaaaagcctgaaaggaccctttcccttataagtaatttaatccaatttctccccattttatagatgaggaaactgaggctcagatcagatgagaactcacttaaatccactcaatgtgtagatggtagagctgggactagcaacattgctgcagcccattgttggcctctctcttcactttatcattgcccaagaatgaggatatgcagtaaacagaattcaggcaagatacctctaagctgttttgaaccctctgatattttgtatttatgtgtttgtctgtctccccctactagaatgtaagctccatggggcagggacttcactgtattttgttcatagtgtatccccagagcctggaccagtgcttggcacataggagatggcaataaatgcttgtagaattaataaacaaaaaaaaaaaaaaaaa

SEQ ID NO: 221203 - DNA, 1000 bp, Homo Sapiens; identical to SEQ ID NO: 115845

SEQ ID NO: 221204 - DNA, 1000 bp, Homo Sapiens; identical to SEQ ID NO: 115846

SEQ ID NO: 221205 - DNA, 1000 bp, Homo Sapiens
ctacgctacctgtgcgccataaggaatttcaaaggaatattaagaagaaacgtgcctgcttccccttcgccttctgccgtgattgtcagtttcttgagggctccccagccatgcttcctgtacagcctgcaaaacttacagaacctgctaaggccatcaaacctattgatcggaagtcagtccatcagatttgctctgggccggtggtactgagtctaagcactgcggtgaagaagatagtaggaaacagtctggatgctggtgccactaatattgatctaaagcttaaggactatggaatggatctcattgaagtttcaggcaatggatgtggggtagaagaagaaaacttcgaaggcttatctctttcagctctgaaacatcacacatctaagattcgagagtttgccgacctaactcgggttgaaacttttggctttcaggggaaagctctgagctcactttgtgcactgagtgatgtcaccatttctacctgccacgtatcggcgaaggttgggactcgactggtgtttgatcacgatgggaaaatcatcaagaaaaccccctacccccaccccagagggaccacagtcagcgtgaagcagttattttctacgctacctgtgcgccataaggaatttcaaaggaatattaagaagaaacgtgcctgcttccccttcgccttctgccgtgattgtcagtttcttgagggctccccagccatgcttcctgtacagcctgcaaaactgactgtaactggagagctacgggcatgcagaagttggaagacgagggaaggcatcacagaggctgtggggtgaaccgacttcaaggaatgggtccttcccttcagaaccacatgtgtgcgggacacccagacagaaaacacaaatgcaaagtcaagtggagggcatttggaaggagcagtgaagccaagccaggaaacaccaagatggcgagccagtgtggttgtagagattgcagagagggacaagataag

SEQ ID NO: 221206 - DNA, 1000 bp, Homo Sapiens
ggcacacagtgtaccccaagcccgaggaatggccaaagagtgagtactcggagctggatgaggatgagtcgcaggctccctatgaccccaacggcaagccagaaaggttttactacaatgtggagtcctgtggctctctgcgtcctgaaaccattgtcctgtcagccctctcaggattgaagaagaaactgagtgatttacaaactcaattaagccacgagatccagagtgatgtgctaaccataaattaactgcagcttgcctgcttcagcaaaaacggagattcaggccagcagctggatatgggggtctctcttcagactcttctcgtttctgagaatctagtctactgttggttgagcttcttggcaggacatcagtaccaactagaagtgggtcatagatagattaccagggatgcagtggtgtttaggcaggataggtctttactggccctgactgctgttaataattggcagcagtgctccccagatcccagaaggtccctgctggagtgtttccagtgcacctgtaggaacaactagacttctctcctggttagtccagctctttactctaaaccctttctgtccaaaatgagtcattttcagttgtaccttagatgtctggtgttgaggatcaagtgccatagcctttattcagggggcctataaacccttccagttcttgccccagggctggcctgctagcgcttcaaattcccaggtgtccctaatttgagaagtaaccttttggaatagcaggagcaagggcccctcccacatacacaggaggagtatttcatttctccttaatgaaggctctggccctaacccctcagcactgtctccagataggaacatgcacaaagcagttaattaggcagcctggagaaaaccagagatccagtacagaaaggaaaggatatttattgattaacagaagttgtctttttaaaagtgtttatttttgcaataaagagcacaacataaaaaaaaaa

SEQ ID NO: 221207 - DNA, 1000 bp, Homo Sapiens
tccacagcgcctccagcttcctcagcagtcacgtccccctctctgagtccctccccttctgcctcagcctccacctccgaggcatccagtgccagtgagaccagcacaacacagaccacctccactcctttgtcctcccctcttgggaccagccaggtgatggtgacagcatcaggtttgcaaacagcagcagctgctgcccttcaaggagctgcacagttgccagcaaatgccagtcttgctgccatggcagctgctgcaggactaaacccaagcctgatggcaccctcacagtttgcggctggaggtgccttactcagtctgaatccagggaccctgagcggtgctctcagcccagctctaatgagcaacagtacactggcaactattcaagctcttgcttctggtggctctcttccaataacatcacttgatgcaactgggaacctggtatttgccaatgcgggaggagcccccaacatcgtgactgcccctctgttcctgaaccctcagaacctctctctgctcaccagcaaccctgttagcttggtctctgccgccgcagcatctgcagggaactctgcacctgtagccagccttcacgccacctccacctctgctgagtccatccagaactctctcttcacagtggcctctgccagcggggctgcgtccaccaccaccaccgcctccaaggcacagtgagctgggcagagctgggctgccagaagcctttttcactctgcagtgtgattggactgccagccaggttaataaactgaaaaatgtgattggcttcctctcgccgtgttgtgagggcaaaggagagaagggagaaaaaaaaaaaaaaaccacacacacccatacacacataccagaaaaagaaagaaaggatggagacggaacatttgcctaattttgtaataaaacactgtcttttcaggattgcttcatggattggagaactttctaaccaaaaattaaaaaaaaaaaaaaaaaa

SEQ ID NO: 221208 - DNA, 1000 bp, Homo Sapiens
aggaggtggtgcgcgtctggttctgcaaccggcggcagaaggagaagcgcatgacccctgcggccggcgcgggccacccgcccatggacgatgtatacgcgcctggggagctagggcctggcgggggcggcgcatcgccaccctccgcgcccccaccgcccccgccggcggcgctgcaccaccaccaccaccacacactgcccggctcagtgcagtgaccccgcgggccgggcccccgccggcgcgctgcagggcgggcgcgcagcccgcccgggcctggactctttttgttcggttgctttggattttacaaaaaaaaaaaaaagcccagaaactttcgaacaaaaccaaacacccggagcaccctctccggtgagcggcgaagacagcccggtagctgcgtcgcccgagccccgggagagaggagcgaagatccggaactcgccaactcaccccgggcatcctgcccgccgcctgctctctgcccccatcccctcgacgacccccgcccctgcccccccgggctgttcggggccggatccccgagcggcctcccctttgcgacaggtaacgcagtgcggggttagggattccccgggagagaggacgaagcgaggagagttctccatcccctctccccgcgtggactcctgagcctgcgggtccagggtggggggctgtctctttattcgctacacgcctcttctctcctagaaggatgcgccccaccccgctttcccctttctccgggcttggttttttacggtttttatttattcgtgagcctctcggctcctggggtccttctaactccgcccgcgcccttaatttaaatcgcagtatactgtatttatcggggccccggaggggaggtcgcgagagccgcgtctgtgtataaaagcaggaaatagccaaagctttaatctagcctaatttatttttccccttatatttccctaccctaccctccccccaaaaaaaagcaaaaaaaacggaattc

SEQ ID NO: 221209 - DNA, 1000 bp, Homo Sapiens
ccgtgaagctggagaaggagaagctggagcaaaacccggaggagtcccaggacatcaaagctctgcagaaagaactcgagcaatttgccaagctcctgaagcagaagaggatcaccctgggatatacacaggccgatgtggggctcaccctgggggttctatttgggaaggtattcagccaaacgaccatctgccgctttgaggctctgcagcttagcttcaagaacatgtgtaagctgcggcccttgctgcagaagtgggtggaggaagctgacaacaatgaaaatcttcaggagatatgcaaagcagaaaccctcgtgcaggcccgaaagagaaagcgaaccagtatcgagaaccgagtgagaggcaacctggagaatttgttcctgcagtgcccgaaacccacactgcagcagatcagccacatcgcccagcagcttgggctcgagaaggatgtggtccgagtgtggttctgtaaccggcgccagaagggcaagcgatcaagcagcgactatgcacaacgagaggattttgaggctgctgggtctcctttctcagggggaccagtgtcctttcctctggccccagggccccattttggtaccccaggctatgggagccctcacttcactgcactgtactcctcggtccctttccctgagggggaagcctttccccctgtctccgtcaccactctgggctctcccatgcattcaaactgaggtgcctgcccttctaggaatgggggacagggggaggggaggagctagggaaagaaaacctggagtttgtgccagggtttttgggattaagttcttcattcactaaggaaggaattgggaacacaaagggtgggggcaggggagtttggggcaactggttggagggaaggtgaagttcaatgatgctcttgattttaatcccacatcatgtatcacttttttcttaaataaagaagcctgggacacagtaaaaaaaaaaaaaaaaaaaaaaaaaaaaa

SEQ ID NO: 221210 - DNA, 1000 bp, Homo Sapiens; identical to SEQ ID NO: 115850

SEQ ID NO: 221211 - DNA, 1000 bp, Homo Sapiens; identical to SEQ ID NO: 115851

SEQ ID NO: 221212 - DNA, 1000 bp, Homo Sapiens
aatgttttattatccataatgatctaaactaataagattcaccaaaaagtaaaaattcaattttacaatatacatttttttttttaactatttggctttacctttttaccttggttctccttactgaagtcctcttgctttcactttgatctggtttttgaagtctcttaattattggctgggcatggtgactcatgcctgtaatcccggcactttgggaggccaagggaggtgatcacttgagcccaggagtaaagaccagcctgggcaacatagtgagactccgtctctacaaaaaataaatttagctgggcatggtggtgcacatctgtagtcctaccaacttgggaggctgaggcaggagaatcgcttgagccccaggcttcgaggctgcagtgagctatgattacgacactgcactccagcctaggcgacagagcaagaccccattctcttacaaagtctctattataaaagtacatccatcaataccattccatttaaaatgggctattgtaatttacccacattatcacattttcaggaattataagaatgtgttttattgtactccttccttggagctgaatgcaaggaatgtgaattctgaggaattaaggtagaatatatttgactttctggtaaagatcatggttaagtataatcattactgccaaactggaattttcaagttattataatatcccaggccccttgataaaagctgagggttatcatgaccttaatgctaattcaatgagaaatgagtttaatagcataacattaccaaggtaatcaaactaataaaattccatatatcttccctgcatcttgtcactgtgtaccattcaaagtgtttataaaactctagattcatcaaatgagatttgctcagctttttgaaatgttaagatgtgtttggagaaggctgcatgactttgtttttcccttttagcaaaactaaataaagttgtcaaatattgaaaaaaaaaaaaaaaaa

SEQ ID NO: 221213 - DNA, 1000 bp, Homo Sapiens
taattaacacattatcaaagtcctcttacaatttattttccgcagcatgtcagctaagtagacccaatggggagagaaaatgcctgctttctttccctctttttctgcactgccatattcacccccaaccatccaatctgtggataattggatgttagcggtactcttccacttccgggcctggagcttggcttgtatccaagtgtatggttgctttgcctaagaggaatccctctatttcacctgttctggaggcaccagaccttgaaaagaacatgctcaaaataaaatgttatctgttatttttgtaaactcaaagttaagatgatcaaagttctaaaattccaagaatgtgcttttagacggtctcaatctaaaagcacttcaaggggtcaaagggcaaccagcttgggtgctacctcagtgttgtagtttctgatactttatgtctttgctcaccctcatccccaaactacttgaaaagggcatttggcaccactctctgaaacaacacagtcactctagcaaggcccccaaagggccctggttttacattacatttcaaactttatttgctttggggttttgtttctgttgttgttcaaatgcaaaaaaaagaaaaaaaaagaaaaaaaaaggtgactcacattgttacacatgctttaaaatatgtattcaaatgttattaaccacaatgacgacctgctttgatttaaccaagaagacggctgcggagcctagcagactcaggcctgtgggaatgggatttgttacaaatctaggtttgttactggcttcagaaagctaattaagtgctctgaaaaagacaccgtttcttgaaacaaagatggttgtattcctcactttgatgttgttttgcaagatgtttgtggaaatgttcatttgtatctggatctctgttatgtgccatttttcttctagcatcgagatacaataaaaaaaaaaaaaaagaaaaaaaaaaaaaaaaaaaaaaaaaaaa

SEQ ID NO: 221214 - DNA, 1000 bp, Homo Sapiens
ctgggacctgactgtggggtcctagatgccaaaggggttcccctgcggagttcccctgtctgtcccaggccgacccaagggagtgtcagccttgggctctcttctgtcccagggctttctggaggacgcgctggggccgggaccccgggagactcaaagggagaggtctcagtggttagagctgctcagcctggaggtagggggctgtcttggtcactgctgagacccacaggtctaagaggagaggcagagccagtgtgccaccaggctgggcagggacaaccaccaggtgtcaaatgagaaaagctgcctggagtcttgtgttcacccgtgggtgtgtgtgggcacgtgtggatgagcgtgcactccccgtgttcatatgtcagggcacatgtgatgtggtgcgtgtgaatctgtgggcgcccaaggccagcagccatatctggcaagaagctggagccggggtgggtgtgctgttgccttccctctcctcggttcctgatgccttgaggggtgtttcagactggcggctccagtgggccaaagggcaaccacatgagcatgggcaggggctttctccttggatgtgggacccacagcagcttcctgaggctgggggtgggtgggtgggtggtttggccttgaggacgctagggcaggcagcacacctggatgtggacttggactcggacacttctgccctgcaccctggcccgctctctacctctgcccaccgttgtggccctgcagccggagatctgaggtgctctggtctgtgggtcagtcctctttccttgtcccaggatggagctgatccagtaacctcggagacgggaccctgcccagagctgagttgggggtgtggctctgccctggaaagggggtgacctcttgcctcgaggggcccagggaagcctgggtgtcaagtgcctgcaccaggggtgcacaataaagggggttctctctcaaaaaaaaaaaaaaaaaaaaaaaaaaaaaaaaa

SEQ ID NO: 221215 - DNA, 1000 bp, Homo Sapiens; identical to SEQ ID NO: 115864

SEQ ID NO: 221216 - DNA, 1000 bp, Homo Sapiens
ccagcacaccaacccatgctgctggcgtctaagtgtttgggaagcaacaaagagcgagtcccctgcccggtggtttgccatgtcgcttttgggcctccttcccatgcctgtctctgttcagatgtgcatttcacctgtgacaaaggatgaagaacacagcatgtgccaagattctactcttgtcatttttaatattactgtctttattcttattactattattgttcccctaagtggattggctttgtgcttggggctatttgtgtgtatgctgatgatcaaaacctgtgccaggctgaattacagtgaaatttttggtgaatgtgggtagtcattcttacaattgcactgctgttcctgctccatgactggctgtctgcctgtattttcggactttgacatttgacatttggtggactttatcttgctgggcatactttctctctaggagggagccttgtgagatccttcacaggcagtgcatgtgaagcatgctttgctgctatgaaaatgagcatcagagagtgtacatcatgttattttattattattatttgcttttcatgtagaactcagcagttgacatccaaatctagccagagcccttcactgccatgatagctggggcttcaccagtctgtctactgtggtgatctgtagacttctggttgtatttctatatttattttcagtatactgtgtgggatacttagtggtatgtctctttaagttttgattaatgtttcttaaatggaattatttgaatgtcacaaattgatcaagatattaaaatgtcggatttatctttccccatatccaagtaccaatgctgttgtaaacaacgtgtatagtgcctaaaattgtatgaaaatccttttaaccattttaacctagatgtttaacaaatctaatctcttattctaataaatatactatgaaataaaaaaaaaaggagaaagctaaaaaaaaaaaaaaaaaaaaaaaaaaaaaaaaaaaaaaa

SEQ ID NO: 221217 - DNA, 1000 bp, Homo Sapiens; identical to SEQ ID NO: 115865

SEQ ID NO: 221218 - DNA, 1000 bp, Homo Sapiens
acttctccgacgtaaagttcaacagatgcattacctctcagctcatcaagtggtttagcaatttccgtgagttttactacattcagatggagaagtacgcacgtcaagccatcaacgatggggtcaccagtactgaagagctgtctataaccagagactgtgagctgtacagggctctgaacatgcactacaataaagcaaatgactttgaggttccagagagattcctggaagttgctcagatcacattacgggagtttttcaatgccattatcgcaggcaaagatgttgatccttcctggaagaaggccatatacaaggtcatctgcaagctggatagtgaagtccctgagattttcaaatccccgaactgcctacaagagctgcttcatgagtagaaatttcaacaactctttttgaatgtatgaagagtagcagtcccctttggatgtccaagttatatgtgtctagattttgatttcatatatatgtgtatgggaggcatggatatgttatgaaatcagctggtaattcctcctcatcacgtttctctcattttcttttgttttccattgcaaggggatggttgttttctttctgcctttagtttgcttttgcccaaggcccttaacatttggacacttaaaatagggttaattttcagggaaaaagaatgttggcgtgtgtaaagtctctattagcaatgaagggaatttgttaacgatgcatccacttgattgatgacttattgcaaatggcggttggctgaggaaaacccatgacacagcacaactctacagacagtgatgtgtctcttgtttctactgctaagaaggtctgaaaatttaatgaaaccacttcatacatttaagtattttgtttggtttgaactcaatcagtagcttttccttacatgtttaaaaataattccaatgacagatgagcagctcacttttccaaagtaccccaaaaggccaaattaaaaaaaaaaaaaaaaaaa

SEQ ID NO: 221219 - DNA, 1000 bp, Homo Sapiens
tgaattacacagattacatacaacctatttgtttaccggaagaaaatcaagtttttcctccaggaagaaattgttctattgctggttgggggacggttgtatatcaaggtactactgcaaacatattgcaagaagctgatgttcctcttctatcaaatgagagatgccaacagcagatgccagaatataacattactgaaaatatgatatgtgcaggctatgaagaaggaggaatagattcttgtcagggggattcaggaggaccattaatgtgccaagaaaacaacaggtggttccttgctggtgtgacctcatttggatacaagtgtgccctgcctaatcgccccggagtgtatgccagggtctcaaggtttaccgaatggatacaaagttttctacattagcgcatttcttaaactaaacaggaaagtcgcattattttcccattctactctagaaagcatggaaattaagtgtttcgtacaaaaattttaaaaagttaccaaaggtttttattcttacctatgtcaatgaaatgctagggggccagggaaacaaaattttaaaaataataaaattcaccatagcaatacagaataactttaaaataccattaaatacatttgtatttcattgtgaacaggtatttcttcacagatctcatttttaaaattcttaatgattatttttattacttactgttgtttaaagggatgttattttaaagcatataccatacacttaagaaatttgagcagaatttaaaaaagaaagaaaataaattgtttttcccaaagtatgtcactgttggaaataaactgccataaattttctagttccagtttagtttgctgctattagcagaaactcaattgtttctctgtcttttctatcaaaattttcaacatatgcataaccttagtattttcccaaccaatagaaactatttattgtaagcttatgtcacaggcctggactaaattgattttacgttcctctt

SEQ ID NO: 221220 - DNA, 1000 bp, Homo Sapiens; identical to SEQ ID NO: 115872

SEQ ID NO: 221221 - DNA, 1000 bp, Homo Sapiens; identical to SEQ ID NO: 115882

SEQ ID NO: 221222 - DNA, 1000 bp, Homo Sapiens
aactttgatctctgcttactaatgtgccccatgtccaagtccaacctgcctgtgcatgacctgatcattacatggctgtggttcctaagcctgttgctgaagtcattgtcgctcagcaatagggtgcagttttccaggaataggcatttgcctaattcctggcatgacactctagtgacttcctggtgaggcccagcctgtcctggtacagcagggtcttgctgtaactcagacattccaagggtatgggaagccatattcacacctcacgctctggacatgatttagggaagcagggacaccccccgccccccacctttgggatcagcctccgccattccaagtcaacactcttcttgagcagaccgtgatttggaagagaggcacctgctggaaaccacacttcttgaaacagcctgggtgacggtcctttaggcagcctgccgccgtctctgtcccggttcaccttgccgagagaggcgcgtctgccccaccctcaaaccctgtggggcctgatggtgctcacgactcttcctgcaaagggaactgaagacctccacattaagtggctttttaacatgaaaaacacggcagctgtagctcccgagctactctcttgccagcattttcacattttgcctttctcgtggtagaagccagtacagagaaattctgtggtgggaacattcgaggtgtcaccctgcagagctatggtgaggtgtggataaggcttaggtgccaggctgtaagcattctgagctgggcttgttgtttttaagtcctgtatatgtatgtagtagtttgggtgtgtatatatagtagcatttcaaaatggacgtactggtttaacctcctatccttggagagcagctggctctccaccttgttacacattatgttagagaggtagcgagctgctctgctatatgccttaagccaatatttactcatcaggtcattattttttacaatggccatggaataaaccatttttacaaaa

SEQ ID NO: 221223 - DNA, 1000 bp, Homo Sapiens; identical to SEQ ID NO: 115883

SEQ ID NO: 221224 - DNA, 1000 bp, Homo Sapiens
aggaagtgatggagaactggacggtgcgggaactgctgctcctccaggtggaggagcagaagacactgtctgtgcgccaattccactaccaggcctggccggatcacggcgttccctcctccccagacaccttgctggctttctggaggatgcttcggcagtggctggatcagaccatggagggaggcccacccattgtgcactgcagtgctggcgtgggtcgcacaggaaccctcattgccctggacgtcctgctccggcagctgcagtccgagggtctccttgggcccttcagctttgtaaggaagatgagagagagtcggccgttgatggtgcagactgaggctcagtacgtattcctgcatcagtgcatcctgcggttcctccaacagtcagcccaggccccagccgagaaggaagtcccgtatgaggatgtcgaaaacctcatctacgagaacgtggccgccatccaggcccacaagttggaggtctaagtgacgagggggctgggtcggcagcccaggcatcctcaagctctggacacccacttgagcccagattcctggaagagcagagggctgggctcccagactcctgggtgctgtgggaggagggggctggtatcccaaactctggtttccccaggagagagtggtctggtgggcttcagatgagtcctatgggagctggggatctggattcctggttccctgaaggaggagagggatgatagcttggattccctaggtctttccaggatgcagaaagaaacaggctggggcctggattctgaggcaggaaggaatttgggtctggagttctggctacttgaggaccaaaggcaggaaggatcctgccttgattttacttcagaaaccaaatcagtcttctataatctggggtcggagggagtccctgtgcccaaggtctctctgcaccccaccatccacatgtatttttccttctatcccataatttattaaatcactgttctccccag

SEQ ID NO: 221225 - DNA, 1000 bp, Homo Sapiens
taccagatagagaatgagaacaccgtggatgtgtatgggattgtgtatgaccttcgaatgcataggcctttaatggtgcagacagaggaccagtatgttttcctcaatcagtgtgttttggatattgtcagatcccagaaagactcaaaagtagatcttatctaccagaacacaactgcaatgacaatctatgaaaaccttgcgcccgtgaccacatttggaaagaccaatggttacatcgcctaattccaaaggaataacctttctggagtgaaccagaccgtcgcacccacagcgaaggcacatgccccgatgtcgacatgtttttatatgtctaatatcttaattctttgttctgttttgtgagaactaattttgagggcatgaagctgcatatgatagatgacaaattggggctgtcgggggctgtggatgggtggggagcaaatcatctgcattcctgatgaccaatgggatgaggtcacttttttttttttcccccttgaggattgcggaaaaccaggaaaagggatctatgatttttttttccaaaacaatttcttttttaaaaagactattttatatgattcacatgctaaagccaggattgtgttgggttgaatatattttaagtatcagaggtctatttttacctactgtgtcttggaatctagccgatggaaaatacctaattgtggatgatgattgcgcagggaggggtacgtggcacctcttccgaatgggttttctatttgaacatgtgccttttctgaattatgcttccacaggcaaaactcagtagagatctatatttttgtactgaatctcataattggaatatacggaatatttaaacagtagcttagcatcagaggtttgcttcctcagtaacatttctgttctcatttgatcaggggaggcctctttgccccggccccgcttcccctgcccccgtgtgatttgtgctccattttttcttcccttttccctcccagttttc

SEQ ID NO: 221226 - DNA, 1000 bp, Homo Sapiens
tcgttttttatatgtttccagtgtagcagatctctatataaatatataaatatatataactggcttattttcttttaatgtgcaatgatggctggatcatttaaagttctttttagaaaataacataagccaaagactcaagtgtaaatatgtctatatggagaaagcacattatatttattggttacttacattccttttttgatggctaaaatactaccaccacacaatcatctttttttcctgaagaaagctttttctttagctaaaatcaattgtaaacgatttttgtagattattttttgtatgttttagtgtaagtagaagataaactttttattcataaaccaggaagcaatgttctttatagtgattctcttgtgtacatgcttgtgaattaaatttgtgtaaaatcccttggcaattgggtcttttaatataggaccaaattaaaacattttgctgaatatgtatagtttttcacaatttcattaggtaaataatggtttggtgatcatacatgagaaatgtacacattaaaaggccttgctgacaacttgcacaatgttgaacatagcctttaagcatcatttaaattttaaaggaatggagtttttcagcctgtggcccagcactggtcaagaaaacaagatggcaacatatatgctttcagggtcaaatttgagcaaactgtaaactgtcagggtgataaaatgtttctcttgatgtttacatgcacaagctttgcgttctgactataaaaagtgtgaacaaatcaatgccagattcctgttttgcgcattgtcatgggattcttaagtgaacctttctaaatgtggtcttgttcacatgctccacgtagctgtaacttcacatcatcagcttgcagtttgtaattgactaaagcattccagtgtcctctttctagattgccagctcatgacatggtgcttataaagatttaattaaagtaagaatgaaataaagtttttataattat

SEQ ID NO: 221227 - DNA, 1000 bp, Homo Sapiens
tgctgacattgagcagtatcagtttctctacaaagtgatcctcagccttgtgagcacaaggcaggaagagaatccatccacctctctggacagtaatggtgcagcattgcctgatggaaatatagctgagagcttagagtctttagtttaacacagaaaggggtggggggactcacatctgagcattgttttcctcttcctaaaattaggcaggaaaatcagtctagttctgttatctgttgatttcccatcacctgacagtaactttcatgacataggattctgccgccaaatttatatcattaacaatgtgtgcctttttgcaagacttgtaatttacttattatgtttgaactaaaatgattgaattttacagtatttctaagaatggaattgtggtatttttttctgtattgattttaacagaaaatttcaatttatagaggttaggaattccaaactacagaaaatgtttgtttttagtgtcaaatttttagctgtatttgtagcaattatcaggtttgctagaaatataacttttaatacagtagcctgtaaataaaacactcttccatatgatattcaacattttacaactgcagtattcacctaaagtagaaataatctgttacttattgtaaatactgccctagtgtctccatggaccaaatttatatttataattgtagatttttatattttactactgagtcaagttttctagttctgtgtaattgtttagtttaatgacgtagttcattagctggtcttactctaccagttttctgacattgtattgtgttacctaagtcattaactttgtttcagcatgtaattttaacttttgtggaaaatagaaataccttcattttgaaagaagtttttatgagaataacaccttaccaaacattgttcaaatggtttttatccaaggaattgcaaaaataaatataaatattgccattaaaaaaaaaaaaaaaaaaaaaaaaaaaaaaaaaaa

SEQ ID NO: 221228 - DNA, 586 bp, Homo Sapiens
ccagcctttcagtgcaggctccagccctccacccccacccgagttgcaggatgtcgatgacagacttgctgaacgctgaggacatcaagaaggcggtgggagcctttagcgctaccgactccttcgaccacaaaaagttcttccaaatggtcggcctgaagaaaaagagtgcggatgatgtgaagaaggtgtttcacatgctggacaaggacaaaagtggcttcatcgaggaggatgagctgggattcatcctaaaaggcttctccccagatgccagagacctgtctgctaaagaaaccaagatgctgatggctgctggagacaaagatggggacggcaaaattggggttgacgaattctccactctggtggctgaaagctaagaagcactgactgcccctggtcttccacctctctgccctgaacacccaatctcggcccctctcgccaccctcctgcatttctgttcagttcgtttatgttattttttactcccccatcccctgtggccctctaatgacaccattcttctggaaaatgctggagaagcaataaaggttgtaccagtcagaaaaaaaaaaaaaaa

SEQ ID NO: 221229 - DNA, 1000 bp, Homo Sapiens
ggaaactcggttaaaaggtgaggcagagtaccaggagatccggaaccccaatggcacagtgacggtcatcagccgctaccgcctggtgcccagcagggaagcccaccagcagtccttggcctgcatcgtcaactaccacatggaccgcttcaaggaaagcctcactctcaacgtgcagtatgagcctgaggtaaccattgaggggtttgatggcaactggtacctgcagcggatggacgtgaagctcacctgcaaagctgatgctaaccccccagccactgagtaccactggaccacgctaaatggctctctccccaagggtgtggaggcccagaacagaaccctcttcttcaagggacccatcaactacagcctggcagggacctacatctgtgaggccaccaaccccatcggtacacgctcaggccaggtggaggtcaatatcacagaattcccctacaccccgtctcctcccgaacatgggcggcgcgccgggccggtgcccacggccatcattgggggcgtggcggggagcatcctgctggtgttgattgtggtcggcgggatcgtggtcgccctgcgtcggcgccggcacaccttcaagggtgactacagcaccaagaagcacgtgtatggcaacggctacagcaaggcaggcatcccccagcaccacccaccaatggcacagaacctgcagtaccccgacgactcagacgacgagaagaaggccggcccactgggtggaagcagctatgaggaggaggaggaggaggaggagggcggtggagggggcgagcgcaaggtgggcggcccccaccccaaatatgacgaggacgccaagcggccctacttcaccgtggatgaggccgaggcccgtcaggacggctacggggaccggactctgggctaccagtacgaccctgagcagctggacttggctgagaacatggtttctcagaacgacgggtctttcatttccaagaaggagtggtacgtgtag

SEQ ID NO: 221230 - DNA, 1000 bp, Homo Sapiens; identical to SEQ ID NO: 115891

SEQ ID NO: 221231 - DNA, 1000 bp, Homo Sapiens
atcagcagacgtgtttaagccttcaacttgatttccaattattccatcatttctattctgaaatgactcactgtcgtagaaggaagtttattatataaccaaggtttcaggtatcctcctgtcaccacctctactattcaggaggcctaaaattgaaataagtactaaacagaaaccttaccatctgaagtcccttccattgttttctagttgcttcctcattcctttacccccaaactttctaagggctccccgactgcagtgcaaggtggccttgggcacagttttgcaaccaacctactcccctggaaagatggcttccttctccaattagcctgaatgagctttagtaagcaattgagagaactgtgtttttccgacaaacggtcacatgtccatcgttatggcatgtgcagaaaaacagagttatccacacaagtcaggagcaaaacccaagtagatgcctctaggggcacatggcccctcacatcacaagccagaacctaagctaagcattttttaaattgagtttgagactagcctgggcaacatggtgagaccccatctctatttaaaaaatgaacaaaattacctgggcatagtggtgtatgcctgtagtccctgctacttgggaggctcaggtgggaggatcacttgagccccaaagatggtggctgcagtaagccaagatcacaccactggcactccagcctgggcaacagagtgagaccctgtctcaaacaaacaacaacagtaacaacaaaaaaatatatagcgacttgaataggaaaccatagtatttcattgttttaatttgcatttattttatttctagtgaaacttttatatacgtatcggtcatttctatttccttttttgagaactgccaaatgttgccctagtagccaaaaatatcaggttgctattctgccttttcagtttgatctgaaagaaataaaggcatttaagcaatggaaaaaaaaaaaaaaaaaaaaaaaaa

SEQ ID NO: 221232 - DNA, 1000 bp, Homo Sapiens
aactgtgaaggtggtggttgtggactcggtcactgcggtggtttccccacttctgggaggtcagcagagggaaggcttggccttgatgatgcagctggcccgagagctgaagaccctggcccgggaccttggcatggcagtggtggtgaccaaccacataactcgagacagggacagcgggaggctcaaacctgccctcggacgctcctggagctttgtgcccagcactcggattctcctggacaccatcgagggagcaggagcatcaggcggccggcgcatggcgtgtctggccaaatcttcccgacagccaacaggtttccaggagatggtagacattgggacctgggggacctcagagcagagtgccacattacagggtgatcagacatgacctgtgctgttgtttgggaaacagggaagcattggggacccctcccaacttttcttcccagtaacgcctgctgtttactgccacctggcactggtgactacagacgttctcaggctggccagaagagacatcttgggttccttggcctcactctctgtaagcatataaaccacaggcgaaagaggatgctgcattgcgaggacccagaaattcatactggtgccacgtttccttcccttatttctaacgtgtatgtttctggtggaaaccaagttcaccctggctgggagcatctctgatgaggcatgctggcgactggatggataatcctgtgcatcaccattgtgtcctgtgctccctcctagcgcagtggccaagccgggaaagcctctaacttgcctttgctgctgctgccttttttttcttttgtctctgcctttccatttgttagatgggggcccactcttccttagctctgtctctgagttactgggtggaaataagcttataaatgaaatactcttcttcatctctgttttgctcttaaaaatataaaaaggcaattccccgaaaaaaaaaaaaaaaaaaaaaaaaaaaaaaaaaaaa

SEQ ID NO: 221233 - DNA, 1000 bp, Homo Sapiens
ctcccatcccttggcctggaccagtgagctggggagggactcggatgaactgaggcgcagcctacgccattgccttggacaggactctggccacaggcagggcgggtctgtgtcccatgtgtcctgtcagtcccctgagtatgtgtgtgggtgtggcgcatgtgcaggtctgtgcctcctgtcgggatttgggttttaacgtcttctgctggcccagccctgctctgttgtggggagttggcccccaggggaaagggctgtgagctgctccgccattaaactcacctccacctgagggcgctctgctgatctccgcctgggccctgatggccgtccccacccacctgccttccggcccggctccctggcggagccagaacccagggagttgcccgcgtgctgtccttcccctctgtgttgtgattgggttgtttcctgccctgcctggggctgcttctcgtcaccaagccctggtcctgcggcagctgtcacccctaccatccataccactgtgctgaccgctcagcctgaagagcagagaatgccatgggtgggactgtgggggtcggatcgtggggttgttggcagagggcaaccctgggccccacaccgtgtggacaggcagacaccagattgtccaggagcaggagctgctgggactgcgctggccccggacctagtgggccttctcctggctgctgagatgtcgtctgtgactggcctggctggagggggagtgttgacaacccaaagctgttctccagtctggggagggagaggcagggtccccaatgtccgagctgcatctggacgctgctcttaaaggacctcctggggcaggggagcggtagggtctggactgggcagatgctgtatgacctccctgagcacccgtgactgccccatgctttcccctttgtgctctgtgtgtgtctgggctgtgcccgggggcttcacaaataaagtcgtgtggcagcttcaaaaaaaaaaaaaaaaaaaa

SEQ ID NO: 221234 - DNA, 1000 bp, Homo Sapiens
aagagcaaatcattaatgttgttcttgtttctatgataaaagcactttcagattgttctgcagaaagttggagctctgtccttcaaaccttttagccctatagatgataaatatcactgggttataagaaaaaattgcacaaaaattatgtgctttttaaaatatttatccaaaatgtagttgacagagatgtattttgagttggattggaaaggaatattttaagtgccttttaaaaatactaatagtccggccaggcgctgtggctcacgcctgtaatcccaggactttgggaggccaaggcgggcagatcaccggaggtcaggagttcgagaccagcctgaccaacatggagaaaccccatctctactaaaaatacaaaattagccgggtgtggtggcgcatgcctgtaatcccagctacttgggaggctgaggcagaattgcttgaacccaggaagcggaggttgtggtgagccaaggttgcgccactgcactccagcctgggcaacaagagtaaaactccatctcaaaaaatatatatatatatataaatagggaattttttttaatgtttgctccttgagttttcaagatgaaataaggagaaaccccataactttttagctctcttttaaaaataaatgtctccttctgtgttctgtaatatgaggataaataatctacttttgatagcatgctttgagatatttgtattcttaatttaatattgaaggaaggggttggttcccatagtacctggccagagggttatataccatcctgtctctggcccactgtggtaattccacatccaggtaccaccgccattcagagttgtctcaccccttctcgtgccttttctctccttgagctttataaacagatttgtacctgagccccagtgctacactcatccttgctttccagccctaagccatctcagcctgatgtcacaacccaataaatggggcactttcttcttttgtaaactattatca

SEQ ID NO: 221235 - DNA, 1000 bp, Homo Sapiens
tggatgcaccaccattcatacctcatgcagccttcaggttcagttctgacaccagggatggaccatcccatttctctccagcctgcctccatgatgggaccccttacccagcaactgggccatctctccctcagcagcacaggcacgtatatgccgacggctgcagctatgcaaggagcttacatctcccagtacacccctgtgccttcttccagtgtttcagtcgaggagagcagcggccaacagaaccaagtggcagtggacgcaccctcagagcatggggtctattctttccagttcaacaagtaacagtgggattcccctccccatctttactgaatagaaatgaattcttggagatactcatgctcccagattccagagggttaaccaggaatggagaccatccgtcggccctgctaaggactaacacttagccatcgtttttcacaggcctgggcctggaaaaagaaatctctacgttcctgccctttactattgctgatggagcctgggggaaccatcactttttttgtgtgctacattcaaggagatcaaaaaaacttttcttcttttgcaaagaaagctttttgtttttaactgcaacgtacttttcccctaccttgaagagacatggtggtcgcagcttctcatctatatgaaaaagttttcgatgtattggaattatttgggaatgcttttaaaacaatttgtaattatttctttacaaaccaaaacagaacagaaaggtgtggtgctggaacatcgatgaaggagccctacttactgagcttagttatggacttttttgatgcatgtgtgtatgtgttttaaaaagtatgcaggctctaaaaatgttattttgtaaagctctcagctcatgcaccccatctcctcttcacccatattatgccttctttctcttgtccagattcttctttttctcttttctaaacagctgagcctgcctactttgcccttttacagcttttaattttat

SEQ ID NO: 221236 - DNA, 1000 bp, Homo Sapiens; identical to SEQ ID NO: 115904

SEQ ID NO: 221237 - DNA, 1000 bp, Homo Sapiens
gcttctaatgcttgcatttacaacaatgccgatgacatagtcggaatggaagcgtcatccatgccatcagcagatttatatggtatttctgatcccaacatgctgtctaattgttctgtgaatatgatgacaaccagcagtgacagcatgggagagactgataatccaagacttctgagcatgaatcttgaaaacccctcatgtaattcagtgttagacccaagagacttgagacagctccatcagatgtcctcttccagtatgtcagcaggcgccaattccaatactactgtttttgtttcacaatcagatgcatttgagggatctgacttcagttgtgcagataacagcatgataaatgagtcgggaccatcaaacagtactaatccaaacagtcatggttttgttcaagatagtcagtattcaggtattggcagtatgcaaaatgagcaattgagtgactcctttccatatgaattttttcaagtataacttgcaagatttaaatccttttaaatcttgataccacctatatagatgcagcattttgtatttgtctaactggggatataatactatatttatactgtatatataatactgactgagaatataatactgtatttgagaatataaaaaacttttttcagggaagaagcatacaactttggacatagcgaatacaaaattggaagctgtcataaaaagacaactcagaggccaggcgcaggggctcacacctgtaatcctagcactttgggaggccaaggcgggtggatcacttgagaccaggaattcgagaccagcctggccaacatggtgaaaccccgtctctactaaaaatacaaaaattagctgagcatggtggtacgtgcctgtactgtcagctacttgggaggctgaggcacaataattgtttgaacccaggaagcagaggttgcagtgagctgagatcacaccaccgcactccagcctgggtgacagagtgagactctgtctc

SEQ ID NO: 221238 - DNA, 1000 bp, Homo Sapiens
ttgctgcggtatgcccgggtggcacctcctggcaagaagtgtgcctttgtgctgactcgggacggccgcccggtcaaggtgcagcgaaccatcttcagtgagtgtttctacaccatggccatgaacgagctgtggagagccacaggggaagtgcggtaccagacggaagcggtggagatgatggatcagatcgtccactgggtgcaggaggacgcgtcgggactgggccggccccagctccagggggccccggctgcggagcccatggcggtgcccatgatgctactgaacctggtggagcagctcggggaggcagatgaggagctggcgggcaaatacgcagagctgggggactggtgcgcccggaggattctgcagcacgtgcagagggatggacaagctgtgctggagaatgtgtcagagggtggcaaggaacttcctggctgcctggggagacagcagaacccaggccacacgctggaagccggctggtttctgctccgtcattgcattcggaaaggcgaccccgaacttcgagcccacgtgattgacaagttcctattgttgcccttccactccggatgggaccctgaccacggaggcctcttttacttccaggatgctgataacttctgccccacccagctggagtgggccatgaagctctggtggccacacagtgaagccatgattgccttcctcatgggttacagtgacagtggggaccctgtgctgctgcgcctcttctaccaagtggctgagtacaccttccgccagtttcgcgatcccgagtacggggaatggtttggctacctgagccgagagggcaaggtggccctctccatcaagggaggtcctttcaaaggctgcttccacgtgccgcggtgcctagccatgtgcgaggagatgctgggcgccctgctgagccgccccgcccccgccccctcccccgcccccacccccgcctgccgaggcgcggaataaaggctgagtccgctcc

SEQ ID NO: 221239 - DNA, 1000 bp, Homo Sapiens; identical to SEQ ID NO: 115906

SEQ ID NO: 221240 - DNA, 1000 bp, Homo Sapiens
gcgaggtaagagaggctgaaagagctgtgacccactgggttattaaaaataagccagaattacacttcagtctaaatacattattgattaaaaccatggttcctaaccaagtcagcctcagagccaggagggactgtggagttattgcaagagttccttaaattcctctgttcttatgtgcttaatcaaaagattctaaaattgtggattatatcatgtgaaagttcatggaatgtgtctctatattatacaggtacctatgtaaaagaaaaacttgagaaccactggaatatgaaaaatattttaagtgggaaaaagattggtgctcctgataaagcaaagggctgggaatacaatggaaaggattaaatatgtattttgtagactctttcccggtctccaagaacaaagtaaatgattctattttagaaggataaaaatggtaatgatgataactaacattttttggacacttactatgtgcgaggcacagttctatgttttttacatgtaataaagcacttaatgcaagtctttgagatacgttctactttattctgttttacaataagcatccgaggtttatgcagaaagctaaggcacagaaaggttaaatgattactcagctaaaaaatggtagagatttttttttcaaacacagtctgattttcaaacccatatgcttctaaccactaatgatgtaagggggaaaattctcttcttcagaatttctgaatagtcatcaaaatggcttatcaaaaagcttaaactctgaatataacaagggctggttaatataatgaggaatagatgcaaatgctcagatggttcagcactggcttattttgttatattgaatgcaggaggcgggggtagtttataccttgtcgaatcataccagattattaaatgtgacaaattacccaaggcggtaaaaaagacatgttcacttttaagctatgtgtatgtgcttatataaataaaaaagagtgaaaacaga

SEQ ID NO: 221241 - DNA, 1000 bp, Homo Sapiens
aagcacaaatctctactcctcatgacatgaagaaaaagactgaatgtgaagggagtttctgtactgtaagctagattggataatgatggctgtaacaaatcatgttagatggttttcagttggggtgtagaaataggaagatgcaaaggaacaatggtgttggcaaagtcttctttgaatatcagggactgagtcaataaaaaaaatagtagaaaggtggcttttactattgacaaaagccggggtcaaaaaaagtagtttaagtcttaagactgaatatgcattaaagtatgcaggtagcaaagatgtaataaatttgcttaaaaaaagaaattaaagttttatttagaatcaattttacctgtcattgtaattgacccatctgagaattacaataagcaagaggaaattaaggtgttttgcaagagctgtatttatattacagttttttaaaaacattttctgaattatcgtaattaagctctccaactcgttaagtcagaatataatatgaagttccccaaggaaacgaacaaaatgaactctagaatatctagcaaatagttaaagaagcaatttattattagggcatactcgggctgtttccaaatataaactctattgcaatatcttatttcatctttctaatacatgtacagtgcacactagaggatagagctgcatcacttaaattcatgacttaaaaaataatacagtttatatacaacttgttttttatttgattaagaagtgaagtttatgccacccaatgtatagccaaattgtacgtgcttaaaaaacagtgccgagagtatgttcagttcgcagtaagtagatttattggaataaatattctatggtacattctcagaaattggcttccaactaaaatacgtttgacccattttgaataaggaaattgaaaagaaaaatttaaaaggagaaaaaaatgcatgtttataaactttttaaataaaaccagaccttgtaagtggacatt

SEQ ID NO: 221242 - DNA, 1000 bp, Homo Sapiens; identical to SEQ ID NO: 115914

SEQ ID NO: 221243 - DNA, 1000 bp, Homo Sapiens
tggtttattttcaagtggctgcgttttttttagtttggcaggtgtagactttttaagttgggctttagaaaatctgggttagcctgaagaaaattgcctcagcctccacagtaccattttaaattcacataaaaggtgaaagctcctggttcagtgccatggcttcatggcattcagtgattagtggtaatggtaaacactggtgtgttttgaagttgaatgtgcgataaaattattagccttaagattggtaagctagcaatgaatgctagggtgggaagctggtgagccagtggccattagataaatacctttcaagtgtgagcttagacgtcaaccctaaaatacttaaccgtaatgctaattgtgatcattatgaatcccttcagtcacattagggggaaagtagttggctataagtacgtcattcttagtccagtcagtcttaaaaacatcttgggttacccactctgtccactcccataggctacagaaaaagtcacaagcgcatggtttccaaccatatgtgttttctgcagttatttctcttgttctggccaaacaaccctaaaaatccttaccattccacaaagttggaccatcacttgtgcacccactttgactatgagtataccaccacattgcatttctgtttgcaccatgtcttccaggagactagactactgttgtccagggtcaatttgagtgtaaagaaaatgtagacaaggaattgcccaattttaaattctgactttgctgacttaatttaaatgctcgttctgaaccaattttctcctatcttctctaggggtttcaaaagactcagttaattgatttccaggaagtactcatagcaagttcataaaagttcttgagacctaaatttcttcacaaaaaaagaaaagatcttaagtcatacattttaattgtgtagaggttgttcaactgaaggaataaatgtctattaaactaaaaaaaaaaaaaaaaaaaaaaaaaaaaa

SEQ ID NO: 221244 - DNA, 1000 bp, Homo Sapiens; identical to SEQ ID NO: 115922

SEQ ID NO: 221245 - DNA, 1000 bp, Homo Sapiens; identical to SEQ ID NO: 115923

SEQ ID NO: 221246 - DNA, 1000 bp, Homo Sapiens; identical to SEQ ID NO: 115924

SEQ ID NO: 221247 - DNA, 1000 bp, Homo Sapiens
tgaaacctttggcaacagtatgctctgtctttttcaagttgcaatatttgctggttgggatgggatgcttgatgcaattttcaacagtaaatggtctgactgtgatcctgataaaattaaccctgggactcaagttagaggagattgtgggaacccctctgttgggattttttattttgtcagttatatcctcatatcatggctgatcattgtaaatatgtacattgttgttgtcatggagtttttaaatattgcttctaagaagaaaaacaagaccttgagtgaagatgattttaggaaattctttcaggtatggaaaaggtttgatcctgataggacccagtacatagactctagcaagctttcagattttgcagctgctcttgatcctcctcttttcatggcaaaaccaaacaagggccagctcattgctttggacctccccatggctgttggggacagaattcattgcctcgatatcttacttgcttttacaaagagagttatgggtcaagatgtgaggatggagaaagttgtttcagaaatagaatcagggtttttgttagccaacccttttaagatcacatgtgagccaattacgactactttgaaacgaaaacaagaggcagtttcagcaaccatcattcaacgtgcttataaaaattaccgcttgaggcgaaatgacaaaaatacatcagatattcatatgatagatggtgacagagatgttcatgctactaaagaaggtgcctattttgacaaagctaaggaaaagtcacctattcaaagccagatctaataccacttaccacctcttttcatatttcttcacatatctgaaaaatgttgaaagcctaagccaggaataaaagaaaagtagagataataatcagttctttacaaccgatggtaattaagcttgtattcacaagacttcatgccaaattcactttttagcattatatctaacaaatcaagagaatccttaatattgctgcag

SEQ ID NO: 221248 - DNA, 1000 bp, Homo Sapiens
gctccaacccagcagtcgtctttgtcacccgaaagaaccgccaagtgtgtgccaacccagagaagaaatgggttcgggagtacatcaactctttggagatgagctaggatggagagtccttgaacctgaacttacacaaatttgcctgtttctgcttgctcttgtcctagcttgggaggcttcccctcactatcctaccccacccgctccttgaagggcccagattctaccacacagcagcagttacaaaaaccttccccaggctggacgtggtggctcacgcctgtaatcccagcactttgggaggccaaggtgggtggatcacttgaggtcaggagttcgagaccagcctggccaacatgatgaaaccccatctctactaaaaatacaaaaaattagccgggcgtggtagcgggcgcctgtagtcccagctactcgggaggctgaggcaggagaatggcgtgaacccgggaggcggagcttgcagtgagccgagatcgcgccactgcactccagcctgggcgacagagcgagactccgtctcaaaaaaaaaaaaaaaaaaaaaaatacaaaaattagccgggcgtggtggcccacgcctgtaatcccagctactcgggaggctaaggcaggaaaattgtttgaacccaggaggtggaggctgcagtgagctgagattgtgccacttcactccagcctgggtgacaaagtgagactccgtcacaacaacaacaacaaaaagcttccccaactaaagcctagaagagcttctgaggcgctgctttgtcaaaaggaagtctctaggttctgagctctggctttgccttggctttgccagggctctgtgaccaggaaggaagtcagcatgcctctagaggcaaggaggggaggaacactgcactcttaagcttccgccgtctcaacccctcacaggagcttactggcaaacatgaaaaatcggcttaccattaaagttctcaatgcaaccataaaaaaaaaa

SEQ ID NO: 221249 - DNA, 615 bp, Homo Sapiens
gctcagagagaagtgactttgagctcacagtgtcaccgcctgctgatgggagagctgaattcaaaaccagggtgtctccctgagcagagggacctgcacacagagactccctcctgggctcctggcaccatggccccactgaagatgctggccctggtcaccctcctcctgggggcttctctgcagcacatccacgcagctcgagggaccaatgtgggccgggagtgctgcctggagtacttcaagggagccattccccttagaaagctgaagacgtggtaccagacatctgaggactgctccagggatgccatcgtttttgtaactgtgcagggcagggccatctgttcggaccccaacaacaagagagtgaagaatgcagttaaatacctgcaaagccttgagaggtcttgaagcctcctcaccccagactcctgactgtctcccgggactacctgggacctccaccgttggtgttcaccgcccccaccctgagcgcctgggtccaggggaggccttccagggacgaagaagagccacagtgagggagatcccatccccttgtctgaactggagccatgggcacaaagggcccagattaaagtctttatcctc

SEQ ID NO: 221250 - DNA, 1000 bp, Homo Sapiens
ctccaatacccaggcctggcctcttcagagtaccccccattccactttccctgcctccttccttaaatagctgacaatcaaattcatgctatggtgtgaaagactacctttgacttggtattataagctggagttatatatgtatttgaaaacagagtaaatacttaagaggccaaatagatgaatggaagaattttaggaactgtgagagggggacaaggtggagctttcctggccctgggaggaagctggctgtggtagcgtagcgctctctctctctgtctgtggcaggaggcaaagagtagggtgtaattgagtgaaggaatcctgggtagagaccattctcaggtggttgggccaggctaaagactgggatttgggtctatctatgcctttctggctgatttttgtagagacggggttttgccatgttacccaggctggtctcaaactcctgggctcaagcgatcctcctggctcagcctcccaaagtgctgggattacaggcgtgagtcactgcgcctggcttcctcttcctcttgagaaatattcttttcatacagcaagtatgggacagcagtgtcccaggtaaaggacataaatgttacaagtgtctggtcctttctgagggaggctggtgccgctctgcagggtatttgaacctgtggaattggaggaggccatttcactccctgaacccagcctgacaaatcacagtgagaatgttcaccttataggcttgctgtggggctcaggttgaaagtgtggggagtgacactgcctaggcatccagctcagtgtcatccagggcctgtgtccctcccgaacccagggtcaacctgcctaccacaggcactagaaggacgaatctgcctactgcccatgaacggggccctcaagcgtcctgggatctccttctccctcctgtcctgtccttgcccctcaggactgctggaaaataaatcctttaaaatagaaaaaaaaaaaaaaaaaaaaaaaa

SEQ ID NO: 221251 - DNA, 1000 bp, Homo Sapiens; identical to SEQ ID NO: 115931

SEQ ID NO: 221252 - DNA, 1000 bp, Homo Sapiens; identical to SEQ ID NO: 115932

SEQ ID NO: 221253 - DNA, 1000 bp, Homo Sapiens
tgaaatgctcagaactacatgttaataagccaatagcgatgaactgctccaacctctggggaaacttcagttatggatcaatctgctctttccattgtctagagggccagttacttaatggctctgcacaaacagcatgccaagagaatggccactggtcaactaccgtgccaacctgccaagcaggaccattgactatccaggaagccctgacttactttggtggagcggtggcttctacaataggtctgataatgggtgggacgctcctggctttgctaagaaagcgtttcagacaaaaagatgatgggaaatgccccttgaatcctcacagccacctaggaacatatggagtttttacaaacgctgcatttgacccgagtccttaaggtttccataaacacccatgaatcaaagacatggaattaccttagattagctctggaccagcctgttggacccgctctggaccaaccctgtttcctgagtttgggattgtggtacaatctcaaattctcaacctaccaccccttcctgtcccacctcttctcttcctgtaacacaagccacagaagccaggagcaaatgtttctgcagtagtctctgtgctttgactcacctgttacttgaaataccagtgaaccaaagagactggagcatctgactcacaagaagaccagactgtggagaaataaaaatacctctttattttttgattgaaggaaggttttctccactttgttggaaagcaggtggcatctctaattggaagaaattcctgtagcatcttctggagtctccagtggttgctgttgatgaggcctcttggacctctgctctgaggcttccagagagtcctctggatggcaccagaggctgcagaaggccaagaatcaagctagaaggccacatgtcaccgtggaccttcctgccaccagtcactgtccctcaaatgacccaaagaccaatattcaaatgcgtaattaaaagaattttcccc

SEQ ID NO: 221254 - DNA, 1000 bp, Homo Sapiens
ggcaagtggagccacctctttcctccctccgcggatgaagcccagccacatttcagccgaggtccaaggcaggaggccatttacttgagacagattctctcctttttcctgtcccccatcttctctgggtccctctaacatctcccatggctctccccgcttctcctggtcactggagtctcctccccatgtacccaaggaagatggagctcccccatcccacacgcactgcactgccattgtcttttggttgccatggtcaccaaacaggaagtggacattctaagggaggagtactgaagagtgacggacttctgaggctgtttcctgctgctcctctgacttggggcagcttgggtcttcttgggcacctctctgggaaaacccagggtgaggttcagcctgtgagggctgggatgggtttcgtgggcccaagggcagacctttctttgggactgtgtggaccaaggagcttccatctagtgacaagtgacccccagctatcgcctcttgccttcccctgtggccactttccagggtggactctgtcttgttcactgcagtatcccaactgcaggtccagtgcaggcaataaatatgtgatggacaaacgatagcggaatccttcaaggtttcaaggctgtctccttcaggcagccttcccggaattctccatccctcagtgcaggatgggggctggtcctcagctgtctgccctcagcccctggccccccaggaagcctctttcatgggctgttaggttgacttcagttttgcctcttggacaacagggggtcttgtacatccttgggtgaccaggaaaagttcaggctatggggggccaaagggagggctgccccttccccaccagtgaccactttattccacttcctccattacccagttttggcccacagagtttggtcccccccaaacctcggaccaatatccctctaaacatcaatctatcctcctgttaaagaaaaaaaaaaaaaaaaaa

SEQ ID NO: 221255 - DNA, 1000 bp, Homo Sapiens
cttgtgcttcttcacttacccattagccaggttctcattaggttttgcttgggcctccctggcactgaaccttaggctttgtatgacagtgaagcagcactgtgagtggttcaagcacactggaatataaaacagtcatggcctgagatgcaggtgatgccattacagaaccaaatcgtggcacgtattgctgtgtctcctctcagagtgacagtcataaatactgtcaaacaataaagggagaatggtgctgtttaaagtcacatccctgtaaattgcagaattcaaaagtgattatctctttgatctacttgcctcatttccctatcttctcccccacggtatcctaaactttagacttcccactgttctgaaaggagacattgctctatgtctgccttcgaccacagcaagccatcatcctccattgctcccggggactcaagaggaatctgtttctctgctgtcaacttcccatctggctcagcatagggtcactttgccattatgcaaatggagataaaagcaattctgactgtccaggagctaatctgaccgttctattgtgtggatgaccacataagaaggcaattttagtgtattaatcatagattattataaactataaacttaagggcaaggagtttattacaatgtatctttattaaaacaaaagggtgtatagtgttcacaaactgtgaaaatagtgtaagaactgtacattgtgagctctggttatttttctcttgtaccatagaaaaatgtataaaaattatcaaaaagctaatgtgcagggatattgccttatttgtctgtaaaaaatggagctcagtaacataactgcttcttggagctttggaatattttatcctgtattcttgtttgaattcctcctctatttaagatatatacatggaatcgaagtgtttatgtaatagttctatccttttgcctgcaggtcagttgtaataaatctaggatgtgatgatgaaaaaaaaaa

SEQ ID NO: 221256 - DNA, 1000 bp, Homo Sapiens; identical to SEQ ID NO: 115937

SEQ ID NO: 221257 - DNA, 1000 bp, Homo Sapiens
aatgtgaatcgcagctgtgggttttaccaccgtctgtctcagagtcccaggaccttgagtgtcattagttactttattgaaggttttagacccatagcagctttgtctctgtcacatcagcaatttcagaaccaaaagggaggctctctgtaggcacagagctgcactatcacgagcctttgtttttctccacaaagtatctaacaaaaccaatgtgcagactgattggcctggtcattggtctccgagagaggaggtttgcctgtgatttcctaattatcgctagggccaaggtgggatttgtaaagctttacaataatcattctggatagagtcctgggaggtccttggcagaactcagttaaatctttgaagaatatttgtagttatcttagaagatagcatgggaggtgaggattccaaaaacattttatttttaaaatatcctgtgtaacacttggctcttggtacctgtgggttagcatcaagttctccccagggtagaattcaatcagagctccagtttgcatttggatgtgtaaattacagtaatcccatttcccaaacctaaaatctgtttttctcatcagactctgagtaactggttgctgtgtcataacttcatagatgcaggaggctcaggtgatctgtttgaggagagcaccctaggcagcctgcagggaataacatactggccgttctgacctgttgccagcagatacacaggacatggatgaaattcccgtttcctctagtttcttcctgtagtactcctcttttagatcctaagtctcttacaaaagctttgaatactgtgaaaatgttttacattccatttcatttgtgttgtttttttaactgcattttaccagatgttttgatgttatcgcttatgttaatagtaattcccgtacgtgttcattttattttcatgctttttcagccatgtatcaatattcacttgactaaaatcactcaattaatcaatgaaaaaaaaaaa

SEQ ID NO: 221258 - DNA, 1000 bp, Homo Sapiens
tttttgaaaaattagagaagtagcatatggaaaattataatgtgtttttttaccaatgacttcagtttctgtttttagctagaaacttaaaaacaaaaataataataaagaaaaataaataaaaaggagaggcagacaatgtctggattcctgttttttggttacctgatttccatgatcatgatgcttcttgtcaacaccctcttaagcagcaccagaaacagtgagtttgtctgtaccattaggagttaggtactaattagttggctaatgctcaagtattttatacccacaagagaggtatgtcactcatcttacttcccaggacatccaccctgagaataatttgacaagcttaaaaatggccttcatgtgagtgccaaattttgtttttcttcatttaaatattttctttgcctaaatacatgtgagaggagttaaatataaatgtacagagaggaaagttgagttccacctctgaaatgagaattacttgacagttgggatactttaatcagaaaaaaagaacttatttgcagcattttatcaacaaatttcataattgtggacaattggaggcatttattttaaaaaacaattttattggccttttgctaacacagtaagcatgtattttataaggcattcaataaatgcacaacgcccaaaggaaataaaatcctatctaatcctactctccactacacagaggtaatcactattagtattttggcatattattctccaggtgtttgcttatgcacttataaaatgatttgaacaaataaaactaggaacctgtatacatgtgtttcataacctgcctcctttgcttggccctttattgagataagttttcctgtcaagaaagcagaaaccatctcatttctaacagctgtgttatattccatagtatgcattactcaacaaactgttgtgctattggatacttaggtggtttcttcactgacaatactgaataaacatctcaccggaattc

SEQ ID NO: 221259 - DNA, 1000 bp, Homo Sapiens
ggctgcttcatggtgttatggagcaattgggcattgccaggccccgagtggaatatccagctcaccaggccatgaatcttgtgggcccccagagcattgaaggtggagctcatgaaggacttcagcatttgggtccttttggcaacatccccaacatcgtggcagagttgactggagacaacattcctaaggactttagtgaggatcaggggtacccagaccctccaaatccctgtcctgttggaaaaacagatgatggatgtctagaaaacacccctgacactgcagagttcagtcgagagttccagttgcaccagcatctctttgatccggaacatgactatccaggcttgggcaagtggaacaagaaactcctttacgagaagatgaagggaggagagagacgaaagcggaggagtgtcaatccatatctacaaggacagagactggataatgttgttgcaaagaagtctgtcccccatttttcagatgaggataaggatccagagtaaagagaagatgctagacgaaaacccacattacctgttaggcctcagcatggcttatgtgcacgtgtaaatggagtccctgtgaatgacagcatgtttcttacatagataattatggatacaaagcagctgtatgtagatagtgtattgtcttcacaccgatgattctgctttttgctaaattagaataagagcttttttgtttcttgggtttttaaaatgtgaatctgcaatgatcataaaaattaaaatgtgaatgtcaacaataaaaagcaagactatgaaaggctcagatttcttgcagtttaaaatggtgtctgaggttgtactattttggccaagtctgtagaaagctgtcatttgattttgattatgtagttcatccagcccttgggcattgttatacaccagtaaagaaggctgtactcaagaggaggagctgacacatttcacttggctgcgtcttaataaacatgaatgcaagcattggc

SEQ ID NO: 221260 - DNA, 1000 bp, Homo Sapiens; identical to SEQ ID NO: 115943

SEQ ID NO: 221261 - DNA, 1000 bp, Homo Sapiens
tactcagatccctttgatgccaagaatgatctcaagagcaaagcaggaaagggggagagtgctggctacatggagccctatgaggcacagaggatcatgacagaatttcagaggcaggaaagtgtccggtcccagcataaaggtatccagttatatgacaccccttacgaacctgaaggccaaagtgttgactcggactcggagagcacagtcagcccccgactgcgggagagcaagctgccccaggatgacgacaggcccgccgatgagtacgaccagccttgggagtggaaccgggtcaccagcccagccctggcagcacagtttaatggcaacgagaagcggcagtcatccccctcaccttcgcgggaccggcggcgccagcttcgtgcccctggagggggctttaagcctatcaaacatgggagccctgagttctgcgggatcctaggagaaagggtggatcctgccgtccccctggagaagcaaatatggtatcacggagccatcagcagaggagacgccgagaacctgctgcgactctgcaaggagtgtagctaccttgtccggaacagccagaccagcaagcatgactaccccctctccctgaggagcaaccagggttttatgcacatgaaactggccaaaaccaaagagaaatacgttctgggtcagaacagccctccgttcgacagtgtcccggaagtcatccactactacaccaccagaaagctacccatcaaaggggctgagcacttgtccctcctctatcccgtggctgtgaggaccctgtgagcggaccagacctgccctgctctgtgacagagcctggagacttggaggtgccagaggccccccaccaaccagcccccagccactgttgctggctgtgtcgtttgtgttgtgtgtatggtactagcacaccactgcatgtctctagaatgctgttgccacttacgggggctggaggcctggataaagacagaagggcggcaacacc

SEQ ID NO: 221262 - DNA, 1000 bp, Homo Sapiens
cttcttagatgtaaaacgtctcagacagttaccaaaattattttaaccttttaactccctgcccttttaatacagggacagggtgtctcctgaagatacttagggaaaacaggagcctaccacaaggctcctgatcattctggagtcactgtttcttggtagcagccaattgggaagagtgacttctgtgagatggctggctggtgataggactaagttctcattgttcaaatagagctgttcaacatcactgaaacctttaagaaaagccctgagatcagttattcctacaagtttaagtagtagacagatactatccagctctaagtctcaactgctcttttatactgtacttttttttttgagacggagttttgctcttgtagcccaggctggagtgcaatggcaggatctcagatcactgcaacctctgcctcctgggttcaagcgattttcctgcttcatcttcccaggtagctgggattacaggcatgtgccacaacgcctggctaattttgtatttttagtagagactggtttctccatgttggtcaggctggtctcaaactcccgacctcaggtgatccgcccgcctcggcctcctaaagtgctgggattacaggcgtgagccactgcccagctatactgtatatttaagaaggtccagcatgttgcatctctgcattatcctatatcataaaagaagcataagttatcatggtgttgggtaaattagcgaaatcaaccgcttcctaagtttaagggaaaagttatttttaaaaacaacttaataaaaacttacactcttatacaagagtgtatttccccttaattaggatgcatgttgattaaactcgagatacagctttttgcagtatggtgggttggttttggtgtaacatcttcaacatgtcacactggctatcaaagaataagaaaattattgagtatgagtgtgttttataaactttctgagtttttcagatgtcttaatattttt

SEQ ID NO: 221263 - DNA, 1000 bp, Homo Sapiens
ccagaccttcagcccgtggcccggatgcaggacagacccctcagaaacaaaaccatgggcagtgtatgctgggctgttagggggtgtcatcatgattctcatcatggtggtaatactacagttgagaagaagaggtaaaacgaaccattaccagacaacagtggaaaaaaaaagccttacgatctatgcccaagtccagaaaccaggtcctcttcagaagaaacttgactccttcccagctcaggacccttgcaccaccatatatgttgctgccacagagcctgtcccagagtctgtccaggaaacaaattccatcacagtctatgctagtgtgacacttccagagagctgacaccagagaccaacaaagggactttctgaaggaaaatggaaaaaccaaaatgaacactgaacttggccacaggcccaagtttcctctggcagacatgctgcacgtctgtacccttctcagatcaactccctggtgatgtttcttccacatacatctgtgaaatgaacaaggaagtgaggcttcccaagaatttagcttgctgtgcagtggctgcaggcgcagaacagagcgttacttgataacagcgttccatctttgtgttgtagcagatgaaatggacagtaatgtgagttcagactttgggcatcttgctcttggctggaactgataataaaaatcagactgaaagccaggacatctgagtacctatctcacacactgaccaccagtcacaaagtctggaaaagtttacattttggctatctttactttgttctgggagctgatcatgataacctgcagacctgatcaagcctctgtgcctcagtttctctctcaggataaagagtgaatagaggccgaagggtgaatttcttattatacataaaacactctgatattattgtataaaggaagctaagaatattattttatttgcaaaacccagaagctaaaaagtcaataaacagaaagaatgattttgagaaa

SEQ ID NO: 221264 - DNA, 1000 bp, Homo Sapiens
tggatgtgtgtaccattgagatgagaatgggtagatggaacggagaccatcaagccacacccccttcttaaaactggggacatgagcctgagcagaaagggtgaagaagagccatgggacacagagttgacccagccagggggaaagcccagctctctttaaaccagctaagccattccagtctcctgtgaagccaaaagggaccaggaaccgtgcaaaggaaactggaaacttttccccgctgggtagagcatgttgctgatactcttctgttttcaagggaaacaatcacattgtttgattccaaatggtaaatgaacactcactattcttcaggcttcagtaaatctttttttcttccttcatatatatatacacaacacacacacacatatgtatatctatacacacatgtgtgttgtgtatatgcatgtgtgtgtgtgtgcgtgtgtgtatagttttagctccaagccaagcaagtttgtgtttggatagaggggaacttaactattaactacaagttgtatgtctgtggtatcttgattttcccatttctaaagatgaatttcacaaagccataaagcgtgaaattagagctggacttaagactcattggccgaccatcctgtgtcctggcctggccctgcagtaagaagcgtgtctgggtctggagaagggtgcttccgagagtgtgcaggtggcccttccccttggaggcgagaagagagaatgtgctgtctatcttcctggttttcagtccacagagtcggtagaccaggggttacgtgactggggaaaatctcacatctccttgtctgaaaacatttcccctgctgttctctttctaacatgttgtggtaaatctgttcagatactgctcatctgactgttttgtacatgtgacaattgccttaaaacctagcacagtcctcagaaatgaataccgtgtttccactggaaaaaaaaaaaaaaaaaaaaaaaaaaaaaaaaaaaaaaaaaa

SEQ ID NO: 221265 - DNA, 1000 bp, Homo Sapiens; identical to SEQ ID NO: 115944

SEQ ID NO: 221266 - DNA, 1000 bp, Homo Sapiens
tacagtatgaaatctgaaaagcaacagaaattgaaagtgaccttaaagaataaatttcctaatttttcccagtttcctatgtttataactattataaagagtttaactttctggaactgaaggagaaaacatgaaaatgtttatattgcttcttgttaagcaggtagaccaaattccgctttcagtaattcatccatacagaatttggatgactatgtataaaggaaaacttaaatcttaattattatcagtttaaattttttttgtttgttgaatgacaaaggcaataaaaataaatttgactttagctttttttctatactttcctctttttgtaattcttaaattctagtcactagtcattatgagagtattgactaaatattttcacaatctaaatattgtcacaatctaaatttctgtagtacagagagccgtagccctttgtaaaggctttcgttcgtccaaacaacacttgatccaaccaaagttccaatgtgactgtggatctttgataggtctttggtgttggttgtaacaaaatttgatttgaactacctataaatgaaaagtcggggtttattactttatatgtaatgctgagaggagactgttgggaacagttatgtcaatgagcaaactagaaattggcttcaaagtctgatacttttaaaagcatgtgttttgtgtatatgctcacaaaatgtctgtgaagagatttctttcagcttttgctcagctttatggtggggtgtactgttttatctgggcggtgagggtattgatttacataaaaactgtagacaaacacagtacgagtctcagcacgttttgcatttattgtactgcccaaattgtttttatgttaaaagtcacgtttcataatctgcaatatttttgtcaaagtgcacactgtactttcttcttaaaaacgtgattaaagagatcactttgtccggatgaagcagctgttggcattatccgctgaggcttgaaaaaa

SEQ ID NO: 221267 - DNA, 1000 bp, Homo Sapiens
ttcctcttcctgctctactactggtgtgtgccggagtcccctcggtggctgttatcacaaaaaagaaacactgaagcaataaagataatggaccacatcgctcaaaagaatgggaagttgcctcctgctgatttaaagatgctttccctcgaagaggatgtcaccgaaaagctgagcccttcatttgcagacctgttccgcacgccgcgcctgaggaagcgcaccttcatcctgatgtacctgtggttcacggactctgtgctctatcaggggctcatcctgcacatgggcgccaccagcgggaacctctacctggatttcctttactccgctctggtcgaaatcccgggggccttcatagccctcatcaccattgaccgcgtgggccgcatctaccccatggccatgtcaaatttgttggcgggggcagcctgcctcgtcatgatttttatctcacctgacctgcactggttaaacatcataatcatgtgtgttggccgaatgggaatcaccattgcaatacaaatgatctgcctggtgaatgctgagctgtaccccacattcgtcaggaacctcggagtgatggtgtgttcctccctgtgtgacataggtgggataatcacccccttcatagtcttcaggctgagggaggtctggcaagccttgcccctcattttgtttgcggtgttgggcctgcttgccgcgggagtgacgctacttcttccagagaccaagggggtcgctttgccagagaccatgaaggacgccgagaaccttgggagaaaagcaaagcccaaagaaaacacgatttaccttaaggtccaaacctcagaaccctcgggcacctgagagagatgttttgcggcgatgtcgtgttggagggatgaagatggagttatcctctgcagaaattcctagacgccttcacttctctgtattcttcctcatacttgcctacccccaaattaatatcagtcctaaagaaaaaaaaaaaaaaaaa

SEQ ID NO: 221268 - DNA, 1000 bp, Homo Sapiens; identical to SEQ ID NO: 115947

SEQ ID NO: 221269 - DNA, 1000 bp, Homo Sapiens
ggccctgggagggatttcagatgcccctgccctcttgtctgccacggggcgagtctggcacctctttcttctgacctcagacggctctgagccttatttctctggaagcggctaagggacggttgggggctgggagccctgggcgtgtagtgtaactggaatcttttgcctctcccagccacctcctcccagccccccaggagagctgggcacatgtcccaagcctgtcagtggccctccctggtgcactgtccccgaaacccctgcttgggaagggaagctgtcgggtgggctaggactgacccttgtggtgtttttttgggtggtggctggaaacagcccctctcccacgtggcagaggctcagcctggctcccttccctggagcggcagggcgtgacggccacagggtctgcccgctgcacgttctgccaaggtggtggtggcgggcgggtaggggtgtgggggccgtcttcctcctgtctctttcctttcaccctagcctgactggaagcagaaaatgaccaaatcagtattttttttaatgaaatattattgctggaggcgtcccaggcaagcctggctgtagtagcgagtgatctggcggggggcgtctcagcaccctccccagggggtgcatctcagccccctctttccgtccttcccgtccagccccagccctgggcctgggctgccgacacctgggccagagcccctgctgtgattggtgctccctgggcctcccgggtggatgaagccaggcgtcgccccctccgggagccctggggtgagccgccggggcccccctgctgccagcctcccccgtccccaacatgcatctcactctgggtgtcttggtcttttattttttgtaagtgtcatttgtataactctaaacgcccatgatagtagcttcaaactggaaatagcgaaataaaataactcagtctgcagccccaaaaaaaaaaaaaaaaaaaaaaaaaaaaaaaaaaaaaaaaaaa

SEQ ID NO: 221270 - DNA, 1000 bp, Homo Sapiens; identical to SEQ ID NO: 115957

SEQ ID NO: 221271 - DNA, 1000 bp, Homo Sapiens
gttacatttccccttccaaaaaaaaaaaaaaggacaactggaagtaatttatcatataaagaattttgatcaaatagatattgacaaagggccctctgtcacatttttcttcatccagcttttgttcaaaaacagtatgcctcctcccttgaatcacatagggagaaacgttatactccattctcattaatttcccattttgtctacttttactcttgtacatatgttgtgggtttaagagtcttttgcatttgttctgtgacacctttttttgaattgactgttttaaaacggaggcctattttttccggtttgggactcctagtggttatggcatcccataatgcttcgtgacggccaccaggacagaaccacctgatgttttagagcagttttcagcatgacactgttaacaagtgtgtattttccaaggccacatgaaacttactttcttagccactccaggtttgggagcagaaaagctgaaaaacccttttgtgtagaagtctgagtggtttgtgggggggaccttttttagagtttgcatgccagcgcacggcctattgctgtgaaacagagagaaggtaaagctacctgaggcagtgcgctggaggatgaagtgtttgatagcactaggggggaaagaaaatgcatggcaaagtttcgtcttctcgtagactatctagcatgcagagtgtagtgtgttgaaacggtgtatgacattgctgtatcaaagttgtaaaattaagcattatttattgaaaactatgtatttttttgtaaaaacctgatcacatagagaatatcagtggcttgtgcttgtgcttcgatctaaccagcttcttgacccacccccccttggtatgcagtgttaatgctcagggttgaaaatagtacactccaatgtctcttttgcaagagtttttcacagaggattacatttgttcaaaagactctaataaaattgtgtgatcaatcttcaaaaaaaaaaaaaaaaaaa

SEQ ID NO: 221272 - DNA, 1000 bp, Homo Sapiens; identical to SEQ ID NO: 115961

SEQ ID NO: 221273 - DNA, 1000 bp, Homo Sapiens
tattttatctatcattatgctacacaatcagtgctataaatttttttatgcaaagaaactttcttaatgttttaatcatgtttcctcagagtgacactttttgttgttgttaataccaagtatgaacactctgcatcattattccatgaaccagttctaatgcaaacctatgtatgtccattagaaatggaagttattttttaatcaacaatgaggcctattataaatttatcagatgaatctagatagctttatagcatataaaatatgttaatttgtgttagcaggtgcacatttcaccactgaaattagaaatattttgacagtctgttctgcataccattctgagtctacttttctgtctttagaagaatcgtaaatttcagtgtcctttatttgactcagtgggatatagctgttataagtaatagggcacagatgtgcagtagagtcttgtttaatggcatttcactgttcattccctttaccaccgttataaaacttttctttattgtaattatcagtgcaaagctatgtatttatcatggtaaaactccagtgttagaatagttttttcttacagtatactttctttggttaggtttgtgtatgtgttgctgattacattagaacttgatgttaagtcatttatcacactctcatgagagcagtaataaaagtgtgtaatctaggagaaaaagttaatttgtcaaacttagataagcatgatgtttaggtcctatttttcaattttataactgttttattgcaacaatatttgtatttaagtctccattttaatgccttgtggtgtttttttatgcatgtcactaagttgtcatcccacataaattgatgtgcagcatagggtattaaatctacataatgattttaaaacagaaatagttgatggtaaaatgtaaatgttttgcaaaaattccttataaaaagttttgtagtaacatttcacttgtaaattttttttgtaaaaaaaaaaaaa

SEQ ID NO: 221274 - DNA, 1000 bp, Homo Sapiens; identical to SEQ ID NO: 115962

SEQ ID NO: 221275 - DNA, 1000 bp, Homo Sapiens
tcgatgggtcctgtatggtggaagagtcggggaccctcgaatcccagcttgaagctaccaaacgcaagcaccaggaaatccgagccatgagaagtcagctcaaaaagatcgaggacctgggggccgccatggaggaggccctcatcctggacaacaagtacacggagcacagcaccgtgggcctcgcccagcagtgggaccagctggaccagctgggcatgcgcatgcagcacaacctggagcagcagatccaggccaggaacacaacaggtgtgactgaggaggccctcaaagaattcagcatgatgtttaaacactttgacaaggacaagtctggcaggctgaaccatcaggatggcaaatcttgcctgcgctccctgggctatgacctgcccatggtggaggaaggggaacctgaccctgagttcgaggcaatcctggacacggtggatccgaacagagatggccatgtctccttgcaagaatacatggctttcatgatcagccgcgaaactgagaacgtcaagtccagcgaggagattgagagcgccttccgggccctcagctcagagggaaagccttacgtgaccaaggaggagctctaccagaacctgacccgggaacaagccgactactgcgtctcccacatgaagcccatcgtggacggcaagggccgcgagctccccaccgcgttcgactacgtggagttcacccgctcgcttttcgtgaactgagccactccctgggtcacccacccctcgctgcttgccctgcgtcgccttgctgcatgtccgctcctctgtgtgctctcactttccactgtaaccttaagcctgcttagcttggaataagacttaggagaaaatggtgcttcactaacccgcttccggtccagtcacaatcatcatgtcactgtgggacccagatctgtgtcttgaagcagctgccctcattccgacttcagaaaatcgaagcagctggcgcctccccttcggaattc

SEQ ID NO: 221276 - DNA, 1000 bp, Homo Sapiens
cgtgctggtgttggacggtgtcatccagtgcacggagagagacgagttctcctaccaggagatgatcgccaacctgcctctctgcagccaccccaacccgcgaaaggtgctgatcatcgggggcggagatggaggtgtcctgcgggaggtggtgaagcacccctccgtggagtccgtggtccagtgtgagatcgacgaggatgtcatccaagtctccaagaagttcctgccaggcatggccattggctactctagctcgaagctgaccctacatgtgggtgacggttttgagttcatgaaacagaatcaggatgccttcgacgtgatcatcactgactcctcagaccccatgggccccgccgaaagtctcttcaaggagtcctattaccagctcatgaagacagccctcaaggaagatggtgtcctctgctgccagggcgagtgccagtggctgcacctggacctcatcaaggagatgcggcagttctgccagtccctgttccccgtggtggcctatgcctactgcaccatccccacctaccccagcggccagatcggcttcatgctgtgcagcaagaacccgagcacgaacttccaggagccggtgcagccgctgacacagcagcaggtggcgcagatgcagctgaagtactacaactccgacgtgcaccgcgccgcctttgtgctgcccgagtttgcccgcaaggccctgaatgatgtgagctgagcccaggcgccaccactgatgccacccaggacctcggaccttggagcctgcggggtgcctcggcccctccagccccgggccggacctcctgctggctctcgcccaccaaccaagtgttacaagccccagaatgctgcccggcctgccctgctgggcggactgtctgtgtgtctgtctctctggcgttccacctccaagcctataccagctgtgtacagcgccatctctctgccttctgttgcccctcactcaccaaacacgtgtatttatagc

SEQ ID NO: 221277 - DNA, 1000 bp, Homo Sapiens
tcaaaaaggccaagatggccaaggaccgcaagagccgcaagaagcctgtggaggtgaagaagggcaaagaccccaatgcccccaagaggcccatgtctgcatacatgctgtggctcaatgccagccgagagaagatcaagtcagaccatcctggcatcagcatcacggatctttccaagaaggcaggcgagatctggaagggaatgtccaaagagaagaaagaggagtgggatcgcaaggctgaggatgccaggagggactatgaaaaagccatgaaagaatatgaagggggccgaggcgagtcttctaagagggacaagtcaaagaagaagaagaaagtaaaggtaaagatggaaaagaaatccacgccctctaggggctcatcatccaagtcgtcctcaaggcagctaagcgagagcttcaagagcaaagagtttgtgtctagtgatgagagctcttcgggagagaacaagagcaaaaagaagaggaggaggagcgaggactctgaagaagaagaactagccagtactccccccagctcagaggactcagcgtcaggatccgatgagtagaaacggaggaaggttctctttgcgcttgccttctcacaccccccgactccccacccatattttggtaccagtttctcctcatgaaatgcagtccctggattctgtgccatctgaacatgctctcctgttggtgtgtatgtcactagggcagtggggagacgtcttaactctgctgcttcccaaggatggctgtttataatttggggagagatagggtgggaggcagggcaatgcaggatccaaatcctcatcttactttcccgaccttaaggatgtagctgctgcttgtcctgttcaagttgctggagcaggggtcatgtgaggccaggcctgtagctcctacctggggcctatttctactttcattttgtatttctggtctgtgaaaatgatttaataaagggaactgactttggaaaccaaaaaaa

SEQ ID NO: 221278 - DNA, 1000 bp, Homo Sapiens
ttttgagcatttgtcctaatctgctgccagaattaaagacctatttttagaggattttggcttaaaaagcaagggcaaacagtcatttggaagccactcaccactgttttatatctcttttttatatctctttggcgtttccctacagaaaagaaattggacagaacagaataatatgaagcaggatcacaaaagaaaaaaaactttggctttcatattctctttgtgaggacaaatctgttgtttgtttgattactgtttactgagccttaatccaccaagtttatatttagaattttatttttttaaggtactaattaacttaaacacagagctataaaatgctggattgaaaattttatattgtaatgtagagataaaagcagtaggagaaacaaatgacataatatgtcgtcataattcctgctattgttaataaccttaaggagtagttgataaattataaaattttaaaaagtcaattcagttctagaaatagatttaaagaatatgaagttctatctagtacttgagcagctgtatttcttttctacacattgatggacttttaatattttattctcatttaatataaacctcatctagggtatatacaaattaaaactgagacacattggctttgtaaatcagtatgtttttacataatggttttgttagatttatttttccatcagtgaaaacatttcttaaacacaaatttcatttccatttaagcaatttgtaagcaaagtccaggtccatttagtttttggatatatttaatgtttgtctcctgaagtttgtcttcatgtactgtaagatattagttgtctttccatgttttaaatgtatgattatatagcacatattttattagttgtttaataagaggtaatacccatctaggaaagaaattttatgaagttaaatacaagtcttgaatagtacattttcacttctgtattcgagggactctaaaaataaatattgctccagaaaa

SEQ ID NO: 221279 - DNA, 1000 bp, Homo Sapiens; identical to SEQ ID NO: 115973

SEQ ID NO: 221280 - DNA, 1000 bp, Homo Sapiens
tgttgaagtatagttttgcaattcatatactgttttctaaaactaaggtttgttcaggttgctgcaagctcagctgaatctgtgagcctgaggtctgtttcaaatttctccccaataggcgcctttatttctgaggtggttctaattcgctaggcaggcctgagcgaatacaagtttagcttgtccctgttgagtaagtagggcatgctacaatggataatttaaaagcttgatagctgggactgaatagaagaaaacgggaaacttagaccaagttctcccctgagaaatcttgttaaaacacattaagtagtcaaaatagtaatctttatcatatctgccatattaacccctttgtgtataatgaccaggcagtgttaaactgagtttttaatttgactctcctttcagctgttcacataaagcacctggcaaagcattttacctgttagggggagaaaaatgcaataatatgttaaatatattattattcagaaatgctagacaaatagtttgcaagcagatttctatattgtattacagttttgaaaacagatttggtatcattctaaagtttagctatcaagcactcaccattgtgaagaatagttgatcgactctgcttttactaacagatttaacttattcaggtttgaaattctgtttatttttaagggtaaacagggcatatctctttaataatttctattttaaaattcactttattcatgtgacatttatagtaccagagtgattatttcataccaatgaaatcttacttttcagtgactgaaaagatagaatttatttgctaataatcatttatcaacacccacctaatcatgcttcagatgatctgtgctctttcttctttgtcacgttcaagttatctgacatctaccaagaacagttcataattattaatagcccaaagagtatggttaacttcacgcagctgcttttgcagaagcactaataaaaacaaatattttgtacccta

SEQ ID NO: 221281 - DNA, 1000 bp, Homo Sapiens
agatcagtgatttcggactctccaaagcactgcgtgctgatgaaaactactacaaggcccagacccatggaaagtggcctgtcaagtggtacgctccggaatgcatcaactactacaagttctccagcaaaagcgatgtctggagctttggagtgttgatgtgggaagcattctcctatgggcagaagccatatcgagggatgaaaggaagtgaagtcaccgctatgttagagaaaggagagcggatggggtgccctgcagggtgtccaagagagatgtacgatctcatgaatctgtgctggacatacgatgtggaaaacaggcccggattcgcagcagtggaactgcggctgcgcaattactactatgacgtggtgaactaaccgctcccgcacctgtcggtggctgcctttgatcacaggagcaatcacaggaaaatgtatccagaggaattgattgtcagccacctccctctgccagtcgggagagccaggcttggatggaacatgcccacaacttgtcacccaaagcctgtcccaggactcaccctccacaaagcaaaggcagtcccgggagaaaagacggatggcaggatccaaggggctagctggatttgtttgttttcttgtctgtgtgattttcatacaggttatttttacgatctgtttccaaatccctttcatgtctttccacttctctgggtcccggggtgcatttgttactcatcgggcccagggacattgcagagtggcctagagcactctcaccccaagcggccttttccaaatgcccaaggatgccttagcatgtgactcctgaagggaaggcaaaggcagaggaatttggctgcttctacggccatgagactgatccctggccactgaaaagctttcctgacaataaaaatgttttgaggctttaaaaagaaaatcaagtttgaccagtgcagtttctaagcatgtagccagttaaggaaagaaagaaaaaaaaaaaaaaaaaa

SEQ ID NO: 221282 - DNA, 1000 bp, Homo Sapiens
accatccggtcaccagaagtgaaaaggctgcctcctttaaactgcagcgtcagaatcgtgttgacagcaaagaaacagagtgctaatttagttctcagctcttctgacttaagtgtgcaaaatatttttatagatttgacctacaaatcaatcacagcttgtattttgtgaagactgggaagtgacttagcagatgctggtcatgtgtttgaacttcctgcaggtaaacagttcttgtgtggtttggcccttctccttttgaaaaggtaaggtgaaggtgaatctagcttattttgaggctttcaggttttagtttttaaaatatcttttgacctgtggtgcaaaagcagaaaatacagctggattgggttatgaatatttacgtttttgtaaattaatcttttatattgataacagcactgactagggaaatgatcagtttttttttatacactgtaatgaaccgctgaatatgaggcatttggcatttatttgtgatgacaactggaatagttttttttttttttttttttttttgccttcaactaaaaacaaaggagataaatctagtatacattgtctctaaattgtgggtctatttctagttattacccagagtttttatgtagcagggaaaatatatatctaaatttagaaatcatttgggttaatatggctcttcataattctaagactaatgctctctagaaacctaaccacctaccttacagtgagggctatacatggtagccagttgaatttatggaatctaccaactgtttagggccctgatttgctgggcagtttttctgtattttataagtatcttcatgtatccctgttactgatagggatacatgctcttagaaaattcactattggctgggagtggtggctcatgcctgtaatcccagcacttggagaggctgaggttgcgccactacactccagcctgggtgacagagtgagactctgcctcaaaaaaaaaaaaaaaaaaaaa

SEQ ID NO: 221283 - DNA, 1000 bp, Homo Sapiens
ggtttctccaacctggagtcccaagtcttggagaagagagccagcgagttgcaccagcgcgacgttcttttgaccgaactgagcaactgcacggtcagactgtatggaaatcccaacaccctgcggctaaccaaggcccacagctgcaagctgctctgcggtccggtgtctacctctgttttcctggaggactgcagtgactgcgtgctggcagtggcctgccaacagctccgcatacacagtacgaaagacacccgcatcttcctgcaggtgaccagcagggccatcgtggaggactgcagtgggatccagttcgccccttacacctggagctacccggagatcgacaaggacttcgagagctctggtttagataggagcaaaaataactggaacgatgttgacgattttaactggctggcccgggatatggcctccccaaactggagtattcttcctgaagaggagcgaaatatccagtgggactaagcagttgtcactctgttcttcactcctaccaaatactttccacgttggactttcccccttattgggtctcgaagtttacttattgtcacactgtgtatgttttcagcattttaaggctagagattgtaatgggctcctacttgtaatttccattaaattcgtaacaggtataacactaaagcatttttgctattttcgtcatgcctttgagactgagtcttactccgtcccccagcgtggtggcgcgctgggattacaggcgcgcgccaccacgcgaactcgtatttttagtagagacggggtttcgccatgttgtccgggctgctctcgaactcctgacctcaggtgatccacccgcttcagcttcccaaagtgctggcattacaggcgtgagccaccacgccagggctttatttatttatttttaccacaatagtttgaagcagtaagggggaaggagggtgattatattgctttgtaatggtttgtgatacttgaaacatcacggtgc

SEQ ID NO: 221284 - DNA, 1000 bp, Homo Sapiens
gattttcagttctgggaaaatggtgtgcacaggagccaagagtgaagaacagtccagactggcagcaagaaaatatgctagagttgtacagaagttgggttttccagctaagttcttggacttcaagattcagaatatggtggggagctgtgatgtgaagtttcctataaggttagaaggccttgtgctcacccaccaacaatttagtagttatgagccagagttatttcctggtttaatctacagaatgatcaaacccagaattgttctccttatttttgtttctggaaaagttgtattaacaggtgctaaagtcagagcagaaatttatgaagcatttgaaaacatctaccctattctaaagggattcaggaagacgacgtaatggctctcatgtacccttgcctcccccacccccttctttttttttttttaaacaaatcagtttgttttggtacctttaaatggtggtgttgtgagaagatggatgttgagttgcagggtgtggcaccaggtgatgcccttctgtaagtgcccaccgcgggatgccgggaaggggcattatttgtgcactgagaacaccgcgcagcgtgactgtgagttgctcataccgtgctgctatctgggcagcgctgcccatttatttatatgtagattttaaacactgctgttgacaagttggtttgagggagaaaactttaagtgttaaagccacctctataattgattggactttttaattttaatgtttttccccatgaaccacagtttttatatttctaccagaaaagtaaaaatcttttttaaaagtgttgtttttctaatttataactcctaggggttatttctgtgccagacacattccacctctccagtattgcaggacagaatatatgtgttaatgaaaatgaatggctgtacatatttttttctttcttcagagtactctgtacaataaatgcagtttataaaagtgttaaaaaaaaaaaaaaaaaaaaaa

SEQ ID NO: 221285 - DNA, 1000 bp, Homo Sapiens; identical to SEQ ID NO: 115978

SEQ ID NO: 221286 - DNA, 1000 bp, Homo Sapiens
tttaatcctgtagtataggagttcaccttcttaggactagagactgtgccttatagctgttaattcatttccccctgaacatcaaatatgcctgaagagaagaaagtctagattcttctatgagtaacgccccctcctcactcaggtaaatgtgtctggggatgcctgtccagcttaaccacgtgcatttggcctatgtaatcctgcccatggtggccgcagctaatcagaatcagatggaaaattaaaccgggtaatctacttctaagccttaagaatattccctgggacacagacactataattggaagtgctgagctctggggcagaaggatcaggtgaccttcgcaacaaagtttgcccccacctcacataggacccggaagcagcctgagctgtggcggaggatccaggaagctacggagagaagcagccagcatggtgttccgtgcctcccggacgtttttcaggaggcctggttggacttgggttcctggatggtgggattgttgtacagcctctcaggagaccctgctgtcaagactgtgtgtgtggatttcccacccttagaagctctactaagacatcaacggaattagggccttcctttttgccttgtgagcgccaaggaaaagaaactatctcggtcacgtgagcgccacgaaagaaactgtatcagtcatccagagaccgtttattgcccaacacgttattcttgctgttggtggggtaactagccgaggaagacacagcgccttcccttcaggagttgcgtctcctctgcaggccacgatggtctgctctggagcattgggtgaacacacaggctggctgctctgggcagcgccttcactctgaccctggagaaccatttcatttcatcctggtcagtctagagtctgtgcaccaggcagtccatccactgaaggctgtgtttattcttttcctgtgcccctcataatggaagaaagtaaactgcttatcccgagccttaaaaaaa

SEQ ID NO: 221287 - DNA, 1000 bp, Homo Sapiens
cgtgagtggccctttccactactggggtcctgtgatcgatggccacttcctccgtgagcctccagccagagcactgaagaggtctttatgggtagaggtcgatctgctcattgggagttctcaggacgacgggctcatcaacagagcaaaggctgtgaagcaatttgaggaaagtcgaggccggaccagtagcaaaacagccttttaccaggcactgcagaattctctgggtggcgaggactcagatgcccgcgtcgaggctgctgctacatggtattactctctggagcactccacggatgactatgcctccttctcccgggctctggagaatgccacccgggactactttatcatctgccctataatcgacatggccagtgcctgggcaaagagggcccgaggaaacgtcttcatgtaccatgctcctgaaaactacggccatggcagcctggagctgctggcggatgttcagtttgccttggggcttcccttctacccagcctacgaggggcagttttctctggaggagaagagcctgtcgctgaaaatcatgcagtacttttcccacttcatcagatcaggaaatcccaactacccttatgagttctcacggaaagtacccacatttgcaaccccctggcctgactttgtaccccgtgctggtggagagaactacaaggagttcagtgagctgctccccaatcgacagggcctgaagaaagccgactgctccttctggtccaagtacatctcgtctctgaagacatctgcagatggagccaagggcgggcagtcagcagagagtgaagaggaggagttgacggctggatctgggctaagagaagatctcctaagcctccaggaaccaggctctaagacctacagcaagtgaccagcccttgagctccccaaaaacctcacccgaggctgcccactatggtcatctttttctctaaaatagccacttaccttcaataaagtatctacatgcggtgaa

SEQ ID NO: 221288 - DNA, 1000 bp, Homo Sapiens
tgtgactttttttaagcatcctgacaggaaatgttttcttctacatggaaagatagacagcagccaaccctgatctggaagacagggccccggctggacacacgtggaaccaagccagggatgggctggccattgtgtccccgcaggagagatgggcagaatggccctagagttcttttccctgagaaaggagaaaaagatgggattgccactcacccacccacactggtaagggaggagaatttgtgcttctggagcttctcaagggattgtgttttgcaggtacagaaaactgcctgttatcttcaagccaggttttcgagggcacatgggtcaccagttgctttttcagtcaatttggccgggatggactaatgaggctctaacactgctcaggagacccctgccctctagttggttctgggctttgatctcttccaacctgcccagtcacagaaggaggaatgactcaaatgcccaaaaccaagaacacattgcagaagtaagacaaacatgtatatttttaaatgttctaacataagacctgttctctctagccattgatttaccaggctttctgaaagatctagtggttcacacagagagagagagagtactgaaaaagcaactcctcttcttagtcttaataatttactaaaatggtcaacttttcattatctttattataataaacctgatgcttttttttagaactccttactctgatgtctgtatatgttgcactgaaaaggttaatatttaatgttttaatttattttgtgtggtaagttaattttgatttctgtaatgtgttaatgtgattagcagttattttccttaatatctgaattatacttaaagagtagtgagcaatataagacgcaattgtgtttttcagtaatgtgcattgttattgagttgtactgtaccttatttggaaggatgaaggaatgaacctttttttcctaaaaaaaaaaaaaaaaaaaaaaaaaaaaaaaaa

SEQ ID NO: 221289 - DNA, 1000 bp, Homo Sapiens
aaatgctgctttgtccaggtgagaacatccataatttggggccctgagttttacccagactcaaggagttggtaaagggttaatagccagatagtagaaccagtgaggagatgcggccaaagattctttatatctgaaccaagatgtaaaacaagaaatgctttgaggctttctaagcgatcctcctgtctaatttgcacctttgtctggatgcacacttctgaccttgctgccacaacctgtggggtctgatgtgtcccttgatgggtgctgccctcagggactgcaccctgacaagtgttaaggcaacattcctttcttgtgccctgggccaaaaccaatgctgatgaccttatcagcttcctgtttcttcccatacttgcatacaccactgcaaaatgtcttaatgcaaattttgtatttcttacaggcctacagaaattgaaaatgaccaaaatcaggaaccacagatttgtgcccattcctaatattttgttctgcaaattaatgtataatttgaggtgaaattcagttataaagtcaaggacgaatttgcacagtgatatatttctatgtgtatgcaagtacaagtatataatatgtcacctggcacattcattttctcagttgaagaagagaaaatttgaaaatgtccttatgcttttagagttgcaacttaagtatatttggtagggtgagtgtttccactcaaaatatgtcaacttaaaaaaaaataggccctttcataaaaaccaaactgtagcaagatgcaaatgcatggcaaatcctgtcggtctccagttggttatctgaatagtgtcaccaattccaccaagacagtgctgagattggaaaagggcactcatttggattgccttacttctcttgccttaaatatatcccatatatttaatatgtcaaaaagggcttgaggtgaatttcattaaatggaataatatgatgccactttgcagctaaaataagctcagtgatacctcct

SEQ ID NO: 221290 - DNA, 1000 bp, Homo Sapiens
ggcacgcttgtacatgaagtgtggaaggactctgccacaatgtccctggaccctgaggaagaggcagaacatcccataaagatctcgtacgctcagtatgagaagtacctgaagtcagacaacatgatccggatcacagcggtgtgcaaggtcccagatgagtctgaggtggtggtggagcgggacatcatcctggacaaccccaccttgaccctggaggtgctgaacgaggctcgtgtgcggaagcctgtgaacgtgcagatgctcttctccaatccactggatgagccggtgagggactgcgtgctgatggtggagggaagcggcctgctgttgggtaacctgaagatcgacgtgccgaccctagggcccaaggagcggtcccgggtccgttttgatatcctgccctcccggagtggcaccaagcaactgctcgccgacttctcctgcaacaagttccctgcaatcaaggccatgttgtccatcgatgtagccgaatgaagggcgctggtggcctcccgtacaaacttggacaacacggagcagggagagctcaccatggaatgaaccccccgcccatgctgtccggcctgggaaaccctctccatctcccaaggctgccagacatggactccgggctccagcacatccccctctcctctcccccaggttggggctgggtccaccctgtcctatgacttgatcacttttgcacattccctggccgcttctccccagagctgcctgctctgtgagccccacagccctgctcattcctcacgcccttcaatgctgcaggatggactggcccctgacccagggactctccaaacgggatacaggagagaagctggtctagactgtttgctgatccccaacctgcacggggcattcctgcttctctctcaggccaccacagagggcaggggatggttagtcacctgccccagcactcacaccctaactcaaaataaatgttaaataagtgcgatcacacaaa

SEQ ID NO: 221291 - DNA, 1000 bp, Homo Sapiens
taacacatatgtagtataatttctagaaacaaacatctaataagtatataatcctgtgaaaatatgaggcttgataatattaggttgtcacgatgaagcatgctagaagctgtaacagaatacatagagaataatgaggagtttatgatggaaccttaaatatataatgttgccagcgattttagttcaatatttgttactgttatctatctgctgtatatggaattcttttaattcaaacgctgaaaagaatcagcatttagtcttgccaggcacacccaataatcagtcatgtgtaatatgcacaagtttgtttttgtttttgttttttttgttggttggtttgtttttttgctttaagttgcatgatctttctgcaggaaatagtcactcatcccactccacataaggggtttagtaagagaagtctgtctgtctgatgatggatagggggcaaatctttttcccctttctgttaatagtcatcacatttctatgccaaacaggaacaatccataactttagtcttaatgtacacattgcattttgataaaattaattttgttgtttcctttgaggttgatcgttgtgttgttgttttgctgcactttttacttttttgcgtgtggagctgtattcccgagaccaacgaagcgttgggatacttcattaaatgtagcgactgtcaacagcgtgcaggttttctgtttctgtgttgtggggtcaaccgtacaatggtgtgggagtgacgatgatgtgaatatttagaatgtaccatattttttgtaaattatttatgtttttctaaacaaatttatcgtataggttgatgaaacgtcatgtgttttgccaaagactgtaaatatttatttatgtgttcacatggtcaaaatttcaccactgaaaccctgcacttagctagaacctcatttttaaagattaacaacaggaaataaattgtaaaaaaggttttctatacatgaaaaaaaaaaaaaaaaaa

SEQ ID NO: 221292 - DNA, 1000 bp, Homo Sapiens
caactgccggctggtccccaacccagcccaggaggatagcaacagcgacggagtgggagacatctgtgagtctgactttgaccaggaccaggtcatcgatcggatcgacgtctgcccagagaacgcagaggtcaccctgaccgacttcagggcttaccagaccgtggtcctggatcctgaaggggatgcccagatcgatcccaactgggtggtcctgaaccagggcatggagattgtacagaccatgaacagtgatcctggcctggcagtggggtacacagcttttaatggagttgacttcgaagggaccttccatgtgaatacccagacagatgatgactatgcaggctttatctttggctaccaagatagctccagcttctacgtggtcatgtggaagcagacggagcagacatattggcaagccaccccattccgagcagttgcagaacctggcattcagctcaaggctgtgaagtctaagacaggtccaggggagcatctccggaactccctgtggcacacgggggacaccagtgaccaggtcaggctgctgtggaaggactccaggaatgtgggctggaaggacaaggtgtcctaccgctggttcctacagcacaggccccaggtgggctacatcagggtacgattttatgaaggctctgagttggtggctgactctggcgtcaccatagacaccacaatgcgtggaggccgacttggcgttttctgcttctctcaagaaaacatcatctggtccaacctcaagtatcgctgcaatgacaccatccctgaggacttccaagagtttcaaacccagaatttcgaccgcttcgataattaaaccaaggaagcaatctgtaactgcttttcggaacactaaaaccatatatattttaacttcaattttctttagcttttaccaacccaaatatatcaaaacgttttatgtgaatgtggcaataaaggagaagagatcatttttaaaaaaaaaaaaaaa

SEQ ID NO: 221293 - DNA, 1000 bp, Homo Sapiens
ttccatgagtttggccacgtgatgcaccagctctgctcccaggcggagttcgccatgttcagcgggacccacgtggagcgggactttgtggaggcgccgtcgcagatgctggagaactgggtgtgggagcaggagccgctgctgcggatgtcgcggcactaccgcacaggcagcgccgtgccccgggagctcctggagaagctcattgagtcccggcaggccaacacaggcctcttcaacctgcgccagatcgtcctcgccaaggtggaccaggccctgcacacgcagacggacgcagaccccgccgaggagtatgcgcggctctgccaggagatcctcggggtcccggccacgccaggaaccaacatgcctgcaaccttcggccatctggcaggtggctacgacgcccagtactacgggtacctgtggagcgaggtgtattccatggacatgttccacacgcgcttcaagcaggagggtgtcctgaacagcaaggttggcatggattacagaagctgcatcctgagacccggcggttccgaggatgccagcgccatgctgaggcgcttcctgggccgtgaccccaagcaggacgccttcctcctgagcaaggggctgcaggtcgggggctgcgagcccgagccgcaggtctgctgaggcctggcactgcgactgcccagtctggcctgcgctcccgccgccctggtgccttagcccccggcacaggatggggcaggctctggcacagtgcctgggactggcagggtggctgagcggctgtcttgcctcttgtcattgtctgtccccacccggtcgtggcccacccggctagagacggcgtcctcaaggcatctggagggctttcgtggctgccagggcctggtctttgttgcactaacacgtctcctctctgggaaacgtcccttgtcaggagacggctcttctttgaaatgaggtcattaaaaggaaacagaaaaagagaaaaaaaaaaaaaaaaaaa

SEQ ID NO: 221294 - DNA, 1000 bp, Homo Sapiens
ctcaaggccatctgtgtggatgtggaccatgggctgctgccgcgggaggagtggcaggccaaggtggcaggcagcgaagagaatggaaccgcagagacagaggaagtcgaggacgagagtgcctcaggagagctggacctggaagcccagttccacctgcacttctccagcctccatcacatcctcatgcacctcaccgagaaagcccaggaggtgacaaggaaataccaggaaatgacgggacaagtttggtagaccttggacactagggaagatcccttcacatgatagaagacagactctttgatgaggtcggcggagcagttcactagccaatgatgagagcagaaaggcctagacctgcagccagaagtgaaggcggctcagttctccgggatgcttctctacctcctgagcaccaattcctggattccagtcactggctcacctttagaatgtctgttgctattcactgctcccctcgctcctcttaacagcttggggaggtgaccagtggttcaggagggactagacaattacctgtccagtgtggtatggtaggaagagtgtaggtgttggcacgtgaccaaaattcacatccctcctcatggcagtcattcagtatgtgtacttgtacaagttatttaacccattggagcctaaattccctcatctataaaatggggataatattatctacctcacaagcttatgaaaactaaacatgatgaatcaaaagcacttggcatgtgagggctattaaaatagcctgattttttttttctccccctctccccaatgtatttgctctggcccttgctttttaccctccagagctaagaggtagcagagtctcttgggatgagtgattcaccctcttacttggcgaccactgatgagatcaacaacaggtgaactataaacctattatttattgcagaactaataaaaaatccaaagccttgtaaaaaaaaaaaaaaaaaaaaaaaaaaaaaaaaaa

SEQ ID NO: 221295 - DNA, 1000 bp, Homo Sapiens
tccagtgagaaggtagttccggccagtgcagaccctgctgacactgaaaaaatgctccggtatgaaatcaaacagataaagatgttcaaagggtttgagaaagtcaaggatgttcagtatatctatacgccttttgactcttccctctgtggtgtgaaactagaagccaacagccagaagcagtatctcttgactggtcaggtcctcagtgatggaaaagtcttcatccatctgtgcaactacatcgagccctgggaggacctgtccttggtgcagagggaaagtctgaatcatcactaccatctgaactgtggctgccaaatcaccacctgctacacagtaccctgtaccatctcggcccctaacgagtgcctctggacagactggctgttggaacgaaagctctatggttaccaggctcagcattatgtctgtatgaagcatgttgacggcacctgcagctggtaccggggccacctgcctctcaggaaggagtttgttgacatcgttcagccctagtagggaccagtgaccatcacatcccttcaagagtcctgaagatcaagccagttctccttccctgcagagctttggccattaccacctgacctcttgctgccagctaataagaagtgccaagtggacagtctggccactgtcaaggcagggaaggggccatgacttttctgccctgccctcagcctgttgcccctgcctcccaaaccccattagtctagccttgtagctgttactgcaagtgtttcttctggcttagtctgttttctaaagccaggactattccctttcctccccaggaatatgtgttttcctttgtcttaatcgatctggtaggggagaaatggcgaatgtcatacacatgagatggtatatccttgcgatgtacagtatcagaaggtggtttgacagcatcataaacaggctgactggcaggaatgaaaacaagaaaaaaaaaaaaaaaaaaaaaaaaaaaaaaaaaaaa

SEQ ID NO: 221296 - DNA, 1000 bp, Homo Sapiens
agcctggggccaagacgcccgtggcccagctcgactgcctgaaccgagacaactacattcgttcctgcaagttgctgccggatggccggagtctgatcgtgggcggtgaggccagcaccttgtccatttgggacctggcggcgcccaccccccgtatcaaggccgagctgacttcctcagccccagcctgctacgccctggccgtcagccccgacgccaaggtttgcttctcctgctgcagcgatggcaacattgtggtctgggacctgcagaatcagactatggtcaggcagttccagggccacacggacggcgccagctgcattgatatttccgattacggcactcggctctggacagggggcctggacaacacggtgcgctgctgggacctgcgggagggccgccagctgcagcagcatgacttcagctcccagattttctccctgggccactgccctaaccaggactggctggcggtcggaatggagagtagcaacgtggagatcctgcacgtccgcaagccggagaaataccagctgcacctccacgagagctgcgtgctgtccctgaagtttgcctcctgcggacggtggtttgtgagcaccgggaaggacaacctgctcaacgcctggaggacgccgtacggggccagcattttccagtccaaggagtcgtcctcagtcctgagttgtgacatctccagaaataacaaatacatcgtgacaggctcgggggacaagaaggccaccgtgtatgaggtggtctactgagacatgaccccccttcctgtacccgaagtccagactcccaggggaatcagcagccaggacagacatcctagcagccgcctcccagccctgcctaggaaccgtacatcccatctgctctctggccaacggcttcacaccttcccctgctgcatgtgggggccgatgggcaggggacctcggtggaaataaaatgtatctatcacatccgcaaaaaaaaaaaaaaaaaa

SEQ ID NO: 221297 - DNA, 1000 bp, Homo Sapiens; identical to SEQ ID NO: 115988

SEQ ID NO: 221298 - DNA, 1000 bp, Homo Sapiens
ctaggagaatttgtcaaaaatatagaccaagtatcaagtgaagtgttagagggctggcctgattcttataagtgtgactacccggaaagttatagaggaaccctactaaaggactttcacatgtctgaattatcctgcaacataactctgctgatcgtcaccatcgttgccaccatgctggtgttggctgtgactgtgacctccctctgcagctacttggatctgccctggtatctcaggatggtgtgccagtggacccagacccggcgcagggccaggaacatacccttagaagaactccaaagaaatctccagtttcatgcatttatttcatatagtgggcacgattctttctgggtgaagaatgaattattgccaaacctagagaaagaaggtatgcagatttgccttcatgagagaaactttgttcctggcaagagcattgtggaaaatatcatcacctgcattgagaagagttacaagtccatctttgttttgtctcccaactttgtccagagtgaatggtgccattatgaactctactttgcccatcacaatctctttcatgaaggatctaatagcttaatcctgatcttgctggaacccattccgcagtactccattcctagcagttatcacaagctcaaaagtctcatggccaggaggacttatttggaatggcccaaggaaaagagcaaacgtggccttttttgggctaacttaagggcagccattaatattaagctgacagagcaagcaaagaaatagattacacatcaagtgaaaaatattcctcctgttgatattgctgcttttggaagttccaacaatgactttattttgcatcagcatagatgtaaacacaattgtgagtgtatgatgtaggtaaaaatatataccttcgggtcgcagttcaccatttatatgtggtattaaaaattaatgaaatgatataactttgatttaaacagttctgacacataaaaaaaaaaaaaaaaaa

SEQ ID NO: 221299 - DNA, 1000 bp, Homo Sapiens
tctcattcttctggagcccattgagaaaaaagccattccccagcgcttctgcaagctgcggaagataatgaacaccaagacctacctggagtggcccatggacgaggctcagcgggaaggattttgggtaaatctgagagctgcgataaagtcctaggttcccatatttaagaccagtctttgtctagttgggatctttatgtcactagttatagttaagttcattcagacataattatataaaaactacgtggatgtaccgtcatttgaggacttgcttactaaaactacaaaacttcaaattttgtctggggtgctgttttataaacatatgccagatttaaaaattggtttttggtttttcttttttctatgagataaccatgatcataagtctattactgatatctgaatatagtcccttggtatccaagggaattggttgcaggatcctcgtggatatcaaaattcatagatgatcaagtcccttataagagtggcatagtatttgcatataacctgtgtacattctcctgtatactttaaatcatctctagattacttatgatacccaatacaatgtaaatactatgtaaatagttgtactgtctttttatttatattattattgttattttttattttcaaaatttttaaaacatacttttgatccacagttggttgacttcatggatgcagaacccatggatatagagggccaactgtaatctgtagcaactggcttagttcattaggaaacagcacaaatgaacttaagattctcaatgactgtgtcattctttcttcctgctaagagactcctctgtggccacaaaaggcattctctgtcctacctagctgtcacttctctgtgcagctgatctcaagagcaacaaggcaaagtatttggggcactccccaaaacttgttgctattcctagaaaaaagtgctgtgtatttcctattaaactttacaggatgagaaaaaaaaaaaaaaaaa

SEQ ID NO: 221300 - DNA, 1000 bp, Homo Sapiens
agtattgcctggtttgttaattggattaacgagacccataccaacatccctgagctgtcaagccactacctttgcaacactccacctcactatcatgggttcccagtgagactttttgatacatcatcttgcaaagacagtgccccctttgaactctttttcatgatcaataccagtatcctgttgatttttatctttattgtacttctcatccactttgagggctggaggatatctttttattggaatgtttcagtacatcgagttcttggtttcaaagaaatagacagacagacagaacagtttgaatatgcagcatatataattcatgcctataaagataaggattgggtctgggaacatttctcttcaatggaaaaggaagaccaatctctcaaattttgtctggaagaaagggactttgaggcgggtgtttttgaactagaagcaattgttaacagcatcaaaagaagcagaaaaattatttttgttataacacaccatctattaaaagacccattatgcaaaagattcaaggtacatcatgcagttcaacaagctattgaacaaaatctggattccattatattggttttccttgaggagattccagattataaactgaaccatgcactctgtttgcgaagaggaatgtttaaatctcactgcatcttgaactggccagttcagaaagaacggataggtgcctttcgtcataaattgcaagtagcacttggatccaaaaactctgtacattaaatttatttaaatattcaattagcaaaggagaaactttctcaatttaaaaagttctatggcaaatttaagttttccataaaggtgttataatttgtttattcatatttgtaaatgattatattctatcacaattacatctcttctaggaaaatgtgtctccttatttcaggcctatttttgacaattgacttaattttacccaaaataaaacatataagcacgtaaaaaaaaaaaaaaaaaa

SEQ ID NO: 221301 - DNA, 1000 bp, Homo Sapiens; identical to SEQ ID NO: 115990

SEQ ID NO: 221302 - DNA, 1000 bp, Homo Sapiens
cgtgctgctggcgttcgttgcgctcttcgtgaccctggcgggcgcgcagtgcaccacctgcgtggccccgggcccggccaaggcgcgtgtggccctcacgggaggcgtgctctacctgttttgcgggctgctggcgctcgtgccactctgctggttcgccaacattgtcgtccgcgagttttacgacccgtctgtgcccgtgtcgcagaagtacgagctgggcgcagcgctgtacatcggctgggcggccaccgcgctgctcatggtaggcggctgcctcttgtgctgcggcgcctgggtctgcaccggccgtcccgacctcagcttccccgtgaagtactcagcgccgcggcggcccacggccaccggcgactacgacaagaagaactacgtctgagggcgctgggcacggccgggcccctcctgccagccacgcctgcgaggcgttggataagcctggggagccccgcatggaccgcggcttccgccgggtagcgcggcgcgcaggctcctcggaacgtccggctctgcgccccgacgcggctcctggatccgctcctgcctgcgcccgcagctgaccttctcctgccactagcccggccctgcccttaacagacggaatgaagtttccttttctgtgcgcggcgctgtttccataggcagagcgggtgtcagactgaggatttcgcttcccctccaagacgctgggggtcttggctgctgccttacttcccagaggctcctgctgacttcggaggggcggatgcagagcccagggcccccaccggaagatgtgtacagctggtctttactccatcggcagggcccgagcccagggaccagtgacttggcctggacctcccggtctcactccagcatctccccaggcaaggcttgtgggcaccggagcttgagagagggcgggagtgggaaggctaagaatctgcttagtaaatggtttgaactctcaaaaaaaaaaaaaaaaaaaaaaaaaaaaaaa

SEQ ID NO: 221303 - DNA, 1000 bp, Homo Sapiens
ggacaatatacacaggatcacatcccagggccgctatgagctgcgcgtggacatgcgggatggccaggaggccgccttcgcctcctacgacaggttctctgtcgaggacagcagaaacctgtacaaactccgcataggaagctacaacggcactgcgggggactccctcagctatcatcaaggacgccctttctccacagaggatagagacaatgatgttgcagtgactaactgtgccatgtcgtacaagggagcatggtggtataagaactgccaccggaccaacctcaatgggaagtacggggagtccaggcacagtcagggcatcaactggtaccattggaaaggccatgagttctccatcccctttgtggaaatgaagatgcgcccctacaaccaccgtctcatggcagggagaaaacggcagtccttacagttctgagcagtgggcggctgcaagccaaccaatattttctgtcatttgtttgtattttataatatgaaacaaggggggagggtaatagcaatgtgttttgcaacatattaagagtatgtgaaggaagcagggatgtcgcaggaatccgctggctaacatctgctcttggtttctgctgccctggagcctgaccctcagtctccattctccctcctacccaggcctcctcaaccttcacctcctttcccaccaaggaggagaagtaggaagttttcttaaagggccaattcaaagccaagtcgtggggtgcagattgttatggtgacaggcacacacatttttctacccttcttctgagatgtcctctgccttccaggtatttgtgattttgtcacagcctgacatggccaggttctcacactggcccagagaaaagagcctcagcaagagagttttgccaacaattccccttaaaaggaaacagatcaactacaccgcatcccaacaacccaggttcttttccttccttccttccttcctcccttccttctttcctgccttccc

SEQ ID NO: 221304 - DNA, 1000 bp, Homo Sapiens
taaggtaggcagggtatttcctagtaagcatactttcttaagacggaggccatttggttcctgggagaataggcagccccacactttgaagaatacagaccccagtatctagtcgtggatataattaaaacgctgaagaccataaccttttgggtcaactgttggtcaaactataggagagaccagggaccatcacatgggtagggattttccatccagagccaataaaaggactggtgggggccgggggtggctattgtgggaagtcataacccacagatagatcaacctaagaatcctggcccttctccactctccaccatgcaggacaaacatcttctcaagcagtcaacgtagaatgcttgggaaatagtcataattacccacatatagtaattaatagatggtaattaattgatccttgatgtgatgttcttttgcatatttccttcattctaaagttgttccctggccgggagcgtttgctttcgcctgtaatcccaacactttgggaggccaggacagatcacttgaggtcaggagttcgagaccagcccagccaacatggcgaaaccatgtctctactaaaaatacaaaaattatggtgacgcctgcctgtagtcccagctactcgggaggctgaggcaggaggatcgcttgaacccaggaagtggagactgcagtgagccgatatcgcaccacagcgctccagcctggtcgacagagtgagactccatctcaagaaaaaataaaaataaagttgttctctgaagagcaaatgtctcattccagtaatgacccactcagcaggaatatggtggagttcagtccaattcaggtcagccatatccaaaagaccacaagtcattactaagttgagcaaaagagtttttatctattagcagaaagggcctctctggcagcagagattaaaaactggcccaacttcatttccatacttcagggaacagcaaattgaggatttacttatctaggactt

SEQ ID NO: 221305 - DNA, 1000 bp, Homo Sapiens; identical to SEQ ID NO: 115991

SEQ ID NO: 221306 - DNA, 1000 bp, Homo Sapiens
atatacatttccatgtattgatgtagttagtccacatttaaatttttatagaattatatagtttttgaaaaatacagtcagtagatgttttattttttagctattcagttatgtttataagtttgcatagctacttctcgacatttggtttgttttaatttttttgtatcataatagtcctatttttttttcaagttggagtgaatgtttttagttttaagatagataggagacacttttttatcacatgtagtcacaacctgttttgtttttgtaaaacataggaagtctctttaatgcaatgatttgttttatatttggactaaggttcttgagcttatctcccaaggtactttccataatttaacacagcttctataaaagtgacttcatgcttacttgtggatcattcttgctgcttaagatgaaaagcattggttttttaaaattagagaataaaatatgtatttaaatttttggtgtgttcacataaagggatgtagctaaaatgttttcataggctattatatattctcgcagcatttccagttaagaggatattaggtatataattctcttcttaaccgaatgtcagatggtcttacgccacagggtgcaggtaacccttggtctgtaagcaccaccgatccagggatcattgtctaaataggttactattgtttgtttcatcttgcttttgcatttttattttttaatttccaaattttaagtgttccctctttggggcaaattcttataaaaatgtttattgtaaagttatatattttgtctacgatgggattatgcacttcccaattgggattttacatctggatttttagtcattctaaaaaacacctaattattaaaacatttatagagtgcctactgtatgcatgagttgagttgcttctgaggtacattttgaatgacagcatattgtaagaaaaaaaaaggtgaataaaatttgacattagattataaaaaaaaaaaggaattc

SEQ ID NO: 221307 - DNA, 1000 bp, Homo Sapiens
aggcgaggggctgggcctgtgcagctgggcccttggccagagtccactcccttcctggctgtgtcaccccgagcagctcatccaccatggaggtcattggcctgaggcaagttccccggagagtcggggtcccctgtggccccctcaggcctatgtctgtgaggaaggggccctgccactctccccaagagggcctccatgtttcgaggtgcctcaacatggagccttgcctggcctgggctaggggcactgtctgaactcctgactgtcaggataaactccgtgggggtacaggagcccagacaaagcccaggcctgtcaagagacgcagagggcccctgccagggttggccccagggaccctgggacgaggctgcagaagctctccctccctactccctgggagccacgtgctggccatgtggccagggacggcatgagcaggaggcggggacgtgggggccttctggtttggtgtcaacagctcacaggagcgtgaaccatgagggccctcaggaggggaacgtggtaaaacccaagacattaaatctgccatctcaggcctggctggctcttctgtgctttccacaaataaagttcctgacacgtccagggccaggggctgtgtgacggctgcctgaagttctcctcgatcccccggtgagcttcctgcagcctgtggatgtcctgcagcccctcagccctacccccaagtttctcctctgacccatcagctccctgtcttcattttcctaaacctgggctccagcatcgtccccaagcccaccaggccaggatgcaggcatccacatgccctcctccttggcttcccctgcgtggtggtgccaatgtgccctggcacccctgcagaggctccggatggagcctggggctgcctggccactgagcactggccgaggtgatgcccacccttccctggacaggcctctgtcttccacctgacccaaagctctctagccacccccttgtccccaggtat

SEQ ID NO: 221308 - DNA, 1000 bp, Homo Sapiens; identical to SEQ ID NO: 115998

SEQ ID NO: 221309 - DNA, 1000 bp, Homo Sapiens
agccacgagtaccgccattggctcctcgtctacgcacggtacctcgtaaacgaagggtttgaataccgacttcgagaaatatgcaaggacttactgggtccggttcactactccactggaagccagtgggagtcaacagtagtgggtctgcggaagagggagctgctgaaggagctgctaccagtcatcgggcagaacctccgattccagcgcctcttcaccgagtgtcaggaacagctcgacatcctgagggacaagtagcctgccccagcctgccctggctgcagcaagggcagggccacactctcgccgctgatgacatgcaggaccgcctctcacctgaccaggctgtagggggaggagacactggcaggagatgtgctgtcctgcaccagcgccagcccagctccctgggcagatgtgccctgtgtcctgggtctgacattgcctcaggagggggaagctcatccctccctccaagcccccgatgcggagctagggctggagctctgcccaggtgccctggggccagcaaggcagtcccaggcctgccgtctccagcacggccccaaggtggacactagcccctgctgctgcaggcaccatgctgcttcagcagtgacgattgagccatttgtgagagagaatccggaagcgttaggtattacagcagactgacctaagacctatgtaaaaggaaagctgttccaacacacggactatttttgtactagaatttgctaacttgtaatattgaatttcctttggccgataatcaggatttccctataagtcacttggacattggtcacttgtaggaaatttaaactctaattatgacagctacactgaaaaataattgtactgaaattaacttgtctatcttcatttggttttaatttttaaatgtttgtaaaaagagactgttttgggggaatggggcaaaggggtgggcgatttcttttgtaagtgtaaaataaatgaacacgcattgaatacc

SEQ ID NO: 221310 - DNA, 1000 bp, Homo Sapiens
tgtgtgtgtgtatttcactttttgttattgaccatgttctgcaaaattgcagttactcagtgagtgatatccgaaaaagtaaacgtttatgactataggtaatatttaagaaaatgcatggttcatttttaagtttggaatttttatctatatttctcacagatgtgcagtgcacatgcaggcctaagtatatgttgtgtgtgttgtttgtctttgatgtcatggtcccctctcttaggtgctcactcgctttgggtgcacctggcctgctcttcccatgttggcctctgcaaccacacagggatatttctgctatgcaccagcctcactccaccttccttccatcaaaaatatgtgtgtgtgtctcagtccctgtaagtcatgtccttcacagggagaattaacccttcgatatacatggcagagttttgtgggaaaagaattgaatgaaaagtcaggagatcagaattttaaatttgacttagccactaactagccatgtaaccttgggaaagtcatttcccatttctgggtcttgcttttctttctgttaaatgagaggaatgttaaatatctaacagtttagaatcttatgcttacagtgttatctgtgaatgcacatattaaatgtctatgttcttgttgctatgagtcaaggagtgtaaccttctcctttactatgttgaatgtatttttttctggacaagcttacatcttcctcagccatctttgtgagtccttcaagagcagttatcaattgttagttagatattttctatttagagaatgcttaagggattccaatcccgatccaaatcataatttgttcttaagtatactgggcaggtcccctattttaagtcataattttgtatttagtgctttcctggctctcagagagtattaatattgatattaataatatagttaatagtaatattgctatttacatggaaacaaataaaagatctcagaattcactaaaaaaaaaaaaaaaaaa

SEQ ID NO: 221311 - DNA, 1000 bp, Homo Sapiens
gaactgatgcgacttgttttgctgcttggtagcactttaaaaaattttttgattaatgaagaaagtaaaaccataaacatttgccaaaaattcatgccccagtattagcaatgaattagttgcattggtttgagaaaggcacatattggagggaaatcttggtgtaacttaaatatttgaaaattacctttaatgcaatgcatatctgtttattctgggaaatgttttaatgccagggcctgctgagttgcttcttcttgtggagattttttttttaatctcctgagttgtataaaagttgtactgcatcttagtttactggataaatttaaaacacagtattgtagaaagctaatacaaaactatcctatgccttcaaatagtatagaaaatggaaaatatacaagtaaattctgttgaaccacctgtgtagtctctctagtagttaaaacagctattttagtaaccccaagagtttcttctcatatccataaaattggattacagtatggcaatatctacagcttctattcattatgcaacgtttaacattgattggataaatgcttataggctgggccaggtggctcccacctgtagtcccagcactttgggaggcaaaggcgggaggatcacttgaggccaggactttgagaccagccagggcaacataataagacttttctctactttaaattttttaaaaaattagttgggcatagtggcacttgcctgtagtctcagctacttaggaggctgaggtggcagaatagcttatgcctaggaggttgaggctgcagtgagctgtgattatgccattgcactccagcctgggtgacagagcaataccctgtctttaaaaataaaagctattacttggcaaattctgaggtaagtgtatgatcttagggaactttgatacaaatgggaattcactcactggaatcgtggctcccaaaaagatgctttaattgtgtggtgcttttatagtttagctcca

SEQ ID NO: 221312 - DNA, 1000 bp, Homo Sapiens; identical to SEQ ID NO: 116003

SEQ ID NO: 221313 - DNA, 1000 bp, Homo Sapiens; identical to SEQ ID NO: 116004

SEQ ID NO: 221314 - DNA, 1000 bp, Homo Sapiens
tctgttgagacctgggcttcttgtagccccttctccctctggccagctgcacagcctgtgggaggtgcccggcccaggctgggtgtgggggaagctggtccctgctgtgggtggcgctggggacctaggggctccttctgaggttggccttgtggcctctgggctgtatgcctctggggtgtagggaagaggcgggaggagtcatggggatggggagcggcagggggagagaggggccctcgacaaaggcttgggaaatgaggggaggtggaggcagggcaggggaagcgaagagtcagccttggagagagcaccctggggcctccgtgtcggggtacacccagcactttgcgacctgcggcccagcaggcgcggaggatggcggggaggaagccagcagcccctgtgtttactgtcgtcagaaaggtcttgtgttttggttttggggtttttgttttgtttgtgttttgtttggcttgtttgttttttaaggggaaaaaagtttgtaattatttcatccaaatctcccgttatatatctgtgaataataagagattttataatagcaagaaaatgatgtatattttagtttgttgacaaataagtcatcatgatcacgaaggacactgagaaaaaataatttagaaccctggtttttgtgaatttttttgttttgtgtttctttgttttgagatttgtgtttggtttggtttttgcactgcactaaggcaggagggttggagggctgggtgcagcctgggagtccgatggttttcagcaggagacggggtgtcccctgcagggggctaaactgcaggggcctgagattagctgtgaacatgtgggagcccgatgcatgtgggtcagggatctgggggcccccccagctggcgggaaccccaaatggacacaaactgtacatttgccaatgggtttttttcagaccatggtttttacttgcaaataaacctgagttcttttctgcaaaaaaaaaaaaaaa

SEQ ID NO: 221315 - DNA, 1000 bp, Homo Sapiens
ccctgcactgaacataccccaagagcccctgctggcccattgcctagaaacctttgcattcatcctccttctccaagacctatggagaaggtcccaggccccaggaacacagggcttcttggccccagatggcacctccctgcaccccggggttgtataccacaccctgggcccctaatcccaggccccgagataggaaagccagctagtctcttctcttctgtgatctcagtaggcctaacctataacctagcacagactgctacagctgctcccctcccgccaaacaaaaccccaagagagcaatgcccctaccacccaagggtgccatggtcccgggagagcccaaacctatcaccacctgttgggcatagccagagctgttcccacccagccagggcatgaaacatcaaccccccacatgtgaacccatcattcctaaaccctgggtaggctccatgccaagtaacagcagagggagttaagccataggaatttggctgtggagtaagagggaatgcggtgaggcactctggaatatgaccctaccagaggttggagaacaaacttgggcagccggaacccgtcactattctagacttccctggcattcgaggagccctttgaactttccaaagtgcagccacagctacaatgctgttaaatcctcccacattcttggatgccccttcaccttgtgtggacagtgtctggtttctccattttacagacaggaaaactgagcttcagacagggggtgggctttgcctaaggacacacaaatttggttgggagttgatggggccagatgagccagcattccagctctttcacccttcagcaacatgcagagtccctgagcccacctcccagccctctcctcattctctgaacccactgtggtgagaagaatttgctccggccaaattggccgttagccacctgggtccacatcctgctaagacgtttaaaacagcctaacaaagacacttgcctctgg

SEQ ID NO: 221316 - DNA, 1000 bp, Homo Sapiens
gaacactgcacaaatataaaaaaagttctggaaatgcagaagggcgttagatttatatttggtttgttaattttatatcactgtttttcactgtttttgtggacaaataatggttgctttgctgaagtgttcttcctcaatcttgattgccctgtacctacccaaaagctgtagtcacacgtcctaaaggccaagcaaacccaccgggatggtggggggtcttggagccaagctcttaggttcctcttatttggggcagtaccagtccataccagctgcgatttgtgagtggacctgtggtaagaagaatagaaaaggctctcagagataaggttttttacatgtgtaacaatcccaagatttcctagattaaaatcttaattgattttgaaattggatttttatttagaatcaaaattaggacaagaacagataacttcttcagatacatttgtgtaactttacagaatgtcatcaagctttggggctctgtggggcacatgatttatccataaaggagatgcagtatgcttacttaaattaataaatttaaaatcttttaagtgtgtaaatagtagtgttggtcttacgtattccaagtaaaaagtagacagctgcactttttttgcacattggattaaaataacttccatcagcaacaaacatcagactgtttttaacaaatattaaagattgtcagaccaaatgtttatgttttcgaaatatatttcatcactggttacagttttaaatagaagttgattgccttttcatagccgtaaatgagaattataaactctattccagttttggtatactaaatgttcttttaaccatctttaggaatatattgaaatgccaacaatagtttgaattgtgttctgtaaaaaagtattagtcaattatttttcaaaatgtagaattgtagaaaatgtcaatttttcaaactcatttttcattgctaggatttcttttaaaaaaattaaagtaatttcacttc

SEQ ID NO: 221317 - DNA, 1000 bp, Homo Sapiens
tgaatgtggtaaagccttcagctataggtcatacctcactacacatcggagaagtcatagtggagagagaccctacaaatgtgaagaatgtggcaaagcctttaactctaggtcatacctcattgcacatcagagaagtcatactagagaaaaactttaaaaatgtaaaacatggagcagattttttacttgttacccatgtcttattgtgcatcagataatttatatgggagtgaaaccctacaaatgttaagaatgtggcataacctttaactattttcaagccttacacaatagcagagaatataaactgaaaaaatccatacaaatattaaaaatgtggcaaattattttaaactgtgctcaacccttactcaagataatccatactagagaaacactatagatgtaaaaatgtgaaaagttttattcaaaatatcaaacttatgagtcacctaggggttcatagaaaaaggaagtttgcagatgcaataaatgtgaggaagtatttaataaaaaatgaagtctaaatgtgtcagagaatttatgtgagaaaggactaaagcacagacactttcagcctttatactaaataagagtattttttgtacagaataatctaaaggcaaaataattagataatttatttgcttatatgttttaaagtagcaagaacattgatgttttgacaggtatatttcatagatacttcatttgtatttacagtatttgaggtttttggaaagcaaatattatttatataattcagctttcaaatctgttgctgcttttccttaatccgtggtgttcatgtgaaaatatgtgttctgtttttttttctgcatcagaacaatgtgaggtcattctacgttaatatcattaatatcagcatttttcatggaagtttaatgccaaatgtaaaacacatgaaaatttttaaaaatatgctctttgtgtttgaataaagtagtaatgcacgtaaacaaaaaaaaaaaaaaaa

SEQ ID NO: 221318 - DNA, 1000 bp, Homo Sapiens
gtcaacccttataaatgcagtcaatgtgagaaatccttcagtgggaaattacgccttcttgtacaccagagaatgcacacaagagagaaaccatatgaatgcagtgagtgtggaaaagccttcattaggaattctcaactcattgtacatcaaagaactcattcaggagagaaaccctatgggtgcaatgaatgtgggaaaaccttctctcaaaaatcaattctcagtgcacatcagagaacacatacaggagagaagccttgtaagtgcactgaatgtgggaaagccttttgttggaagtcacagctcattatgcatcagagaactcatgtagatgacaaacattgataattttacgaaactctgaaaagtggattcacaagagatagaaacaatcatatataaagagaaactctgtaagtggaatcatcttgtcatcttccagaaaactcatactgaatagaactttatgaatgcacagcatatggaaaggcatccacagaaagctgttctttacatgcaaaaagatagtagacaatacacaggaaaactgaatttagtaaccactctgaaaatttttagcagcaagtcatacctttttttaaaaagttcatacaggtgaggaaccatgttaaacgttgtaaagtcattttactaacataagattcacaaagaggaaacttcatgaaccagatgaatatagaatagacttctttgaaattcatagtttacagaattttaatgagagaaattattgagctaatgaatggcagaattaacaaaattacaaacattttatgtatcggaagcatataccttggagggaccatgctatgagggaaagtgtaaatctagaaatgagaaacccctagggaaaaaatatatataggagtgaacatcttatgaatgtaccaaataaaccacagctggactgttaacctcaccttagaagcttctttctaaaaaaaaaaaaaaaaaaaaaaaaaaaaaaaaaaaaaaa

SEQ ID NO: 221319 - DNA, 1000 bp, Homo Sapiens
tttccttcctctaaagatgtctttatgtttccttcattcccaaagaatatttttgtggaatataagattcagagttggcagttgttttcttttagacttcagagatgtatctctctgttctgtacattattgtttaatataagaaacctactagcattcaaataatcattccctattttacaatgcatcagttctgtcaagcttcattcaaagtgtttttcattgtctctagtgttcagaagtttggctgtgatgtgcgtggcatggaagtttttgggtgtattctatttggcgctccctggtgcttgcccagctttttgatctgtaggattatgccttttgcaaaatttggggaactttcaactattatttcttcaaatattttttcaccccccagtcttgtcttttttagggacttcaataacatgagtggcagatcttgttttacactcccatgggtccttcaggctctcatcttttttctttttccagtctattttctgtcttgttaatattgattaatttttattgaccttccatggtcctcactgattgttttctttgtcatacctaatctgttgagtttgtgcagtgagttttcattttggttttgtattttccagttgtttaatttccattgggtgggttcttttgtacaccttctgtttctttgcttattttttaacgccaaagaaagactctcagagaatagacaactatattccaaagtcatggttctctggtggtttgtcttgacatttgaatagaaatgttaaactatctgggggaatagaaagcccacagtcttctgagttgtgctacaccaatatttctatgaacagatcttacaactgagagtgatctgcagatttttcagagtcatgttctccatggaatgtttgtaaaattccctagctctctgcactgagctgagatcgtgccactgcactccagcctgggcaacagagcgagactccatctcaaaaaaaaaaaaaaaaaa

SEQ ID NO: 221320 - DNA, 1000 bp, Homo Sapiens
tcaatggtcttttttttttgtattatacagaattactgattcattgaaaaattattttatttattgcaagtctaaatttatcctttttttctttcctgattatcctaacaccatttattcaataaccttgtccattttcatattttttttattgactatttgatggtaagttacatttttattcacataaagcttggatatcaggtcagtgtttttttgtttttgtttttgtttttgtttttttgagatggagtctcactgtcaccaggctggagtgcagtggtgcaatctcggttcactgcaacctccacctcccgagttcaagtgattttcctgcctcagctccccagtagctgggactacaggcgcccgccaccacgcccagctaattttttgtattttcattagagatggggtttcaccacgttggccaggatggtctcgatctcttgacctcgtgatccatctgcctcggcctcccaacgtgctggaattacaggcatgagccaccatgcctggcccagtgtttgttttttaaatttatatatatgtatctatgtctcatcctgtttatggtcaataactgttacttttaagtatcctttaatacctgtaccttttgttttagaagattgtttactttccttttataaaattatactctccattttagcaaaacagctttccctcatcataatgtagataaaaagaaaaaaaggatatggttacctgtaatcttaccaatcatagataatcactgtcaaacttttggagcaaatcctttaatactatctctcattgttttggaaacaaggtgtgattatgctatactataaccagcccttaatattttttgtctgtaaatatgttgttaccattttattggctttatagtattcacctgtctttatcaaaccccaattttgtcaaatattaaaaattttgccattataaaaaaaaaaaaaaaaaaaaaaaaaaaaaaaaagaaaaaaaaaaaaaa

SEQ ID NO: 221321 - DNA, 1000 bp, Homo Sapiens
atgtgttaagaccattgtacattcaatgaagcattattatgcttctaactttaacctatttcaccttactcaagagtgtatgtaaaagatggtaacaatatactatttggtaacataatggactaacatttctattaatctatttcaccagtggctttcaactgcaaataagttaaagaatatttttctataggttaaatattcttttttgtcttatttaaacttactgttcttaatttctgtgggtacatagtatgattttaattaccttattttattctttgtgctattcataattttttttgtttgtttggtttttttttttgagacagagtcttgctctcgcccaggctggagtgcagtggcgcgatcttggctcactgcaagctccgcctcccaggttcactccattctcctgcctcagcctcccaagtagctgggaccacaggcgcccactacttgtttgggtttttttttggagatggagtctcgctctgtcacccaggctggagtacagtggcatgatcttggctcactgcaacccccacctccccggttcaagtgattctcctgcctcagcctcccgaatagctgggattacaggcgtccaccatcacaccaggctaatttttgtatttttagtagagatggagtttcaccatgttggccaggatggtctcgatcttctgacctcatgatctgcctgcctcggcctcccagagttctgggaccacaggcatgagccactgcacctggccaaatgtgtatatatttatgcaatatataacatgttttgatacaggcatataatatgtattagtcacatcaggataaagtatctattaccttcagcatttatcctttgtattacaagccaattctacacttcattattttaatgtacaattaaattgttattgactacagggtcattttaattataaaaattatatagaagtataaataaagtccatacattcctgagtcatgaaaaaaaaaa

SEQ ID NO: 221322 - DNA, 1000 bp, Homo Sapiens
gagtgtagtgagtgtgggaaagcctttgctcacagctccactctcattgaacactggagagttcacacaaaagaaaggccttatgagtgcaatgaatgtgggaagttctttagccaaaactccattctcattaagcatcagaaagttcatactggagaaaagccttataaatgcagtgaatgtgggaaattctttagccgaaaatccagccttatttgtcactggagagttcacactggagaaaggccttacgaatgcagtgaatgtgggagagcctttagcagtaactcccacctggttcgtcatcagagagttcacacacaagaaaggccctatgagtgcatccagtgtggaaaagcctttagtgaaagatctacacttgttcggcaccagaaagttcacaccagagaaaggacttatgagtgtagccagtgtgggaaactcttcagccatctttgtaaccttgcacagcataaaaagattcatacctgagtggagccttatggaagtggtctttgtgagaaaatcttcagccaagtcaaacttcatgcagcagaatccccataccagaaaaattacctacatgtactgctaatgtggaaaagccttcagaagctactctgtttctgaccagcccaggaacctttgcagggccatctcacccatgcagcataaggcagaagccatagtcactttccatcttgcctggatccaaaaatttgcagcagtcctgtcctcatgcatggggaaaacagtaccctgagccttccttcctgtgttctctagggattcaggactgtgctcagctgaaccgatgctggttgaggggccttgagggaaatctaatttgagctcaggaagatgcacattccttgtggatgtggtcaagtctgtgtttaacccctaagatgtgtccattgaggccacaaatcaccctccactggaatcacctaccttgcctgcactaactggtgataataaagaccttattgatcaggtc

SEQ ID NO: 221323 - DNA, 1000 bp, Homo Sapiens
tccagtagggaaacaaaattgataaatattgagtgtgagtaattgggattggggagattgtggcaaactagaggggaagtgcccattgtaaaaacacatccacagacagtccaggcactaaggctgaatgggatcagggtatccagaaatctcaggatctccagggccatgttactgttaggtcaaggtcactggtgcagcaacgaatgtagtttttctagattcctctccctccctgggctctttacctaatgtctttgcggcacaggcggtaaccctgggagtaaagaggtgtggtccaaggaagtagcttttgtgaccagctggagtttctggtgactcttttggcaatggtcctcattgtttgccagtttttcttactactgaggaagagattgtcttcccaagatatttggagtgataagagtcaccatagtgaggtagagtcactcttagtgatgtccagttgtccagtttccaatagaagtgggagatccagatttttaaatgggataactttttataggttcactgaggtgtaatcaacatgcaatatattgcacatatttaaagtgtacgagttaagtcttgatacacacacacacacacacacacacacacacacacttgaaactatcaccctatcagtggtattggacatatctgttacccccaaagttaacctgaggcccttaacctttctctcagtgctcgccttcccccagaatccctaggcaaccactgagtagttttcactgtaggtaaatttgtcttttctagaattttatgtaagtctgcctataaagtgttaattttgcatgctgtctttcatgcaacataatttgaaatttgtccatggtatgtatgaacagtccattttaaaattactgagtcatattctgtatggatataccacagtttatccatttatcttaattgatgtctgtactccacccccatttttaaatattaaaaagctgctgcaaaaaaaaaaaaaaaa

SEQ ID NO: 221324 - DNA, 1000 bp, Homo Sapiens
cacttattttttaagagggaaaggactttggtcatgtttacattggcctttggtttttttttttctttcagccacaactatatgctgatataactcagccatcacttttgagttttgtttttaaatgaaggttaaatgtgacctgtgccctcacatttaattccgtttcatggagacatcttcctgactttgttggatagctgccactagggttgcttcgatcttcagccacatgctgtccttgaagcagctatttgaagatgtgttttctgaggaaaacaggctacaactgtttattaaaaccacttgcagtgcattcgtttatcagatgctcagtgcaaagtgtaattgggtcatggtcaaaaacgcttgcaacatctaattggcgttcaagatagtcattcaaaagttcttggcccgctgaagtctgttaacagttgaaacattctacagttaaccattagcatgctagttgtcctaatggaaatttttgaagagtttttcaatatataccctacccttgccaggaagagaagtaaaatcctcaggttgtggggtatttgtttctactccagcctggcaggcaaggctaaaacctgagattatcgatctatgagacatcttgatatgtaaagcacttaatattaaaggcataaaagtgaaactgctaaatatgtatagagaggttgacgtgtgatacgtgggacagttcacatagacatcagagaatttattccagaaaggagcctcctgaatgtgatgaatacggcaaagcctttaatcacatctcagcccttagcatcggaaagcttatactgtaaataaacttgatgaatattatatgtgaggaaaactttcatgtatagcactcattgcttcagacagaaaatgaattccgtcggtatgttccaatcgtgatgaatttgagaaacattgcaagagggagctcaatcttggccgggcgccgtggctcacgcctgtaatcgcagcactttgggag

SEQ ID NO: 221325 - DNA, 1000 bp, Homo Sapiens; identical to SEQ ID NO: 116018

SEQ ID NO: 221326 - DNA, 1000 bp, Homo Sapiens; identical to SEQ ID NO: 116019

SEQ ID NO: 221327 - DNA, 1000 bp, Homo Sapiens
gctggaaatttttgaaaaaattgaatcacagagaattatatctggaagaatctcaggatacatatcagaagcatctggtgagtctcaagacatctgtaagtctgcaggcagggtaaagagacaatgggaaaaagaatcaggggagtctcagagactctcgtctgcccaggatgaaggttttggtaaaatcctcacccacaaaaatacagtcagaggtgaaataataagccacgatggatgtgagaggagattaaatctgaactcaaatgaattcacacaccagaaatcttgtaaacatggtacctgtgaccagagcttcaaatggaactcagattttattaaccatcaaataatttatgctggagaaaaaaatcaccaatatggaaaatctttcaagagcccaaaacttgctaaacatgcagcagttttcagtggagataaaactcatcagtgtaatgaatgtgggaaagctttcaggcacagctcaaaacttgctaggcatcagagaatccacactggagagagatgctatgaatgtaatgaatgtgggaaaagctttgcagagagctcagatcttactagacatcggcgaattcacactggggaaagaccctttggttgcaaagaatgtgggagagcattcaacctgaactcacatcttatcaggcatcagagaattcacaccagagagaaaccctacgagtgtagtgaatgtgggaaaaccttccgagtgagctcacatcttattcgacactttagaattcacactggagaaaaaccctatgaatgcagtgagtgtggaagagccttcagtcagagctcaaaccttagtcaacaccagagaattcacatgagggaaaacctattaatgtaaggaacttaaatttgtaagtaaatgctgaggaaatggcacaatatgaaaaatattaaataaaaaataaatattgggcaagatggaagactgaaaaaaaaaaaaaaaaaaaaaaaaaaaaaaaaaaaa

SEQ ID NO: 221328 - DNA, 1000 bp, Homo Sapiens
aaggagcaaagccatgtgcagtgtcagctggcagatccaaagggaatggtctgcagaatcctgaaccaagaggggcaaatatgagtgaacctcggttgtcacggaggcaggtcagctccccaaatgctcaaaagccatttgctcactaccagagacattgcagggtggaatacatcagcagccccctaaaaagccacccactgagagagctaaagaaaagcaaaggaggtaaacggagtctgagcaaccgtttgcaacatcttggtcaccagcccacccgctcagcaaagaaaccctacaaatgtgatgactgtgggaaaagcttcacgtggaattcagagctgaagagacacaagagagtccacacaggagagagaccctacacgtgcggagagtgtggaaactgctttgggcggcagtcaaccctgaagctgcaccagaggatccacactggagagaagccataccagtgtggccagtgtgggaaaagctttcgccagagctcaaaccttcaccagcatcaccgacttcaccatggggactaaaaggagcactccatgctttagattcacacggaaggtgtttgtgtttctcctcccccttgcttgcatgtaaatcacaaaaactgtgtgacttacaaggaaagcacgaggcccttgaggaatgatgatgcacattctgctgtgaggaggcccagaaaaggccaaccagggcccaaccgtgcatgatgacagggtgcagagaaggcaggtctgggcactggggcaaagagaacttaagtctctgcagagagcaaggagtaactactgagagagaatcaggacaatcctgcaggtggcccgcttactgttaaatcgtccctctgttgctttatcctctaaaatatgttaagggataaattctatatatatagttatgcatttgctgtcataccagacaattttttatcatgagcacacttctttaataaagatgagtgatctaccagaaaaaaaaaaaa

SEQ ID NO: 221329 - DNA, 1000 bp, Homo Sapiens
tctcatttgtatgtgatctaaatttgcaatcaatttcaataatatttacaatttgtgataaaactgacttttacagattccttttcacaacataatttaggtgtctactgttcttattgtattttgttctgctgttgatctctccagcagccgtctcatgcttctcccttgctaaaagaagtttggattactcaggcagggccatccagccccaccactagaaaagctcttcagaatcttgtccctctgttgagcccagatctcatgtgctacgaaggaaaccccaagacccagagaggaagggtcaacctggaggcaggaaaaagttggcttggatccatgtctcatcaataaccttaccatatgcttaggtcccctctatgctgtcatcagacctttggcaatggggtggtcactacctcacaaggcaaagtgttgtatgattagaaattacgtctccagtggttagctcacattgcctctcaagagacaggtttccaggtgtcttcattgtagtgggtattaattgtcttcagcctcttgatatccataccttcctgtcctctgcctagaagcaaggccagcggtgcctttacggactgatcgtgtggtgcgatttagggattcttcagttttgcttgctttaggtttccaaaagttatacattggtgttttgattggaataaagaaatcctataagctatttgggaaaaattatagtgtatgtttcccatccagaaacatgcctttctatttattagagtattatattcctgtgaaaatttttctaattttcttcacttgttttacacaattttgttattgtagttttttccattatatttttatagttgattattgcttttacatgggaaagttatttttaattatatatttgtatagtcatctcactgttgttaattttcaatagtttgttggtttagttctgttaacttttggtaaaatgacaccatctacaaagaaaaaaaaaaaaaaaaaa

SEQ ID NO: 221330 - DNA, 1000 bp, Homo Sapiens; identical to SEQ ID NO: 116021

SEQ ID NO: 221331 - DNA, 1000 bp, Homo Sapiens
ggagggcctggcccctgacagtgaggtgggcaggaagagctaccggtgcgagcagtgcggcaagggcttcagctggcactcgcacctggtgacgcaccggcgcacgcacacgggcgagaagccctacgcctgcactgactgcgggaagcgcttcggccgcagctcgcacctcatccagcaccagatcatccacacgggcgagaagccctacacctgccccgcctgccggaagagcttcagccaccactccacgctgattcagcaccagcgcatccacaccggagagaagccctacgtgtgcgaccgctgcgccaagcgcttcacccgccgctcggacttggtcacccaccagggcacccacacgggcgccaagccgcacaagtgccccatctgcgccaagtgcttcacgcagagctcggcgctagtcacccaccagcgcacccacactggggtcaagccctatccgtgccccgagtgcggcaagtgcttcagccagcgttccaacctcatcgcgcacaaccgcacacacacaggcgagaagccctaccactgcctcgactgcggcaagagcttcagccacagctcgcacctcaccgcgcaccagcgcacccaccgtggcgtgcggccctacgcctgcccgttgtgtggcaagagcttcagccggcgctccaacctgcaccggcacgagaagatccacaccaccgggcccaaggccctggccatgctgatgctgggggcggcggcggcgggggctctggccacacccccacccgctcccacctaggaggccaggaaagggggagcggggcgcccagggccactggaacagccccactggagtcaaggctccgagggaggagagaggggctcgggaagggagctggggcggtgagggcatggggtgaggcatggcgatgggggagggcgagggcgagaaagggcaggcactctgcgaattaaaggccttggacttgaaaaaaaaaaaaaaaaaaaaaaaaaa

SEQ ID NO: 221332 - DNA, 1000 bp, Homo Sapiens
ggatgtggaacgagatataagttcgaagatgataaagtcgtctatgaaaacgaaatacatgctctctggacggattttcctccaagcaaaatatctagagacagtgagttcagaatgacagtgaagtgttcttatagcaggaatgacatgctactaaacatcaacgttgaaagccttactcctccagtggcctcagtgaagttgggtccatttaccttgatcctgcaaagctacccagataattcctaccaacaaccttatggggaaaacgagtaccctctagtgagattcctccgccaaccaatttacatggaagtgagagtcctaaacagggatgaccccaacatcaagctggtcttagatgactgctgggcgacgtccaccatggatccagactctttcccccagtggaacgttgtcgtggatggctgtgcatatgacctggacaactaccagaccaccttccatccagtcggctcctctgtgacccatcctgatcactatcagaggtttgacatgaaggcttttgcctttgtatcagaagcccacgtgctctctagcctggtctacttccactgcagtgccttaatctgtaatcgactctcccctgactccccactgtgttctgtgacctgccctgtgtcctctaggcacaggcgagccacaggggccactgaagcagagaaaatgacagtcagcctcccaggacccattctcctgttgtcagatgactcctcattcagaggtgtcggctcatctgatctaaaagcaagtgggagcagtggggagaagagtaggagtgaaacaggggaggaggttggctcacgaggtgctatggacaccaaagggcacaagactgctggagatgttggttccaaagctgtggctgctgtggctgcctttgcaggtgtggtggcaactctaggcttcatctactacctgtacgagaaaaggactgtgtcaaatcactaaatgggcttctaaataaagcagtcaaaat

SEQ ID NO: 221333 - DNA, 1000 bp, Homo Sapiens
ttcccaatccatataaccaggagaaagttctgccaaggctcccttatggtgctggaagatctagatcgaaccagcttcccaaagctgcctggattccacatgttgaaaacagacagatggcatatgaaaacctgaacgacaaggatcaagaattaggtgagtacttggccaggatgctagttaaataccctgagatcattaattcaaaccaagtgaagcgagttcctggtcaaggctcatctgaagatgacctgcaggaagaggaacaaattgagcaggccatcaaagagcatttgaatcaaggcagctctcaggagactgacaagctggccccggtgagcaaaaggttccctgtggggcccccgaagaatgatgataccccaaataggcagtactgggatgaagatctgttaatgaaagtgctggaatacctcaaccaagaaaaggcagaaaagggaagggagcatattgctaagagagcaatggaaaatatgtaagctgctttcattaattaccctactttcattcctcccaccccaagcaaatcccaacatttctcttcagtgtgttgacttctatcctgttaacactgtaatatctttaaatgatgtacaggcagatgaaaccaggtcactggggagtctgcttcatttcctctgagctgttatcttgtgtatggatatgtgtaaatgttatgactccttgataaaaaatttattatgtccattattcaagaaagatatctatgactgtgtttaatagtatatctaatggctgtggcattgttgatgctcacatatgataaaaaagtgtcctataattctattgaaagtttttaatatttattgaattattttgttactgtctgtagtgttttgtggagtactggaccaaaaaaataaagcattataaatatatagttttatttataaggccttttctattgtgtgttttactgttgattaataaatgttatttctggacaaaaaaaaaaaaaaaa

SEQ ID NO: 221334 - DNA, 1000 bp, Homo Sapiens
ttcaagaaggtagaactctcctcaatttacactgactttttagaggttcttccccccccgcccctgcagaggaatgaaactacttacaacatttaattcctttcataatatgaaagaattgatacaaggctatttgtctcgtaaacctggtctgcagaaagtcaaacttacaaaaactgttgtgacaaatgttatgtacatatattgatatgtaactgcattagtggccattttgaatcacagtggtgatcgtgtgaatatatttaacactgtgttaaattaatttacgttgctattttattttaatcataaacaactaccatgtttcttaatgttttgtgtaaatttaaggtaattatactatccttttaaacttcaagaaaacaaagttgttagcgtatttacatgaaggcgcattatgttgtcgtgtgtttcagtttcacattaaactgaaccttttactaattgtgagctaaagagatatatatatatatgtgtgtgtatatatatatatctacatgtctttctgtagcctctgcatactactggctgtcatcacaccagcgtacagtagctaaatttttggtgcaattatagcaaatgataatgttcccttttgaacttttacattttggcatgacatttcagagtattgtgggaccatgagacaaaattaagtacgatcacattctttatttctcattttaaagaaatgatgttggtttaccttttcctagttgaagatagtaattaggtttctaagctgtatactgtgtttattggtggcagtgacaccaaagatagaggcaatggatagaaatttttaaactggaaagaaaacctgaattacactacattttcgaagtctcttgtaattatttgggatatcaacaaaatttgattcgtctgtctaatcccttgctagtattttaaatatgtctttaacacattgtatcctttaattcttcattaaaatggaaataagtagatgtttcaaagt

SEQ ID NO: 221335 - DNA, 1000 bp, Homo Sapiens
ctgaggagctgggccatgaggccttctgggagcaagagctgcgccgggagcaggcccgggagcgagagggacaggcacgcctgcaggcactaagtgcggccactgctgagcatgccgcccggctgcaggccctggacgctcaggcccgtgccctggaggctgagctgcagctggcagcggaggcccctgggcccccctcacctatggcatctgccactgagcgcctgcaccaggacctggctgttcaggagcggcagagtgcggaggtgcagggcagcctggctctggtgagccgggccctggaggcagcagagcgagccttgcaggctcaggctcaggagctggaggagctgaaccgagagctccgtcagtgcaacctgcagcagttcatccagcagaccggggctgcgctgccaccgcccccacggcctgacaggggccctcctggcactcagggccctctgcctccagccagagaggagtccctcctgggcgctccctctgagtcccatgctggtgcccagcctaggccccgaggtggcccccatgacgcagaactcctggaggtagcagcagctcctgccccagagtggtgtcctctggcagcccagccccaggctctgtgacagcctagtgagggctgcaagaccatcctgcccggaccacagaaggagagttggcggtcacagagggctcctctgccaggcagtgggaagccctgggtttggcctcaggagctgggggtgcagtgggggactgccctagtccttgccaggtcgcccagcaccctggagaagcatggggcgtagccagctcggaacttgccaggccccaaaggccacgactgcctgttggggacaggagatgcatggacagtgtgctcaagctgtgggcatgtgcttgcctgcgggagaggtccttcactgtgtgtacacagcaagagcatgtgtgtgccacttcccctaccccaacgtgaaaacctcaataaactgcccgaagc

SEQ ID NO: 221336 - DNA, 1000 bp, Homo Sapiens
cgagcagggatataacctgcagttaagtgaaaagaaaatccagcctccccctccaaaaaaaaaaaaaaaatttaatttttaaaaattagtggtatggcaataagacacttcagaggctatcttaacctctgaatacccatcttctagtttaaagacagagacatcccatctggaaaatgttaacttgtgttgccatctcgttgccggagtaagtagacataagacagagtttaagaagtaaaaatatagaaaaattttgatggtcacaatgagataaatattagaatattactattccaatgattaaatgaggatcttgaaataaattctgaagtcttccaatttttacatttattggaggggtccctgagttctgtcaacttttttatttaagtctcttgctcttattttgtgcataaatgttaaaccttccaaaaatgaaatgttagctttctttcttttactttttattaaatttaatagaaaatatgacctgagtagttaaaaagtattttgcattatttgcagtaagatgtctctagcactgctcaaagggcaaattttaaaacttcagtctgggtgaaagatttgctagttttacagaaagatttgctatcttaaactcaagctggtttttctgttctcatgtaagtgactgggatgctgtcttatgaattcttccaaggtcatgtttgtgaaataaacattacatgagagctttcctgtcatctacactatatgttgtctggagtgttgaacaaatttattttagtttctaagttgtaatctatcctcatatggtctatacgattttgaatgtgtgccactacatactgagatgataatgctgtacaattttaagtggtagcagtttctgtatgcagtaggctgaaatattttgatgaactgcttaatttttggattttattttttaagttgtataatttattttcttgcaaaataaaaatgtaatataaaaaaaaataaaaaaaaaaaaaaa

SEQ ID NO: 221337 - DNA, 1000 bp, Homo Sapiens
ctggagggggaaggaaggcaggagggggaaggaagaaagagggggaaggaaagaaagaggggggaaggaaaggaggaaggggagaaggaagggaggaggaaagaaggaaggtagggggtgttgggttgggagaattgagggagttataggcagaggaggatcctagctccagccataagaactgggagagccgcctgctgctccagaagacctgcccacctccacagaaatgctagcccttcagaccttctggtcagtgaactgggaccagctctgactaaggatgccttccatggcctgggactcgagttcttcagaaccaagaggctaactgggcttcctccaagaagggaccaggggctagaagcagaagttggcatcagcaaacatttctggaatctaccaaagggaggcccaggcagaaccccttcctcagtctcccttcccctcttccccccagccttgaagaggttgatcctttgtgctgtgtctcttagccctttcatcggggatgcccagaggcaacagcccaggctggaggtgccccagggaagggtgctcacagtggtcccagggctacacttggctttgactgcacagcccctgctcagatccttgtggagggtgtccgatgacttggggaggttctcttccccttcctagaggaggaagtgaccaagtttgaaggcggcagaaatggccacacagccaagaagagcccatgcaactcagtccaggattttactgggtcagtgacattggtggaagccttcatgcctcctcattccacagcacttcctcctatgttgaccttaaacactggcttcccactgatacagactgggatgagctgagggcagtctcatttactgtcaagagttgtatttttgtattgtcctttttgccaagtctacatgtgttgactctgtaatggatttatgtagcccacttcagtctgcaaataaagcaaagtaactggaaaaaaaaaaaaaaaaaaaaa

SEQ ID NO: 221338 - DNA, 1000 bp, Homo Sapiens
atcgcagaggaaggtgggcggcgggagtgcccagccgtgtgacagcatcgttgtggcgtactacttctgcggggaacccatcccctaccgcaccctggtgaggggccgcgctgtcaccctgggccagttcaaggagctgctgaccaaaaagggcagctacagatactacttcaagaaagtgagcgacgagtttgactgtggggtggtgtttgaggaggttcgagaggacgaggccgtcctgcccgtctttgaggagaagatcatcggcaaagtggagaaggtggactgataggctggtgggctggccgctgtgccaggcgaggcccttggcgggcacgggtgtcacggccaggcagatgacctcgtactcaggagcccgatggggaacagtgttgggtgtaccacccatccctgtggtctacccgtgtctagaggcaggtagggggtccctccaagtggtccacaagcttctgtcctgcccccaaggaggcagcctggaccactcctcatagcaatacttggagggcccagcccaagtgaggcagccgaggtccctgctgccagcttcaggtgacccccccccatcccccggcacctcccttgggcacgtgtgctgggatctactttccctctgggatttgcccacgtacccaggtctgggtggggcccaggcccggatgcagaggcctgcagggcctctgtcaattgtacgcgccaccgagtgccttcaacacagcttgtctcttgcctgccactgtgtgaatcggcgacggagcactgcacctgcctccagccgccggctgtgcagtcctgggtcctcctttctgagggcccgtgtaaatatgtacatttctcaggctaggccagcaggggctgcccgagtctgtttttcatgcgatgacacttgtacaattaattatcttttcaaaggtacttggataataatgaaataaaactgtttttgaacctgcaaaaaaaaaaaaaaaaaaaaaaaaaaaaa

SEQ ID NO: 221339 - DNA, 472 bp, Homo Sapiens
atggctcgtactaaacagacagctcggaaatccaccggcggtaaagcgccacgcaagcagctggctaccaaggctgctcgcaagagcgcgccggctaccggcggcgtgaaaaagcctcaccgttaccgcccgggcactgtggctctgcgcgagatccgccgctaccaaaagtcgaccgagttgctgattcggaagctgccgttccagcgcctggtgcgagaaatcgcccaagacttcaagaccgatcttcgcttccagagctctgcggtgatggcgctgcaggaggcttgtgaggcctacttggtagggctctttgaggacacaaacctttgcgccatccatgctaagcgagtgactattatgcccaaagacatccagctcgctcgccgcattcgcggagaaagagcgtaaatgtaaagtcactttttcatcagtcttaaaacccaaaggctcttttcagagccacccactt

SEQ ID NO: 221340 - DNA, 1000 bp, Homo Sapiens; identical to SEQ ID NO: 116032

SEQ ID NO: 221341 - DNA, 1000 bp, Homo Sapiens
ctaaacttaccatgcagattacagcattaaatgaaaacttaggcactgtgaagaaggagtggcaatctagtcaacggagagttagtgagcttgagaaacaaacggatgacttacggggtgaaattgcagtattagaagcaacggttcagaataatcaagatgaaaggagagcactactggaaagatgtcttaaaggagaaggtgaaatagaaaagcttcaaaccaaagtattagaattgcaaagaaagctggataatacaactgcagcagtgcaggagctgggcagagaaaaccaatcacttcagatcaaacatacacaagcgttgaatagaaagtgggccgaagacaatgaagtacaaaactgtatggcctgtgggaaaggcttttcagtaacagtgagacggcatcactgccgacagtgtggaaatatcttctgtgctgaatgttcagccaaaaatgccttaactccttcctccaagaagcctgttcgtgtctgtgatgcatgtttcaatgacttgcaaggataatgggttatcacaacttcagagtaatattacactaacattagatttttaataaatgtacttaatagaggtcttggactactatttggtttggacactggttgcaatactagaccaaataggaattagtatattttggaatgttatggatatcaagtaaaactcttctatttttgtgagacttgggcttatcatctttcattacttttttcccatttagcccctggaatagctttcatgccaagtttagaattagccaatgaaatgtaaataaactttggacagaaaatagcaatgtatttttttaatataatttcattattcacaaatgaagaatgcaattccatagcttacttctttctcctaaatttaatgtacaaaaatgtacatggatgatattatcacttgttgctgtttttgttgcacaatagcacattaattatattaaatattctctttgtgaagttaaaaaaaaa

SEQ ID NO: 221342 - DNA, 1000 bp, Homo Sapiens
aagctgatattatggatattaatgaaatatttaaagatttgggaatgatgattcatgaacaaggagatgtaatagatagcatagaagccaatgtggaaaatgcagaggtgcacgttcagcaagcaaatcagcagctgtcaagggcagcagattatcagcgcaaatccagaaaaaccctgtgcatcatcattcttatccttgtcattggagttgcgattatcagtctcatcatatggggattgaaccactgaagttataaaggagcacactgtcgcactacattgtctaaattatgtaggaagattcctgtaatcatgtttttttaattattattttaaagctattgtataaaggatggttcccatactttgttatttttattgggggggttgggcgggttcctttggattaaatctgatattttctaatactgaaagattttctaaatgtcactgctgacataactcccttggtcttcaatttaatagttgttaagttttgggccacattgcatatgcctttcatttataatttatttaccctgcttgacttagtttggggaattcggaaatttaaggtgtgtgtattctgttgggatctccctgccacgtgaacacaccaagatgtgtgttacttcaagttaaaactccccaaaatttaatttttgatttgcttccaccaggggaaaatattctccaataatgtaaaataattaaggtccaatacatgggttgtatttttctggttcacaacagcacaaagtgtctttcatttttttgttggatttcctttaagatcttttttaccctgaagtcggtgaacacttttctagttaatttgatactctttctgtgtatataataagcttttgctgtagattgcctagtaaaattactaaggataggttgtttttacatatggtctatttaagtctgatgtttacgggggagagtgtagttactaaaaatgtttaacataatttggaagaagagtatgaaca

SEQ ID NO: 221343 - DNA, 1000 bp, Homo Sapiens
ggtggagatctggcatggtagtttttttcaagctccaatcatcggccagacagttgctttatgtaggtttttaaatgccaaaggcagatatgaagtagatttaattaagacttgacttcagcaatacaggggaacttaaaatacttatttttctttaaactgcaggagtcactgttaggtattgcttaaaaaaaattgcataaaagctttgcttgtcaagttaggattgctggaataccactaaagatttttgacttgtgaataaatgagctgtcatcgcaaaaaggcgatttgagaaatgtgggcttcagtattaattgccattttgctgacacccagtgtacctacctacctgagaaatttattttgtccatcatgtatttctcaaagcaaaaggtggttttcaagtataatgtcgttttcaacatgcttattacttagttttacgtcagctcatttcatcatcattgataacttgtgaaatacttatctccatcctatggaataggggagacgggtttagacaggttcaattagctcaagtctacacagctgaagtagcagagaaagtgggatctagatggtctgatcctagtgatctaccatatgaaggacatagtttgtgtcctggtccaagtcaaatattgactcctcacaaacagtaagtatggcaattttgtgatgcctttgattccactttacatggagtactattatttgtgaaatgtctttaagatttttggtcttaaatttttgaagactgctttccccctttatctcccagaaaattgagaagaagtaaactcctgcccactaacaatctcagtccgtgaacaaaaccaacatgaacattcctaaacaagagtgtgtgttactctaagaagaaggctatagaatttatggaaatggcttatgtaacctacaagactggagaacagaatgtgactggccttttctaatggtcctttaagatttaatgattaaagcaagagttttttat

SEQ ID NO: 221344 - DNA, 1000 bp, Homo Sapiens
cgggaaggggcgcgcgctgcccaaccgcgctctccgcctacctccgctgctcgggaagctgctggcctggccctcctggtctctcttcctttcctggtctctcttcctttccttgctctcacccacggataaaaccagaagcgacaggaggccagctcctggggttcctgggagccgggaacagattggctacggaacgccccaggttgtacattcagagggctctttctccatgggagctcctggtgccgcctcggccccagcctgtccccagcccctcaatctggtgcagcagcatcttgtcactgcacaacagtggcctggtcccccacaggcagttagggccccaggtcagacctcaccatgatgatttgttccagttctcccagggcagaggggcgagggagaggcttttgctgtgagagtagccgtcacgtgtctcttcccagcagcgccgggcaagtgggtgctagagtctgagcctcaggctctcctgccctgggcctcccaattggtgctatctgttactgcccgtgctcacggacatggatacagaccctgctgtgctccacaccctgcaggcgcctcgggaagcgcccaaaggattccccttcacgttggtgcacctgctccatagctccgggcgctgcgtcccgaggggccacagtctccatttcagcgtcttgcatggcctggcaccgggtggggtggtatgccccaggacccttgtttgtgtcaaaaatgactttccctgcccttgccgtgggtccggcgttcctcccagccgggatcacagtgggcagccggcacccggcaccactttggcgagcgtcctgcttccgccctcgccctcatctacgctgctccgctttcctcagacccctttttgccgtgcaaagggaattcttgacattaaataaaaggtatccagattgcagactgcatgttcacagagctgggggttctccagcttgcctacagtaaagcctcaatgaactgg

SEQ ID NO: 221345 - DNA, 1000 bp, Homo Sapiens; identical to SEQ ID NO: 116037

SEQ ID NO: 221346 - DNA, 1000 bp, Homo Sapiens
acaagaaatccaagcataagacgtgtgtgaagaagaagactctcaacccagaatttaacgaggagtttttctacgagatagagctctccactctggccaccaagaccctggaagtcaccgtctgggactatgacattggcaaatccaatgacttcattggtggcgtgtccctggggccaggtgcccgaggcgaggctcggaagcactggagtgactgcctgcagcagccggacgcagccctggagcgctggcacaccctgaccagtgagctgccccctgcggccggggctctgtcctcagcctgagtggacagcagtgtcccggcacaggcccatcgagccgggtccagtacccaaccttcgcacgagtgtgttgcacgtttacacagggtgggctgcccccaccctgcactacctatttttgtgagtctccgtgacccgggtctgtctgctcatgaggggctgcggagttctatattcacatatgcaaacctcctgcctgactcgctagtccctgcaaatatgcaaaccccccatcatctgcacacccgggcagtgctcagagcccggccccaggcccccgcgctcctcactcctgcctctccacgctgccccgtccctctcccccaacagggaggaggtcggattaggggaggttcagaggaggagaatgtctcaaaaaaaaaggacaaaaaacaaacccagagccactcctttaatacagaaacttcattgaaaaaacctagccctgtacagctgcccttttaaagaggtggccattgcagggtctctgcctccccagcaggtggcagatgctcccggccactcgtttaaataactgtcccctggagggggccggggtttgaaggcagggcccctgccaccctcctgggggacacccgtgcatgtttacgccttttctggttgtgtcagtggccggagcatggcagctgggcatcaataaacacctccgaggaaaaaaaaaaaaaaaaaaaaaaaaa

SEQ ID NO: 221347 - DNA, 1000 bp, Homo Sapiens; identical to SEQ ID NO: 116039

SEQ ID NO: 221348 - DNA, 1000 bp, Homo Sapiens
acgaatgttaaaacatttcaggtcagcaaaattagaagtcatttctagtcctcaaagcagaaataattagaaatgttaacatttaagtgcttatcatatgccagatactattctgaatattttatgtatattcattcatttagttgtcatattggctttatgtgacataactgtcattataccagtgttgtccaaggttgctagcaggaaatggcagagccaggagttggacctaggtttaatcctatccatattccatgttacaaattgacatgattttccatattaaaaaattttcatttattttgtacctcattcacatgaatagtaatgtgacaaactaaagttaatacatgaagcattgcaatatggaattttgcacatttttgttagctttacattatttgctgataccaacttttggtaggaaggaaaacagggaaggtgattgctgctattctggaatgtgtccattgaaaagaaaataggcgctttgtctcctacaatcttagagaaagttttacatacttaagtgggtaccacagataggcatgtaccttaaattcaaatctacagttttacaaaatgttttcctttgtgtgcctttcctatgtcaaattagccagaaggaagaagagacgttaagaatggcagataaatttaacaggtaatgatacagagattggccattacgctagctctcaggagaaaaacaactaggatgtcttgaaacccgtgcatttaattttagaaatggcaaatttgtaagcgtgtcatttaagtaatttgatgctcagttttagggtctaagttgacctcgagtgagccatgcaaaaatagctttaaaattatacatgagcagctcaaagtaaacgtgtattttttagtaacaatgaaattgtcaaatttcaagattttaataacaggacagttcaactaataaactttattgcatacaagatttattgcaatgtgggaaaattaaaattctcagtctcag

SEQ ID NO: 221349 - DNA, 1000 bp, Homo Sapiens
tcatgcctgtaatcccgacactttgggaggccaaggcaggaggatggcttgaagccagtagttcaagaccagcctgggcaacatagtaagaccccatctctatgaagaataaaaaaatgagctaggcgtggtagtgcacacctgtagtcctagctacttgggaggctgaggcaggaggatcccttgagtccaggaggttgaggctgcagtgagctgtgattgtgccactgttttccagcctgggcaatacagtgagaccctgtctcaaaaaaaggaaaaaaaagctcaaaaagttctgtgttgcctttctcttcttagctgatgatgggagaaccagttactaccttctctaacacaggctccatcctatctcttcatctcttcttgccagtgatgttgcacctgtaaccatctttttatgggtggagcagagagtcaatccctgcagccaccctgcagccagccatctctgcagttctctcagtgcaggcagttcttcctctcaggctgaagatcaaggagatgctttgtacatgaacagatgctgagtatctgttatcattgtattgtttagtgtcagtgtatcatttagtatttgtatcactgtaccatttagtgttgtatatcactcagtcatttaatattggttatcaccatacagtttaatatttgtatcatttggttcattgtatcgtttagtatttctattataacatttctatttgtagtatttgtataatatttgtgtcatttttaatagtatttgtatttttacaaatttgcagtatttgtagcatttagtatcattgtttcatttagtatttggtacaatctaataaatactaatccagtccaatactaatccaatccaatactaataatactattggtacaatccaatactaataatactattggtacaatccaatactaataatactaacagtagtattgatacaatctaataaataatgtgtttgacagtgtagcagaaaaaaaa

SEQ ID NO: 221350 - DNA, 1000 bp, Homo Sapiens
cgcccatgtgcgagtacctggtgaatttcttgcacaagttgcggcagctgcctgagcgatacatgatgaacagcgtcctggaaaacttcaccatcctccaggtggtgacaaacagagacacccaggaactgctgctctgcaccgcctatgtcttcgaggtctccaccagcgagcgtggggcccagcatcacatttaccgcctggtcagggactgaagggggaccccaaaactggctcaccccccagaacaccctcctcccagggagggtcctccagctcacctcatgcttcttatttggggagagggctgtgatgtaaaggggttgacctcagaggcctaagcaactggggccatcccccccattagaggggcccccaaaacttggttggagagctgaacaggctgggactgaggaaaggataaaccccgatattgggacctcacagtgggtgtctgaaaggacagatcactccggagtatcagggattgtggggacaggagtgagacaaccccccaggtacagcactggcttttcttttcagcccctgacaggccacccccactcctctgcatgtcttggagagcgctagttacacattggcttgtcccctttactttttcccagccacccctccccctgaaatttctgcccctctctaccaccctcactccatgacctgtgagatcacaaagtgaagatgaaccctttctgtgcaggagcagagccaggtgggccctggacattttttttttttttaatataacgagatatttataagtgggtgctagggtcttgactttatctccgctgcacaagcagtgtgttgaactttctaatctcatccctctcctaagtgagccctgagctagacggtttccttcctcccctctcaaagtttgtttgtttgtgttctgacagaggataaagctattttaccaaaaaaaaaaaaaaaaaaaaaaaaaaaaaaaaaaaaaaaaaaaaaaaaaaaaaaaaaaaaa

SEQ ID NO: 221351 - DNA, 1000 bp, Homo Sapiens
tatgaaggtaaaatcccaggaaccaacagacaaggcatcttccctgtttcctatgtggaggtcgtcaagaagaacacaaaaggtgctgaggactaccctgaccctccaataccccacagctattctagtgataggattcacagcttgagctcaaataagccacagcgtcctgtgtttactcatgaaaatattcaaggtgggggggaaccgtttcaggctctgtataactatactcccaggaatgaagatgagctggagctcagagaaagtgatgtcattgatgtcatggaaaagtgtgatgacggctggtttgtggggacctcaagaagaaccaaattctttggtactttccccggaaactacgtcaagaggctgtgaattgcgctccctccttctgtagaggccgcctgccagccatgcacctgcgtcaacgcgcctgaaacaccccgcgggcctcccgttgtcatgccttacggtttccaatgcgccgtcaccatctccacctgccaccaaaccaccagcagagtagccgccgctgctgtgagcctggggacgacatggcaggctggtccccctccgtgaaagtgtggattcctacttcctgctctaagctttgacacgtcaaaatgtgggatcagaaagaaaaaaatcatgatatttaaaaatggtcaaatatttgaggcaaaaaaaaaaaaaaaaagtgtctccaggaggctgtccagcctcgtggctccatttcaacatctccccccaggcgatgttctcccccaagacgaccagaaaattgtttattggggaatgctgtggtttgcattttcatattcttcgcttggcagtgtgtattcttttcacaagtttgcctagtgtcttggtttacacaatatgacaactgtaactgtactttagctattgtttgcctgcacatacatgttgtaatatgcacagtgattacaacctttaaagcaagaggaggcgagttaatttggatgagtgtgatttt

SEQ ID NO: 221352 - DNA, 1000 bp, Homo Sapiens; identical to SEQ ID NO: 116045

SEQ ID NO: 221353 - DNA, 1000 bp, Homo Sapiens
ctttgatggcacatccgatggctcctccagaatcatgaagagcaatgtgggagtagccctcaccttcaactgtgtagagaggcaagtaggccgccagagtgccttccagtacctccaaagcaccccagcccagtcccctgctgcaggcactgtccaaggaagagtgccctcgaggaggcagcagcgagcgagcaggggtggccagcgccagggtggagtggtggcctctctgagatttcctagagttgctcaacagcccctgatcaactaagttttgtggtacttcaccctcttctgccctcatttcatgtgacagccattgtgagactgatgcacaaactgtcacttggttaatttaagcacttctgttttcgtgaatttgcttgtttgtttcttcatgcctttacttactttgtcccatgctactgattggcacgtggcccccacaatggcacaataaagcccctttgtgaaactgttctttaaatgaaacacaagaaattggccactggtaaaactctgcagcttcaactgtacttcatttaatgccattaatgcaaatatacttcctcttctttttgcatggttttgcccacctctgcaatagtgataatctgatgctgaagatcaaataaccaatataaagcatatttcttggccttgctccacaggacataggcaagccttgatcatagttcatacatataaatggtggtgaaataaagaaataaaacacaatacttttacttgaatgtaaataacttatttatttctttgctaaatttggaattctagtgcacattcaaagttaagctattaaatatagggtgatcatagttcctctaccaagtctggaaagaacatctcctggtatccacaattacaccaggttgctaactgtatttgtacatttccctttgcattcgcttttgttcttgctagaaacccagtgtagcccagggcagatgtcaataaatgcatactctgtatttcgaaaaaa

SEQ ID NO: 221354 - DNA, 1000 bp, Homo Sapiens
gaattcagcagttttatcctggccttgtacttgcttgtattgtaaatgtggattttgtagatgttagggtataagttgctgtaaaatttgtgtaaatttgtatccacacaaattcagtctctgaatacacagtattcagagtctctgatacacagtaattgtgacaatagggctaaatgtttaaagaaatcaaaagaatctattagattttagaaaaacatttaaactttttaaaatacttattaaaaaatttgtataagccacttgtcttgaaaactgtgcaactttttaaagtaaattattaagcagactggaaaagtgatgtattttcatagtgacctgtgtttcacttaatgtttcttagagccaagtgtcttttaaacattattttttatttctgatttcataattcagaactaaatttttcatagaagtgttgagccatgctacagttagtcttgtcccaattaaaatactatgcagtatctcttacatcagtagcatttttctaaaaccttagtcatcagatatgcttactaaatcttcagcatagaaggaagtgtgtttgcctaaaacaatctaaaacaattcccttctttttcatcccagaccaatggcattattaggtcttaaagtagttactcccttctcgtgtttgcttaaaatatgtgaagttttccttgctatttcaataacagatggtgctgctaattcccaacatttcttaaattattttatatcatacagttttcattgattatatgggtatatattcatctaataaatcagtgaactgttcctcatgttgctgaatttgtagttgttggtttattttaatggtatgtacaagttgagtatcccttatccaaaatgcttgggaccagaagtgtttcagattttttaaaattttggaatatttgctttatactgagcttttgagtgttcccaatctgaaattcaaaatgctctaatgagcatttcctttgagcatcatgcctgc

SEQ ID NO: 221355 - DNA, 1000 bp, Homo Sapiens
accctgaccaacctgctgcttgtgggttttggcatcacctgtctcatcaacaacttacacctccagtttgtgacctttgtcctgcacaccattgttcgaggtttcttccactcagcctgtgggagtctctatgctgcagtgttcccatccaaccactttgggacgctgacaggcctgcagtccctcatcagtgctgtgttcgccttgcttcagcagccacttttcatggcgatggtgggacccctgaaaggagagcccttctgggtgaatctgggcctcctgctattctcactcctgggattcctgttgccttcctacctcttctattaccgtgcccggctccagcaggagtacgccgccaatgggatgggcccactgaaggtgcttagcggctctgaggtgaccgcatagacttctcagaccaagggacctggatgacaggcaatcaaggcctgagcaaccaaaaggagtgccccatatggcttttctacctgtaacatgcacatagagccatggccgtagatttataaataccaagagaagttctatttttgtaaagactgcaaaaaggaggaaaaaaaaccttcaaaaacgccccctaagtcaacgctccattgactgaagacagtccctatcctagaggggttgagctttcttcctccttgggttggaggagaccagggtgcctcttatctccttctagcggtctgcctcctggtacctcttggggggatcggcaaacaggctacccctgaggtcccatgtgccatgagtgtgcacacatgcatgtgtctgtgtatgtgtgaatgtgagagagacacagccctcctttcagaaggaaaggggcctgaggtgccagctgtgtcctgggttaggggttgggggtcggccccttccagggccaggagggcaggttccctctctggtgctgctgcttgcaagtcttagaggaaataaaaagggaagtgagagaaaaaaaaaaaaaaaaaaaaaaaaaaaa

SEQ ID NO: 221356 - DNA, 1000 bp, Homo Sapiens
tgcaacatggtaactctatgaatagtctttccagtgtcagcctgcctttagctaagataattccaatagtaaacggacagatccattcagtttgcagtgaaacacctagtcattttgttcaggatctgttgacaatggagcaagtgaaagactttgctgctaatgtgtatgaagcttttagtacccctcagcaactggagaaatgatttttccttcaagaaaaactacagtgggattcatttactttttaaaatacactgggtaaatcacctatacttagagtaacagtttgttatcaaaatgcctgataaaatatattcttaataaaagtcttcatttcataatgaaatcaatttatttggcatcttaatatatttttttagattcatcaacagaccagtttttgtgggcatatatatatacacgtgcaaatatcagaattgttaataatttgttacacatggacatttgttccaaactgactaaaaatcaatatagatattttatatacatatatatatatataaatacaaaattcagtgtactttaccatattaatactgaggaaaaatctgttggagacataggtctaggatgtgtgaagtttggaaaaatatgctatttaattataatgttccctagactgctgtaaacagaagtgaatcagacttttctccagctacctttcaaaataataaattatttgtctcaaatataccttgatggaggacttttttattcttatggaaatggtgaattccaacaactatgatgaactatgttctttgctatttcttcactatattttttaaggttttattaaaaagccttagaaagttacatattggtttagaggctaaaattgtgttgatgctgtttactcacctaattacatagttttaatcatttgtacataattttaaaaacttactttgtattgattttgaatacagtgaaaatcttattgcaataaactattttagtaaaaaaaaaaaaaaaa

SEQ ID NO: 221357 - DNA, 1000 bp, Homo Sapiens; identical to SEQ ID NO: 116050

SEQ ID NO: 221358 - DNA, 1000 bp, Homo Sapiens
ggcaactgccatcccccctgaaacctgagacctgtagtgcactcgaccgccctcaggtgttggtgaaacagagctgcccccaggctcgctgggcataggcttcctgattccaagccttttctgggagcaaagccagggcctggtgcctgattttctgaagccaggagccctcaggtggctggagctggaatagcagggaggactgggtgtacctaggcagtattttctctacttctctcaagtcttatactcactcttgagccctccttggggcctgcttagaaagcagacaggagagagagtactgctacttgatgatgggaaatgctttcactttaccagctttgggaagcagcagccccatgggatctaaaagtgtggagtctgcattaagaaacctacatgggtggcatggggctctggggagcaagcccttacttgctcagcactggttatgtagcacaaatagctcctaggaaaatgtttctggggcaaccctagaaccctggtcatattttgcagggtttctctggtggaatcagtttgccagcccttgcttgatgcttactggaaatctccaggttaatttctatctctgatccctccccaacccactccatatttgggtcatggacagtaaaggcagttggattctcatagacaactgggtaacttatatttctttgtaatcaagacttgagatatcgaagtcagttattggtctccagagtgcagctctgggagccttttgaagaatcagcactcattaagagctgagaagagagaagacctgattgggtggttgactagcagtcacagaacctgtcctcccaggctgttcctgaggcctgaccacagtatttattttggcatgtctctggccttctgcagaggcccaccctcatgggcattgtctctgtttcccagtggggtggacagtatatcagatggtcagaacaaataaagttcagtgtcaaatgaaaaaaaaaaaaaaaaaaaa

SEQ ID NO: 221359 - DNA, 1000 bp, Homo Sapiens
gctagagagttagcaatgttagagctagaacagattagaatttctaaacagtatcatgcacagttggtgtgagtgatcagtgtgcattgtatggcatgcatggttgtgaattattctctgttctccaaatactgtttctttaactcagatatttttgttagtgtctaggccacttcatttatttttcgtcatggtactttactgacttctctttattcaattctccacgccctcaccaaaaaaaactgtctcaaaatgagaatattttattttcatggtgagtctagaaaacgcccacttcattctgattaaaaattcttccatgttttaaatatcagaaccagacctttcttactgtgtatcttagcccatttgtgtctctataacaacaaccagctttcaaaggaactaatagagtgaaaactcactcattaccacgaggatggcacaagcgattcacgtaggatctgcccctgtgaccaaaacacctcccattgggccccacttccaacactggtgatcacatttcaacatgaggtttagggaaacaaatgcctaaactacagcactgtacataaactaacaggaaatgctgcttttgatcctcaaagaagtgatatagccaaaattgtaatttaagaagcctttgtcagtatagcaagatgttaactatagaatcaatctaggagtattcactgtaaaattcaacttttctgtatgtttgaacattttcacaatctcataggagtttttaaaaagaagagaaagaagatatactttgctttggagaaatctactttttgacttacatgggtttgctgtaattaagtgcccaatattgaaaggctgcaagtactttgtaatcactctttggcatgggtaaataagcatggtaacttatattgaaatatagtgctcttgctttggataactgtaaagggacccatgctgatagactggaaatagaagtaaatgtgtttattgaaaaaaaaaaaaaaaa

SEQ ID NO: 221360 - DNA, 1000 bp, Homo Sapiens; identical to SEQ ID NO: 116052

SEQ ID NO: 221361 - DNA, 1000 bp, Homo Sapiens
gttggaagagtaaactacctacagaaaaaaatcataacttatgacctgattaaatatgatgtggagaaagatgaacctgtccgtgatgaaaatggatattgcgtcagagttcccaaaggtgaagttggacttctggtttgcaaaatcacacaacttacaccatttaatggctatgctggagcaaaggctcagacagagaagaaaaaactgagagatgtctttaagaaaggagacctctatttcaacagtggagatctcttaatggttgaccatgaaaatttcatctatttccacgacagagttggagatacattccggtggaaaggggaaaatgtggccaccactgaagttgctgatacagttggactggttgattttgtccaagaagtaaatgtttatggagtgcatgtgccagatcatgagggtcgcattggcatggcctccatcaaaatgaaagaaaaccatgaatttgatggaaagaaactctttcagcacattgctgattacctacctagttatgcaaggccccggtttctaagaatacaggacaccattgagatcactggaacttttaaacaccgcaaaatgaccctggtggaggagggctttaaccctgctgtcatcaaagatgccttgtatttcttggatgacacagcaaaaatgtatgtgcctatgactgaggacatctataatgccataagtgctaaaaccctgaaactctgaatattcccaggaggataactcaacatttccagaaagaaactgaatggacagccacttgatataatccaactttaatttgattgaagattgtgaggaaattttgtaggaaatttgcatacccgtaaagggagacttttttaaataacagttgagtctttgcaagtaaaaagatttagagattattatttttcagtgtgcacctactgtttgtatttgcaaactgagcttgttggagggaaggcattattttttaaaatacttagtaaattaaatgaac

SEQ ID NO: 221362 - DNA, 1000 bp, Homo Sapiens
gcagaccataccctttgtgctctcagccagccttcatgggggcgacctggtggtgtcctaccccttcgacttctccaagcacccccaggaggagaagatgttttctcccacgcccgacgagaagatgttcaagctgctgtccagagcctacgctgacgtccaccccatgatgatggacaggtcggagaataggtgtggaggcaatttcctgaagagggggagcatcatcaacggggcggactggtacagcttcacgggaggcatgtccgatttcaactacctgcacaccaactgctttgagatcacggtagagctgggctgtgtgaagttcccccccgaggaggccctgtacacactctggcagcacaacaaggagtcactcctgaatttcgtggagacggtgcaccggggcatcaaaggtgtggtgacagataaattcggcaagccagtcaaaaacgcccggatctcagtcaaaggcattcgccacgacatcaccacagccccagatggtgactactggagactgctgcccccaggtatccacattgtcattgcccaagcccctggctacgccaaagtcatcaagaaagtcatcatccccgcccggatgaagagggctggccgtgtggacttcattctgcaacctctggggatgggacccaagaactttattcatgggctgcggaggactgggccccacgacccgctgggaggtgccagctctttgggggaggccacggagcccgacccgctccgggcgcgcaggcagccctcggccgacgggagtaagccctggtggtggtcctacttcacatcgctgagcacccacaggccacgctggctgctcaagtactagccccggccccagcacccgccaggatgtggagaccgaggcccatctccgcatcccgggctcctggctcttgattttgtctgccacagacatcccacaaagccgctgccattttattaaagtgttttgatccactttccactggaa

SEQ ID NO: 221363 - DNA, 1000 bp, Homo Sapiens
atgtcaacaggccctgatatccatcacttcatcatgggatctgaaggaactcttggtgtaataacagaagctacaataaaaatcagaccagtccctgaataccaaaagtatggctcagtagctttccctaattttgaacaaggagtagcctgtttaagagaaattgcaaaacagagatgtgctccggcatctattcgcctcatggacaacaagcagtttcagtttggtcatgctcttaaacctcaggtttcctctatctttacatcatttttggacggattaaaaaagttttatattacaaagtttaaaggatttgacccaaatcagctaagtgtagccacattactgtttgagggggatcgtgagaaggttcttcaacatgaaaaacaagtgtatgatattgctgcaaaatttggtgggttggcagctggagaagataatggacagagaggttatttgctgacctatgttattgcatacattcgagacttggctttggaatactatgtattaggagaatcttttgagacttctgctccttgggacagggtggtagatctctgtagaaatgtaaaagaaagaataacaagggaatgcaaagagaagggtgttcagtttgctcctttttctacatgcagggtgacgcagacttacgatgcaggtgcttgtatctacttctattttgcctttaactacaggggaattagtgacccactgaccgtatttgaacaaactgaggcagctgctagagaagaaatccttgctaatggagggagcctgtcacatcaccatggagtgggcaagttacggaagcaatggctaaaggaaagtatctctgatgtcggctttgggatgctgaagtctgtcaaggaatatgtggaccccaataacatctttggaaacagaaaccttttataaatccattagtaccattacaaaaaaatgtcaattttttttttaagttttcaactgtggttatactagtaatcaaatatatcat

SEQ ID NO: 221364 - DNA, 1000 bp, Homo Sapiens
caaaagcagtaaattctcatcttctgggaaatgttggcattaacaatcaaaaaaagattccatcaacagttgaattctgcagcaccccagctgagaaaatggctgaaacggttctaagaattttagatccagttacctgcaaagagagttcacctgataatccattttttgagtcttcaccaaccaccttacttgctacaaagaaaaatattggacgatttcatccctatactagatatgaaaatataactttcaattgctgcaatcactgccggggagaactgattgccctttaacagtcaatatgttggaggcatgctaagaataaacaactaaataactgtattagaaaaaaaagaaacttactaaatatcataatctgatgatatgtggtcctgaattggctactagtttaagcaaataaactgtaagtcatttatgggttagttggggaataaatggatatgggctggatattcggtaatatcattaatgaaaagcagattgcagaaatacagtatgatctcagtattttgaaattgtaaatacatgtacagacaaatacttagacagtatgcatactggtgttaacagtcacaatttctgggtgatgaaaatgtaacttgaaaccgctccatttctacaatgcacatttactgtttctgttataataaaagggtatgttagaaaaacaaaaaggaggctgggcatggtggctcatgcctctaatctcagcactttgggaggccaaggtgggcggatcacttgaggtctggagtttgagaccagcctgagcaacatggtgagaccccatctctacaaaaaaaatataaaaattagccaggtgtggtggtgcacacctgtggtcccagctacttgggaggctgaggtgggaaaatcacttgaacctgggagggtgaggttgcagtgagctgagatcatgccactgcactccagcctgggtgacaggaaaaaaaaaaaaaaaaaaaaaaaaaaaaaa

SEQ ID NO: 221365 - DNA, 1000 bp, Homo Sapiens
cgtgctggctggtgtggatgcgttcacttttggcagctttgcacgacatggtgcctggtgggagaatggggttggttgccatgtcattggttttttgtccatttttgcttcagaatcatctgttttcctgcttactctggcagccctggagcgtgggttctctgtgaaatattctgcaaaatttgaaacgaaagctccattttctagcctgaaagtaatcattttgctctgtgccctgctggccttgaccatggccgcagttcccctgctgggtggcagcaagtatggcgcctcccctctctgcctgcctttgccttttggggagcccagcaccatgggctacatggtcgctctcatcttgctcaattccctttgcttcctcatgatgaccattgcctacaccaagctctactgcaatttggacaagggagacctggagaatatttgggactgctctatggtaaaacacattgccctgttgctcttcaccaactgcatcctaaactgccctgtggctttcttgtccttctcctctttaataaaccttacatttatcagtcctgaagtaattaagtttatccttctggtggtagtcccacttcctgcatgtctcaatccccttctctacatcttgttcaatcctcactttaaggaggatctggtgagcctgagaaagcaaacctacgtctggacaagatcaaaacacccaagcttgatgtcaattaactctgatgatgtcgaaaaacagtcctgtgactcaactcaagccttggtaacctttaccagctccagcatcacttatgacctgcctcccagttccgtgccatcaccagcttatccagtgactgagagctgccatctttcctctgtggcatttgtcccatgtctctaattaatatgtgaaggaaaatgttttcaaaggttgagaacctgaaaatgtgagattgagtatatcagagcagtaattaataagaagagctgaggtgaaactcggtttaaa

SEQ ID NO: 221366 - DNA, 1000 bp, Homo Sapiens
taaaacagggtacaaccccctgctgcacacgctagcatatctggaacctactatgaaaatgaaaggacccttataggtactcacagccctttcatgtaagtatgatctgatatttaggtcttcagaagcctgtaggtttcatttctatgaggaatcgaggagcgttacatcctgatatccttccaggctgcttaagaatggactgcttcgacactgaaagtgctagttaaatggattcatatgaagtgctttactcccaaccattgagttatttataatgtatttattaggggagggtaccttgagtctattatatatgcttcatcaaaacatcttgttcatgttttatgtttttaaaaaaggcatttgaatgaatgtttgactcaggtttgttaaattaacttcagtaactgcagtaccaaaaattacactcaactgatgaaaaaaacgaattgtatgatttaggaatcaaaaactaaaataagtggaattatgtatcttttctaaagttaaaaaagtaaaatattttattatgagttattataaaaattggttaattgtataggaagatgacagtatttttttcaagttatcataaaaagtaattcagatgacatttgagaagtaggggaaagggaatcatgttgacagttttagttctgtgaacactaatttgtgtgaagctattaaaatgattgtaaagttgactactgtaaatttcccataattatgtgtgtatatgtgtcatatgtatgtacatgtatatgtctaaaaattactttacacatgtgcctacatagacacaccaagaagtggatgtatataatatagaaagtatatagcaaagtaattttactctgataataaaaattgtttgacatgtattttgttatgaatagtttatcttccaaaagatattttgctctattttaaagtgtagaagaatacactgctaataaataataaaagttttattcaatttaaaaaaaaaaaaaaaaaa

SEQ ID NO: 221367 - DNA, 1000 bp, Homo Sapiens
aaaaggagagatggtgctggagtaaatatcattagtgccaaagggattcttctccaaaactttagatgataaaatggaatttttgcattattaaacttgagaccagtgatgctcagaagctcccctggcacaatttcagagtaagagctcggtgataccaagaagtgaatctggcttttaaacagtcagcctgactctgtactgctcagtttcactcacaggaaacttgtgacttgtgtattatcgtcattgaggatgtttcactcatgtctgtcattttataagcatatcatttaaaaagcttctaaaaagctatttcgccaggcacggtggctcatgcctataatcccagcactttgggaggccaaggtgggtggatcacctgaggtcaggagttcgagaccagcctggccaacacggtgaaaccccatctctactaaaaatgcaaaaattagccgggcgtggcggcacatgcctgtaatcccagctacatgggaggctgaggtgggagaattgcttgaacccaggaggcggaggcagaggctgcagtgacccaagattgtgccactgcactccaccctgggcaacagagcaagaccccatctcaaaaataaataaatatatataaaaaataaaaagctatttctagtttatttcactataaagttttgctttattaaaaagctaataaacagctattaatcacagtgtattagtatttgttacatttttgtatttcactatctttatactatataatatggtaacttgggtaccgggggaactttaaaatttcatctcaaaaataatttttaaaaagcctgaggtatgatatagcataaaagattgagatgaaaatatatttccctgtaagctgaattactcatttaaaaattttaacttctatatgggacccgaattagacactgctgaatcctgtacagccttactcataaataaagtacttactgaatttccaccattcaaaaaaaaaaaaaaa

SEQ ID NO: 221368 - DNA, 1000 bp, Homo Sapiens; identical to SEQ ID NO: 116062

SEQ ID NO: 221369 - DNA, 1000 bp, Homo Sapiens
cccacagcaggactacacgaaggcttgggaggagtactacaagaagcaagcgcaagtggccaccggagggggtccaggagctcccccaggctcccagccagactacagtgccgcctgggcggaatattacagacagcaggccgcttactacggacagaccccaggtcctggcggcccccagccgccgcccacgcagcagggacagcagcaggctcaatgaatcgaatgaatgtgaacttcttcatctgtgaaaaatcttttttttttccattttgttctgtttgggggcttctgttttgtttggcgagagagcgatggtgccgtggggagtactggggagccctcgcggcaagcagggtgggggggacttgggggcatgccgggccctcactctctcgcctgttctgtgtctcacatgctttttctttcaaaattgggatccttccatgttgagccagccagagaagatagcgagatctaaatctctgccaaaaaaaaaaaaaacttaaaaattaaaaacacaaagagcaaagcagaacttataaaattatatatatatatattaaaaagtctctattcttcaccccccagccttcctgaacctgcctctctgaggataaagcaattcattttctcccaccctcggccctcttgtttttaaaataaacttttaaaaaggaaaaaaaaaagtcactcttgctatttcttttttttagttagaggtggaacattccttggaccaggtgttgtattgcaggaccccttcccccagcagccaagccccctcttctctccctcccgccctggctcagctcccgcggccccgcccgtcccccctcccaggactggtctgttgtcttttcatctgttcaagaggagattgaaactgaaaacaaaatgagaacaacaaaaaaaattgtatggcagtttttactttttatcgctcgtttttaacttcacaaataaatgataacaaaacctcaaaaaaaaaaaaaaaaaa

SEQ ID NO: 221370 - DNA, 1000 bp, Homo Sapiens; identical to SEQ ID NO: 116064

SEQ ID NO: 221371 - DNA, 1000 bp, Homo Sapiens
ctcgtgctgcccccgacgcgggaggttcacctcatcctctccttcgacttcagtgccggagatcctttcgagaccatccgggctaccactgactactgccgccgccacaagatcccctttccccaagtagaagaggctgagctggatttgtggtccaaggcccccgccagctgctacatcctgaaaggagaaactggaccagtggtgatacattttcccctgttcaacatagatgcctgtggaggtgatattgaggcatggagtgacacatacgacacattcaagcttgctgacacctacactctagatgtggtggtgctactcttggcattagccaagaagaatgtcagggaaaacaagaagaagatccttagagagttgatgaacgtggccgggctctactacccgaaggatagtgcccgaagttgctgcttggcatagatgagcctcagcttccagggcactgtgggcctgttggtctactagggccctgaagtccacctggccttcctgttcttcactcccttcagccacacgcttcatggccttgagttcaccttggctgtcctaacagggccaatcaccagtgaccagctagactgtgattttgatagcgtcattcagaagaaggtgtccaaggagctgaaggtggtgaaatttgtcctgcaggtccctcgggagatcctggagctggagcatgagtgtctgacaatcagaagcatcatgtccaatgtccagatggccagaatgaatgtgatagttcagaccaatgccttccactgctcctttatgactgcacttctagccagtagctctgcacaagttagctctgtagaagtaagaacttgggcttaaatcatgggctatctctccacagccaagtggagctctgagaatacaacaagtgctcaataaatgcttgctgattgactgatgaaaaaaaaaaaaaaaaaaaaaaaaaaaaaaaaaaaaaaaaaaaaaaaaaaaaaaaaaaaaaaaa

SEQ ID NO: 221372 - DNA, 1000 bp, Homo Sapiens
aggggatgtgcacaaaaagaaagaaatcatccaagatgtgaccttgcatgacttggatgtggctaatgcgcggccccaggggggacaagatatcctgtccatgatgggccagctaatgaagccaaagaagacagaaatcacagacaaacttcgaggggagattaataaggtggtgaacaagtacatcgaccagggcattgctgagctggtcccgggtgtgctgtttgttgatgaggtccacatgctggacattgagtgcttcacctacctgcaccgcgccctggagtcttctatcgctcccatcgtcatctttgcatccaaccgaggcaactgtgtcatcagaggcactgaggacatcacatcccctcacggcatccctcttgaccttctggaccgagtgatgataatccggaccatgctgtatactccacaggaaatgaaacagatcattaaaatccgtgcccagacggaaggaatcaacatcagtgaggaggcactgaaccacctgggggagattggcaccaagaccacactgaggtactcagtgcagctgctgaccccggccaacttgcttgctaaaatcaacgggaaggacagcattgagaaagagcatgtcgaagagatcagtgaacttttctatgatgccaagtcctccgccaaaatcctggctgaccagcaggataagtacatgaagtgagatggctgaggttttcagcagcaagagactccccaggtgtgcctggcctgggtccagcctgtgggcgcttgcccctgggcttggggctgccgtccccactcaggcgtgggctgcagcgctgtcagttcagtgtggaaagcatttctttttaagttatcgtaactgttcctgtggttgctttgaaagaacccttccttacctggtgtgttttctataaatcttcataggttattttgattcttctctctctctctctaagttttttaaaaataaacttttcagaacagttaaaaaaaaaaaaaa

SEQ ID NO: 221373 - DNA, 1000 bp, Homo Sapiens
tgagacctgcctcagcctccagccggccagctcttctctagacagctacacagccgtcaaccaggcccagctcaacgcagtgacctcattaacgcccccatcgtcccctgagctcagccgccatctggtcaaaacctcacaaactctctctgccgtggatggcacggtgacgttgaaactggtggccaagaaggctgctctcagctccgtaaaggtgggaggggtcgcaacagctgcagcagccgtgacggctgcgggggccgttaagagtggacagagcgacagtgaccaaggagggctaggggctgaagcatgtcccgaaaacaagaagagggttcaccgctgtcagtttaacgggtgccggaaagtttatacaaaaagctcccacttaaaggcccaccagaggactcacacaggtgagaagccttataagtgctcatgggagggatgtgagtggcgttttgcacgaagcgatgagctcacgaggcactacaggaaacacacaggtgcaaagcccttcaaatgcaaccactgcgacaggtgtttttccaggtctgaccatcttgccctccacatgaagagacatatctaaaaaaccgaaaggccagagttgccatggcatcggctagtgtctaaaggaaacgccatgaggcagggggctggacttcaggcggggacccattgcctcgcagaagaaagctctcacttataaacctctgtacacacacacacacacacacacatatacacacactcacagacccacacacatacacactgtcatgcactcaactatatttaaaatatatacgtctattctttatgccttgccctagccagatggaagaagatgaagaaggaaaccaggtgaactcagcaaggcagactggctgcttacttcagcactattggaattatttcccgctgttgccaatggaaatcaaagaaaatggatgtgacgtctgtgcaggtggacggcagtccgaggggcttatttcac

SEQ ID NO: 221374 - DNA, 1000 bp, Homo Sapiens
tgggatagtgggatttccagaaccacacttgaaacctttttttatcgtttttgtattttcatgaaaataccatttagtaagaataccacatcaaataagaaataatgctacaattttaagaggggagggaagggaaagtttttttttattatttttttaaaattttgtatgttaaagagaatgagtccttgatttcaaagttttgttgtacttaaatggtaataagcactgtaaacttctgcaacaagcatgcagctttgcaaacccattaaggggaagaatgaaagctgttccttggtcctagtaagaagacaaactgcttcccttactttgctgagggtttgaataaacctaggacttccgagctatgtcagtactattcaggtaacactagggccttggaaattcctgtactgtgtctcatggatttggcactagccaaagcgaggcacccttactggcttacctcctcatggcagcctactctccttgagtgtatgagtagccagggtaaggggtaaaaggatagtaagcatagaaaccattagaaagtgggcttaatggagttcttgtggcctcagctcaatgcagttagctgaagaattgaaaagtttttgtttggagacgtttataaacagaaatggaaagcagagttttcattaaatccttttaccttttttttttcttggtaatcccctaaaataacagtatgtgggatattgaatgttaaagggatatttttttctattatttttataattgtacaaaattaagcaaatgttaaaagttttatatgctttattaatgttttcaaaaggtattatacatgtgatacattttttaagcttcagttgcttgtcttctggtactttctgttatgggcttttggggagccagaagccaatctacaatctctttttgtttgccaggacatgcaataaaatttaaaaaataaataaaaactaattaagaaaaaaaaaaaaaaaaaaaaaaaaaaaaa

SEQ ID NO: 221375 - DNA, 1000 bp, Homo Sapiens; identical to SEQ ID NO: 116069

SEQ ID NO: 221376 - DNA, 1000 bp, Homo Sapiens
ggcagcctcacaggccaacttctaccccccacctcctgaatggctgcacgacaaatacgacaccacgggggagaaccttcgcatcccgccagctcagcccttggagtttgcccagttccccttcctgctgcgtggcctccagaagactgcagactttgtggaggccatcgagggggcccgggcagcatgcgcagaggccggccaggctggggtgcacgcctaccccagcggctcccccttcctcttctgggaacagtatctgggcctgcggcgctgcttcctgctggccgtctgcatcctgctggtgtgcactttcctcgtctgtgctctgctgctcctcaacccctggacggctggcctcatagtgctggtcctggcgatgatgacagtggaactctttggtatcatgggtttcctgggcatcaagctgagtgccatccccgtggtgatccttgtggcctctgtaggcattggcgttgagttcacagtccacgtggctctgggcttcctgaccacccagggcagccggaacctgcgggccgcccatgcccttgagcacacatttgcccccgtgaccgatggggccatctccacattgctgggtctgctcatgcttgctggttcccactttgacttcattgtaaggtacttctttgcggcgctgacagtgctcacgctcctgggcctcctccatggactcgtgctgctgcctgtgctgctgtccatcctgggcccgccgccagaggtgatacagatgtacaaggaaagcccagagatcctgagtccaccagctccacagggaggcgggcttaggtggggggcatcctcctccctgccccagagctttgccagagtgactacctccatgaccgtggccatccacccaccccccctgcctggtgcctacatccatccagcccctgatgagcccccttggtcccctgctgccactagctctggcaacctcagttccaggggaccaggtccagccactgggtga

SEQ ID NO: 221377 - DNA, 1000 bp, Homo Sapiens; identical to SEQ ID NO: 116071

SEQ ID NO: 221378 - DNA, 1000 bp, Homo Sapiens; identical to SEQ ID NO: 116073

SEQ ID NO: 221379 - DNA, 1000 bp, Homo Sapiens; identical to SEQ ID NO: 116074

SEQ ID NO: 221380 - DNA, 1000 bp, Homo Sapiens
aactatatactggtgtttaatagagaatgattgtcttccgagttttttggttccttttttaactgtgttaaagtacttgaaatgtattgactgctgactatattttaaaaacaaaatgaaataatttgagttgtattacagaggttgacattgttcagggatgggacaaagccttcttcaatccttttcatactacttaatgattttggtgcaggaacctgagattttctgatttatatttcatgatatttcacatttgctcttcacagcatgagcatgaagcccagtggcaccaaatggctgggtacaatcaagtgatattttgtagcacctcactatctgaaaggccatgagttttcagatgatttcattgagcttcattgcagcctgaaattttaaaaaagttgtgtaatacgccaaccagtcaagttgtgttttggccagagatttagatatgtccaatttcctggctcatttcattgtgctctatgggtacgtataaaaagcaagaattctgtttcctaggcaaacattgcaactcagggctaaagtcatccagtgaaacttttagagccagaagtaactttgtcccagtcctacaatgtgaaaagagtgaatagttgcctctttttagccattttcatggctggtacatattcgtacgcattacttttcagaatcaatacgcactttcagatattcttatttttattctcttaagtctttattaactttggagagagaaatgatgcatctttttattttaaatgaagtagatcaacatggtggaacaaaatgataaagaacagaaaacatttcaatatattactaataactttttccaatataaatcctaaaattcctataacatagtattttacagttttatgaagctttctattgtgacttttatggaattaagagatgaagaagatgagatattttagcatttatatttttcaaaattatatgtatacttaaaaataaagtaactttatgc

SEQ ID NO: 221381 - DNA, 1000 bp, Homo Sapiens; identical to SEQ ID NO: 116075

SEQ ID NO: 221382 - DNA, 1000 bp, Homo Sapiens
tcacaggttctgtgaaaagtgaaaggagaaatcttttggaagatgattcagatgaagaagaggacttttttctaaggggaccatctggaccaagatttggacctagaaatgataaaattaagcatgttcagaatcaagtggatgaagttattgatgtcatgcaagaaaatattacaaaggtaattgagagaggggagagactagatgaactacaggacaaatcagaaagcttatcggataatgcaacagcttttagcaacagatccaaacaacttcgaaggcaaatgtggtggcgtggatgcaaaataaaagccatcatggctttggttgctgctatccttttgctagtgattatcattcttatagtcatgaaataccgtacttgatttgatgacagagatcttcattaaacaagatctgggacagtaataaaagattgctgcataatttaaatgaaacctatgtgtatataactttcaaaacttctttttcaagaaactaagaggcaagtatcacttcaaattggaacgttgagaatgtccaattatcttctccctttctaacaaaatgttcttttaataattatgtttaaggcaaagagaactagcctctatttttccatatttcaaggatctaatttgaaactagatacttgccagttcattatttgtgtatataaacactgattataatatttcatattaatattttaatggcataaggacttgcattattgcattagggagcgggtcatgctgggggtcaggaagcctgtgtagagtaccaaattatatgctgaaagagatgcataaccattctgtcaatatttgcagaaatatagttcctttcatattacagttgttttgcaagcaatttccacatttataggtgtaacaaaagctaaatgttgtaaatgttgttgccctcaggtataactaaaaacattccagtaaatatatttttgactgtgtaaaaaaaaaaaaaaaaaaaaaaaaaaaaa

SEQ ID NO: 221383 - DNA, 1000 bp, Homo Sapiens
aggccgtgcagtacgaggagaagaacccctgccggaccctctgctgcttctgctgtccctgcctcaagtagcaggccggcccgggccgccaccgcccatcccagaccatggagcgcgctgggaaggacgcaccaaagccgggagctctgccctgcagggagttgccccaaccctttccggaactcagtctttagaaaagaaacgccaggttcaagaattgcaaaccagcctgtgcttggaaagatggttagttgataccgtccgatgattcttcagtaaagatagattcccacaaagttgtgcaatgtcattatatgacaccttgcactcttaccgtcttgacagaagccaagtaaggaactgaagttgtatctgactgtagggtgaatgtctgaggcctgcctcctaataaagactcaaggaggaagtcaattgggcatctgctaatagaatgaactcatgatggaaacttcagttcatttactttgtcctgaaaattccctggttctgttccattttgagcgaaattggccttgggaaaaaccacgttcttcctttccgattcttcatccggtctacgctatgcaattcctccccaaatatagatcttatttctgctcatttcccctacttattaaaatcacaccaaacacttactattttcttatctctttcactttttaaatatctttcaccaggttatattttggtattatttttccaaacatttttaagcactgaatatcgaacaagcactcaaattgaagtatcagtcatgttttgtgtatttttcgctgataaaaattatttaacatttatatttttacttgattacatatgcacatgtatgtaaatgtaaaatactaatattcactaatatatgtacataatgatcaattggtttaacttcttttatgtaagtatggtatataaatttcaagacgaaaaaaaaaaaaaaaaaaaaaaaaaaaaaaaaaaaaaaaaaaaaaaaaaaaaaaaa

SEQ ID NO: 221384 - DNA, 1000 bp, Homo Sapiens
tcttcccgtctgtctacctggacgagacacttgcttcctcccgccatggccgcaactttgtgagcttccgtgttcaggaggcccttcgtgtggctcgcacccaccatgccaaccatgcactcccagtctacgtcttcacacgacccacctacagccgcaggctcacggggcttagtgagatggacctcatctctaccattggcgagagtgcggccctgggcgcagctggtgtcatcctctggggtgacgcggggtacaccacaagcacggagacctgccagtacctcaaagattacctgacacggctgctggtcccctacgtggtcaatgtgtcctgggccacccaatattgcagccgggcccagtgccatggccatgggcgctgtgtgcgccgcaaccccagtgccagtaccttcctgcatctcagcaccaacagtttccgcctagtgcctggccatgcacctggtgaaccccagctgcgacctgtgggggagctcagttgggccgacattgaccacctgcagacacacttccgctgccagtgctacttgggctggagtggtgagcaatgccagtgggaccataggcaggcagctggaggtgccagcgaggcctgggctgggtcccacctcaccagtctgctggctctggcagccctggcctttacctggaccttgtaggggtctcctgcctagctgcctagcaagctggcctctaccacaagggctctcttaggcatgtaggaccctgcagggggtggacaaactggagtctggagtgggcagagcccccaggaagcccaggagggcatccataccagctcgcacccccctgttctaagggggaggggaagtccctgggaggccccttctctccctgccagaggggaaggagggtacagctgggctggggaggacctgaccctactcccttgccctagatagtttattattattattattttggggtctcttttgtaaattaaacataaaacaattgc

SEQ ID NO: 221385 - DNA, 680 bp, Homo Sapiens
gcccacgtggagaacgccagggagctgtgagagtgtgcagtcgcgttcctgctgtccggacacttttttcctctactgagactcatctggtagatccgcaggccagtcctcccaggggctgaagttgtgaaatatgggttttctaagaagattaatctatcggcgtagaccaatgatctatgtagaatcttctgaggagtccagtgatgagcaacctgacgaagtggaatcaccaactcaaagtcaggattctacacctgctgaagagagagaggatgagggagcatctgcagctcaagggcaggagcctgaagctgatagccaggaactggttcagccaaagactgggtgtgagcttggagatggtcctgataccaagagggtgtgcctgcgaaatgaagagcagatgaaactgcccgcagaagggccagagcctgaagcggatagccaggaacaggttcacccgaagactgggtgtgagcgcggagatggtcctgatgtccaggagttgggcctgccaaatccagaggaggtgaaaacacctgaggaagatgaagggcaatcacagccttaaaagaagacacgctgaaatggttcaggctgctcctgtgttggaaatttgaccattaaaattctcccaataaagctttacagccttctgcaaaaaaaaaaaaaaaaaa

SEQ ID NO: 221386 - DNA, 1000 bp, Homo Sapiens
ccctctctgaacaggagctcttggactgtgacaagatggacaaggcctgcatgggcggcttgccctccaatgcctactcggccataaagaatttgggagggctggagacagaggatgactacagctaccagggtcacatgcagtcctgcaacttctcagcagagaaggccaaggtctacatcaatgactccgtggagctgagccagaacgagcagaagctggcagcctggctggccaagagaggcccaatctccgtggccatcaatgcctttggcatgcagttttaccgccacgggatctcccgccctctccggcccctctgcagcccttggctcattgaccatgcggtgttgcttgtgggctacggcaaccgctctgacgttcccttttgggccatcaagaacagctggggcactgactggggtgagaagggttactactacttgcatcgcgggtccggggcctgtggcgtgaacaccatggccagctcggcggtggtggactgaagaggggcccccagctcgggacctggtgctgatcagagtggctgctgccccagcctgacatgtgtccaggcccctccccgggaggtacagctggcagagggaaaggcactgggtacctcagggtgagcagagggcactgggctggggcacagcccctgcttccctgcaccccattcccaccctgaagttctgcacctgcacctttgttgaattgtggtagcttaggaggatgtcggggtgaagggtggtatcttggcagttgaagctggggcaagaactctgggcttgggtaatgagcaggaagaaaattttctgatcttaagcccagctctgttctgcccccgctttcctctgtttgatactataaattttctggttcccttggatttagggatagtgtccctctccatgtccaggaaacttgtaaccacccttttctaacagcaataaagaggtgtccttgtaaaaaaaaaaaaaaaaaaaaaaaaaaaaaa

SEQ ID NO: 221387 - DNA, 1000 bp, Homo Sapiens
tcctggcattctggtaccttcacccagcctgagtgccctggagagggaacaggaaatgctgatctctacccctgggtgagaccagaacctcagggctgatactgttgagtggcttcctcggtttactctgtgtactgtgaaagtattttcatattttttctgtgtgccagagtgaaaaaggacagcttctgagtgtggtaattgtgcctctagcacccagcctttcaaagcccacctgaaacctgggggtggatgaaagaactagaatagaagactgaagctgggtaggccgctcagtgtccactggcattttgctaaaccgacaaggaaggctgtgtgcttagctctccccagagggagggcgagaagggtgtggtgatggtcaatctggctgtcggaacagattctggtgtcttgggctgataacagtgttgttgattctgattgtgaatcccctcaactctagcagacacatacacacccctgaaatggggctgcagagcaggctgtctcagccttgccactgtcggcatctcggcctgggtaattctgttgtggggactgtcctgttccttgtaggatgtttagtagcatccctgcccccacctactagatgccaggggcactgttctccccagccccccgccccagttgtgacaatagtctctaaacattgtcaaatggtccaaggaaaggggaaaattgccccggttgagaagagcactgctgtaaagtaatgagcctcggctctcctgtctgcacctgtccggttactacttggccaccacgcagccttggctcctacagcccaaaagggagaatggagggaggctccaggctttgctggaggggcctgggtgagttctgtttgctccttgtaccaccatccaaatggtgttatcaaatctcttagattccaaagaggttgaataattaatgttcaaaggcaagagggcaaggcattttttaacactttttaaaataaaaatttataccacaa

SEQ ID NO: 221388 - DNA, 1000 bp, Homo Sapiens
gtcaggtggtgtctcgagaaggccaaggaaggcaggagactctattccgatgtataagaagtatgccctcccacccggaccgggcctacaacagctgctatagcgcaggtgtcttccatttacaccaaggggatattctgagtgtcataattccccgggcaagggcgaaacttaacctctctccacatggaaccttcctggggtttgtgaaactgtgattgtgttataaaaagtggctcccagcttggaagaccagggtgggtacatactggagacagccaagagctgagtatataaaggagagggaatgtgcaggaacagaggcgtcttcctgggtttggctccccgttcctcacttttcccttttcattcccaccccctagactttgattttacggatatcttgcttctgttccccatggagctccgaattcttgcgtgtgtgtagatgaggggcgggggacgggcgccaggcattgtccagacctggtcggggcccactggaagcatccagaacagcaccaccatctagcggccgctcgagggaagcacccgccggttggccgaagtccacgaagccgccctctgctagggaaaacccctggttctccatgccacacctctctccaggtgccctctgcctcttcaccccacaagaagccttatcctacgtccttctctccatctatcggaccccagtttccatcactatctccagagatgtagctattatgcgcccgtctacagggggtgcccgacgatgacggtgccttcgcagtcaaattactcttcgggtcccaaggtttggctttcacgcgctccattgccccggcgtggcaggccattccaagcccttccgggctggaactggtgtcggaggagcctcgggtgtatcgtacgccctggtgttggtgttgcctcactcctctgagctcttctttctgatcaagccctgcttaaagttaaataaaatagaatgaatgataaaaaaaaaaaaaaa

SEQ ID NO: 221389 - DNA, 1000 bp, Homo Sapiens
tgggcgtccatcttcacactgaggccagggcacgccatgcctggcagcttacccagggcgccacagtcttgggactcttccgggtgacccccgaaatcccagccggactcccttcaccgaggtcggaataacgcccagcctgggtgcagcccacctggacagagtccgaatcctactccatccttcatggagacccctggtgctgggtccctgctgctttctctacctcaaggggcttggcaggggtccctgctgctgacctccccttgaggaccctcctcacccactccttccccaagttggaccttgatatttattctgagcctgagctcagataatatattatatatattatatatatatatatatttctatttaaagaggatcctgagtttgtgaatggacttttttagaggagttgttttggggggggggtcttcgacattgccgaggctggtcttgaactcctggacttagacgatcctcctgcctcagcctcccaagcaactgggattcatcctttctattaattcattgtacttatttgcctatttgtgtgtattgagcatctgtaatgtgccagcattgtgcccaggctagggggctatagaaacatctagaaatagactgaaagaaaatctgagttatggtaatacgtgaggaatttaaagactcatccccagcctccacctcctgtgtgatacttgggggctagcttttttctttctttcttttttttgagatggtcttgttctgtcaaccaggctagaatgcagcggtgcaatcatgagtcaatgcagcctccagcctcgacctcccgaggctcaggtgatcctcccatctcagcctctcgagtagctgggaccacagttgtgtgccaccacacttggctaactttttaatttttttgcggagacggtattgctatgttgccaaggttgtttacatgccagtacaatttataataaacactcatttttcctcaaaaaaaaaaaaaaaa

SEQ ID NO: 221390 - DNA, 1000 bp, Homo Sapiens
tacatctggggaacaaaggctgcagggtctgacaagttctgctatgaaaagctgaatacagaaggcactgagaagggaaactgcgggaaggatggagaccggtggattcagtgcagcaaacatgatgtgttctgtggattcttactctgtaccaatcttactcgagctccacgtattggtcaacttcagggtgagatcattccaacttccttctaccatcaaggccgggtgattgactgcagtggtgcccatgtagttttagatgatgatacggatgtgggctatgtagaagatggaacgccatgtggcccgtctatgatgtgtttagatcggaagtgcctacaaattcaagccctaaatatgagcagctgtccactcgattccaagggtaaagtctgttcgggccatggggtgtgtagtaatgaagccacctgcatttgtgatttcacctgggcagggacagattgcagtatccgggatccagttaggaaccttcacccccccaaggatgaaggacccaagggtcctagtgccaccaatctcataataggctccatcgctggtgccatcctggtagcagctattgtccttgggggcacaggctggggatttaaaaatgtcaagaagagaaggttcgatcctactcagcaaggccccatctgaatcagctgcgctggatggacaccgccttgcactgttggattctgggtatgacatactcgcagcagtgttactggaactattaagtttgtaaacaaaacctttgggtggtaatgactacggagctaaagttggggtgacaaggatggggtaaaagaaaactgtctcttttggaaataatgtcaaagaacacctttcaccacctgtcagtaaacgggggagggggcaaaagaccatgctataaaaagaactgttccagaatcttttttttccctaatggacgaaggaacaacacacacacaaaaattaaatgcaataaaggaatcattaaaaaaaaaaa

SEQ ID NO: 221391 - DNA, 1000 bp, Homo Sapiens; identical to SEQ ID NO: 116085

SEQ ID NO: 221392 - DNA, 1000 bp, Homo Sapiens; identical to SEQ ID NO: 116088

SEQ ID NO: 221393 - DNA, 1000 bp, Homo Sapiens
cagtttactccctcccacagttgctgggcccctcctgctcctgggaggctgagggtctgcactgcagatgctcctttcgagcccggccggccccctccctgtgctggcggcttgaggagaagccgctggaggggaacagcagccagggctcattcaaggtcaactccagctcagctgggccctgggccaacagctccctgatcctccacggggggctcagctccgacctcaaagtcagctgcaaggcctggaacatctatgggtcccagagcggctctgtcctgctgctgcaagggagatcgaacctcgggacaggagtggttcctgcagcccttggtggtgctggtgtcatggccctgctctgtatctgtctgtgcctcatcttctttttaatagtgaaagcccgcaggaagcaagcagctgggagaccagagaaaatggatgatgaagaccccattatgggtaccatcacctcgggttccaggaagaagccctggccagacagccccggagatcaagcatctcctcctggggatgcccctcccttggaagaacaaaaggagctccattatgcctcccttagtttttctgagatgaagtcgagggagcctaaggaccaggaggccccaagcaccacggagtactcggagatcaagacaagcaagtgaggatttgcccagagttcagtcctggctggaggagccacagcctgtctgggggaaaggacaagtcagggaccacttgctgaagcacgaagagcccttgtggcaatgttaacattaactgatgtttaagtgctccaagcagagcagaaagaaaacagatgatggaattagagaggtgggctcaaatctaggccctggcactgtcatcaagcaattcactgcatccctctgtgcctcagtttcccattctgtaaatcagagatcatgcatgctacctcaaaggttgttgtgaacattaaagaaatcaacacatggaaatcaaaaaaaaaaaaaaa

SEQ ID NO: 221394 - DNA, 1000 bp, Homo Sapiens
atgtattatacacttgaacatgtgtttgtatatctttaaaattttcctttatgttccattccataggaaaacacacatatgcacacaaaactcagttatctgtggggaaagtggtagtaataattgagattcatcaataatcatataatttcactatagacattacttgcattatctcctatcagtccttctaacaaaacttcaattaccagatgaactgactttagttttcatcttattttttgtccacatgctggtgatgctgagaaacaataattggcccaaatgcagacatcaagaagcaggcaggaaaatggaaaaactgagataatacacaggtgataaacagtttcgagaaaataaaaattggctagaatctcaagttatgtgtttctatattggtataagcatataagtgaaaagtcttataagtgtaatagagaaaagatttgtcagtgtgtttttttaaatgaaataactagtctgtgctactttatgtcaatataaaaattggtaaactagaagtaacttgtccacaaccctcagttatgatacttatgtgcgtgtttttttttccaaagtttttcccaaggagaagatacaaatatatggtagctattgtttaaaaatgattgatttacttgcagatttttcagaggatgttatgtctttgtcattcattaaatgttcaaaattgtagttttaccaaatctgaagtgccatcagttataagaatcaccattattttatgttccattaagaaaaacacaataaaacatgacactgctttttttgttacttgaaattttcatatttattggagagctcttttagatgtttttaaatacagatttttatttaaccctcttgcatatacatataaaataacaaaaaaataaaatattgagatatcatcaagaaatttctacagcttcacattcaaactcttcagcactttcagagctattgatatgcatatgtccacctagtaccatcttct

SEQ ID NO: 221395 - DNA, 1000 bp, Homo Sapiens
tcattttacatttgcttttccaaaatgtattaaattggaatttttttaatcctttatatacaaaaaaatacgatcactcagtgtgtgtttctcttccccttcttagtcagcacacccagtcctttattttattctattctatttattttattttaataagtacttagcctcttctgacttctcaaaggacaatcggatacatatcttcctgaaaagaagtagttaaagttcccttgggaactagctacttggtagttacaattcccaaatgcagaacttggtcttttcatgttaaaagccttaatctcatttgggtactcaaaagagaaatcagagtttattctggttaacttgagaagccaagaaagatcatttttagcaagtatgccttccatccttggcagaggcttcccagcatcctaggctcagcttaccgggtgataggccccataagacacacacatgagcagggtgagaaatgcttgctttatagctgctccaccctcatctccagagattttgtgtctatggttgtgggtctggaaacctggcaggaaccacttctagagtacctttgcctaaactcttttagaattgaggccccaactttgatggcacatttaatacccaatttcttccataatagatatttttaatagcaggacagatggcactgattagatcaagaactatttggaagtgcctcttatgtttttttcctgcattctgtacataaagttttaagtggcaggtccagatatgtaaaatcatttctctctattttccagctggttttgttaatgattctctaggacagcaggtaaatgagttaagttgttggcttggggcaagtgaagtttgtgactatgcttgatttaataagctgagagtctcttgtttgtctgtcaaggtgccttcctctgctgaagccttacctccttctcacccagtaacggttaactcttctcttgtgtatatgcaaataaacctattattcact

SEQ ID NO: 221396 - DNA, 1000 bp, Homo Sapiens
cccaatgaatagtcctaggctggacagcaatgggctgcaattaggcagataaagacatcagtcccagtaaatgaatccatagactcatctagcaccaactaccattagcactatgttaggagctgcaaggccccaaagtagaagatgtgcataatgtctgctcttgtgtagctcaggagacaattccagcacagacactacagttaacgctgaactgcagctgcaagtaatagcatgaacagtcagaaaaataccttatgagggggcagggctgaagctgggccttgaaggatggatgaaatttggatagagaatgaggaagacagagggcctccaagtgagagaagcatgaaaaatgagcaggggcctggatcagtggggtgtattcagagcacctctccagatgcaccatgcatgctcacagtcccttgcctatgtgtggcagagtgtcccagccagatgtgtgcccccaccccatgtccatttacatgtccttcaatgcccacctcaaaaggtacctcttctgtaaagctttccctggtatcaggaatcaaaattaatcagggatcttttcacactgctgttttttcctctttggtccttctatcactaaaactcatctcattcagccttacagcataactaattatttgttttcctcactacattgtacatgtgggaattacagataaacggaagccggctggggtggtggctcacgcctgtaaccccaacactttgggaggccaaggcaggcggatcacctgaggtcaggagttcgagattagtctggccaacatggtgaaaccccatctctactaaaaatacgaaattagccaggtgtggtggcacacatctgtagtcccagctactctggaggctgagacaggagaatcgcttgaacccaggaagtggaggttgcagtgagctgagatcacaccactgcactccagcctgggagagagagagtgagtctccatctcaaaaaaaaaaaaaaaaa

SEQ ID NO: 221397 - DNA, 1000 bp, Homo Sapiens; identical to SEQ ID NO: 116092

SEQ ID NO: 221398 - DNA, 1000 bp, Homo Sapiens
ggtacagattaggtttgtcccagtcagaaataaaatttgataaacattcctgttgatgggaaaagcccccagttaatactccagagacagggaaaggtcagcccgtttcagaaggaccaattgactctcacactgaatcagctgctgactggcagggctttgggcagttggccaggctcttccttgaatcttctcccttgtcctgcttggggttcataggaattggtaaggcctctggactggcctgtctggcccctgagagtggtgccctggaacactcctctactcttacagagccttgagagacccagctgcagaccatgccagacccactgaaatgaccaagacaggttcaggtaggggtgtgggtcaaaccaagaagtgggtgcccttggtagcagcctggggtgacctctagagctggaggctgtgggactccaggggcccccgtgttcaggacacatctattgcagagactcatttcacagcctttcgttctgctgaccaaatggccagttttctggtaggaagatggaggtttaccggttgtttagaaacagaaatagacttaataaaggtttaaagctgaagaggttgaagctaaaaggaaaaggttgttgttaatgaatatcaggctattatttattgtattaggaaaatataatatttactgttagaattcttttatttagggccttttctgtgccagacattgctctcagtgctttgcatgtattagctcactgaatcttcacgacaatgttgagaagttcccattattatttctgttcttacaaatgtgaaacggaagctcatagaggtgagaaaactcaaccagagtcacccagttggtgactgggaaagttaggattcagatcgaaattggactgtctttataacccatattttccccctgtttttagagcttccaaatgtgtcagaataggaaaacattgcaataaatggcttgattttttaaaaaaaaaaaaaaaaaaaaaaa

SEQ ID NO: 221399 - DNA, 1000 bp, Homo Sapiens; identical to SEQ ID NO: 116093

SEQ ID NO: 221400 - DNA, 1000 bp, Homo Sapiens
ggagtgggttgtttttcatagctagataagatcttttccaaagtttttcttagaaccaaccaaaaaacaatccgagtaggcccaagaatttgataatgctggatgccttgcagacatcattcagtttctaatattgggcaacaattattattaaatgaattatttctgtagttggaatctgtaccttctgaacctctacaccaataactgctgcaggtgtgattttggtctgtcacactgtacatctatcataatgtgccctgtatctattggcagtgaccttggaaaatctggccaagcctaggggtttccttttccatttgccaagttccattgtgccaggactgccgtgctccactgagctcctctgtcacaccccattcttgcccctcactgggcaggccatggcctacagcttgcagggagtaaagcaggcccgcctccctttcttcccatccacatactcctcttctgctttccagtgactccaccagtttgatgtgggaagtgttagcttcctttccttcttccatcccttcttccatctttccagctgtcaaatccaatccagtctctaacctaaatgcagatcatttatttaaaagtaccaaacataacccagagtatgtggaatatgggcaacatatatatagccttctgtatttaacgatcttctgcttcttaaccgtaccagttttctatttataactcttatctatccatgatgttttaaagtctccacttgctgttatttacaaacgacagtgcattcagcagcccagtgccgtgagccctgacagatgccgtatttctgagtgcttccatgtgaatgctgccctcctgtagcatgtgtccaagtggacatagccactaaccaactagttacctttggactgcaacaaaaaatgtgaaaatgaagatttatttcttttaatttacttaaaaagaaacctctgtgctagcaataaagcatttatattgtgtaaaaaaaaaaaaaaaa

SEQ ID NO: 221401 - DNA, 1000 bp, Homo Sapiens
ggatgcccgccagagtccagatacctttagcctgatgatggcaaaatctgaacacaacccatctacaagtggctgcagtagcgaccagtcttcgaaagtggacacacacaaagaactgataaaaacactaaaggagctgaaggtccacctccctgcagacaagaaggccaagggcaaggccagtacgctggccaccttgaagtacgccctcaggagcgtgaagcaggtgaaagccaatgaagagtattaccagctgctgatgtccagcgagggtcacccctgtggagcagacgtgccctcctacaccgtggaggagatggagagcgttacctctgagcacattgtgaagaatgccgatatgtttgcggtggccgtgtccctggtgtctgggaagatcctgtacatctctgaccaggttgcatccatatttcactgtaaaagagatgccttcagcgatgccaagtttgtggagttcctggcgcctcacgatgtgggcgtgttccacagtttcacctccccgtacaagcttcccttgtggagcatgtgcagtggagcagattcttttactcaagaatgcatggaggagaaatctttcttttgccgtgtcagtgtccggaaaagccacgagaatgaaatccgctaccaccccttccgcatgacgccctacctggtcaaggtgcgggaccaacaaggtgctgagagtcagctttgctgccttctgctggcagagagagtgcactctggttatgaagcccctagaattcctcctgaaaagagaatttttacaaccacccatacaccaaattgtttgttccaggatgtggatgaaagtcctgcagtcaggcgggcagcctttcgactattctcccattcggtttcgcgcccggaacggagagtacatcacgttggacaccagctggtccagcttcatcaacccatggagcaggaaaatctccttcatcattgggaggcacaaagtcagggtgggccctttgaatga

SEQ ID NO: 221402 - DNA, 1000 bp, Homo Sapiens; identical to SEQ ID NO: 116096

SEQ ID NO: 221403 - DNA, 1000 bp, Homo Sapiens; identical to SEQ ID NO: 116100

SEQ ID NO: 221404 - DNA, 1000 bp, Homo Sapiens; identical to SEQ ID NO: 116102

SEQ ID NO: 221405 - DNA, 1000 bp, Homo Sapiens
tcagcattaagctgttcctgttcagtaataaaaccggtcactgatgggaaaactgccaatatagaaaaataaaaatctcttttccactccattgtcgtataggcatgtaaacagcctctttttgatactggaggaacacttgatggagtgtgagccacctaagatctcggtttgccaaaattcatttctaattaaccttactaattatactactttgttaggattttcacattcttggcttaatcattttcattcctaaagaaaaatatcttggcctaaacctcagttattacatgtaatttgatgaggtattttttccttttttcttttttttttttttgagacagtcttgctctatcgcccaggctggagtgcagtggcgcattctaggctcactgcaacttctgcctcccatgcttacgtgatcctctcacctcagcctctcaagtaatatagctgagactacaagtgtgtgccaccatgcctcactaatttttgtattatttttgtagagacggtgttttgccatgttggccaggctggtcttgaactcctggactcaagcaacctacccagcgtggcctcccaaagtgctgggattacagacacgagccacctcacctagcctgatgagatttttaaaaaatattttctctgtacttttcattctcttttaatgaggaccaatgtacagttgaaataactggaacaaattatttttggtgtgtgtgacaattctgtttttaatgctatttgaacaagtgggccattagccagatttgtctttttgttgtaaaacaaaatttgactaattttacatgtttataaatcttatgctctcactgtttgtttttatttaaattacaattttatctgtttcctgacattgtctcctatatatttctattattaattgcaaaaacatagaaatggaaattttgctatcaacaataaaatttttttaaagtaaaaaaaaaaaaaaaaaaaaaaaaaaaaaaaa

SEQ ID NO: 221406 - DNA, 1000 bp, Homo Sapiens
atcgacttcatgagatggacagacaggtggctgcagtccgagaagggatgtcctggattgttcctgtgccgctgctgtccctcctcacagcaaaacaactggagcagatggtgtgtgggatgcccgagatctctgtggaagtcttgaagaaagtggtgcggtaccgtgaggtggatgagcagcatcagctggtgcagtggttctggcacacgctggaagagttctccaatgaggagcgggtgcttttcatgaggtttgtgtcaggaagatctcgactaccagccaacactgctgacatttctcagagatttcaaatcatgaaggttgataggccttacgacagtctgcctacctcacagacctgcttcttccagctgaggctgcccccgtactccagccagctggtcatggccgagcgcctgcgctatgccatcaacaactgccgctcaatcgacatggacaactacatgctctcgagaaacgtggacaacgccgagggctccgacactgactactgaccgtgcgggtgctctcaccctcccttctctccctcaataatgctcacttctgatttgatgttgatatacttttatggtaactacatagatgttataagaacataaaccaacattataaacaatggccacatttagttactctaaatgtaacaaagaaattagatgtttttatttttctgtgattgtacaaaaacaacaaaaacgaagtgctctcagtcaggtttttccctccatatttttggtcacttttgataagtttgcatgaaaccattttggtgcatttttagttgggaatggtacatttttgtaaatccacccagtgaacatgaaattgtacattgtgtataattgttcattagaaaggacagttttacatgaatattcatatatttattttgttttaatttgaattgcctgttcagggttccttatgcagagaaataaagcagattcaggaattggaaaaaaaaaaaaaaaaaaaa

SEQ ID NO: 221407 - DNA, 1000 bp, Homo Sapiens; identical to SEQ ID NO: 116106

SEQ ID NO: 221408 - DNA, 1000 bp, Homo Sapiens; identical to SEQ ID NO: 116107

SEQ ID NO: 221409 - DNA, 1000 bp, Homo Sapiens
tctgaaccagaaaatgttgatgatttctggagcagtgccctacaagcaaagtctgcgggtgtgaaaacatctcgctttgcttcattccctgaatacttggtagtgcagataaagaagttcacttttggtcttgactgggttcccaaaaaatttgatgtttctattgatatgccagacctacttgatatcaaccatctccgagccagggggttacagccaggagaggaagaacttccagacatcagcccccccatagtcattcctgatgactcaaaagatcgcctgatgaaccaattgatagacccatcagacatcgatgagtcatcagtgatgcagctggccgagatgggtttcccgctggaagcatgtcgcaaggctgtgtacttcactggaaatatgggcgccgaggtggccttcaactggatcattgttcacatggaagagccagattttgctgagccgctgaccatgcctggttatggaggggcagcttctgctggagcctctgtttttggtgcttctggactggataaccaacctccagaggaaatcgtagctatcatcacctccatgggatttcagcgaaatcaggctattcaggcactacgagcaacgaataataacctggaaagagcactggattggatctttagccaccctgagtttgaagaagacagtgattttgtgattgagatggagaataatgccaatgcaaacattatttctgaggccaagcccgaaggacctagagtcaaggatggatctggaacatatgagctatttgcattcatcagtcacatgggaacatccacaatgagtggtcattacatttgccatatcaaaaaggaaggaagatgggtgatttacaatgaccacaaagtttgtgcctcagaaaggccccctaaagacctgggctacatgtacttttaccgcaggataccaagctaaacctcaaatataaaaattggcgaaaagaagccatacgcctttttaatttgcc

SEQ ID NO: 221410 - DNA, 1000 bp, Homo Sapiens
actttccgtgtccttctgatacagttgatcagacccctgcccaccgcccaggccaggcctgtggtcatcaatgccccagttcacatccacctgcttctcttccaggctttgctgttccccagcagcctgcagaggccccacagacagcttgaggcccctcctgctgcctggccaagccccacacccgcagaccctccttcccatcctctgaaatgggaccctgtgtctgtcaccagcccaccctctgtgttcatgaacctgggctggagcttggggacccctccctgcccctggcttcctcttccatgttctgccctttcccacatgttggaggcttttccaacgtcttcagggacaggcggtaggaaccccggccctcgctctgcagctggtgcaaaagctgtggctgccaggtctgggccacatggcagcccagggggcaggagaagcccgggagaggcccactggctaccagactcagccctgagcagggaacagggcccagcttccaccggcagggagttgtgagcgccttcccaacaatgtgcccctcaccccttgatgcccatgctaatggtagccaccctggttcttgttgacttgagggacctggctgtcttccctgttcttcatcctttcttctcagtccctacctactgtttgtaaccacaagtgtctctgtgtgtgggtgggtgagggcccctctgcccagtggtgtgtctcctctccctccctccctcttctgccagtggcctgggggtgtccaggctcccatccatggcccagcccctctcccctctgtcttgatccccccctccctgcccctggcttcctcttccatgttctgccctttcccacacctttgttcctcaatagctgggggctgggactgaggcctcctgcaggtacctgccccccttcacacagcacctctcaatctcctattgcttgtcagcctgtgtgcgtgtggtgcaggaaataaaggatctataccctcctg

SEQ ID NO: 221411 - DNA, 1000 bp, Homo Sapiens; identical to SEQ ID NO: 116112

SEQ ID NO: 221412 - DNA, 1000 bp, Homo Sapiens
gtggattgcatagctggatacccatcatctgtttctctgattggaagctgctgttgtacagaaagacctgcatttcccccttgtctccagttctctcactactttttcctcctctgtgagtgaccatccaggcagtcaccataactgctggagtgtctgggattggtagctctctccaactgcctgcttgctctttacagcctctctctgtgactggaatctctccacctcatcgtatctaaggataacccagaaacatggggtgtcctaggtatgtttatctcgacactgaaccccctaggcttctgatgaatccagtgattagctaaatttgacatagaaagtaagaaggaatgtctactttgtattgtggtcctaatctaagatcaggagaatcctggaattgttatctgtctcttgctctgagatacagacttgttcataggtgtggggcctgattggaacaggatctgccattggtcacaataggtcaagggcttgttctgaaccctagttagcttcattcagagaaagaaacttcctacctggtcagctttttcagcttctccaacaaatgggagttgaggcagtaggagtgtggggttcttgggaagacgatggggccttgtattaaggagaaataatgaactatcttcttgattcttccattgagaaaagcatatgaatcctaggaaagggctcagcctgtgataggcattcaataaatactccaatgctgtcattcctttgtctacagcatccccaaacaatgtaccagtgatgggctacctgagctcatctagtcgccaagcagtatctcctgcttgctgctgctttactacattccagatgcccacctcatccaatttccagagccactatctctgctgtccactttccttcaggctctgtgaatacttcaacctgctgtgatttggggccgtttgtactctgcatgtattcaataaattcaattcagcaatagttaaaaaaaaaaaaa

SEQ ID NO: 221413 - DNA, 1000 bp, Homo Sapiens; identical to SEQ ID NO: 116115

SEQ ID NO: 221414 - DNA, 1000 bp, Homo Sapiens
agaggcctccctgggctccgcgccccgcagccctgccccccgcgaaggccccccgcctgtcctggcgtcccccgccggccacctgccggggggacgcacggcccgctggtgcagtggaagagcccggcggccgccgccgcagccttctcggcccgcgcccccgccgcctgcacccccatctgctcttccccgcgggggccgcgcggcgcgggctgggggcccgggcagccgcgctcgggcagcgggggcgcggggctgccgcctgcgctcgcagctggtgccggtgcgcgcgctcggcctgggccaccgctccgacgagctggtgcgtttccgcttctgcagcggctcctgccgccgcgcgcgctctccacacgacctcagcctggccagcctactgggcgccggggccctgcgaccgcccccgggctcccggcccgtcagccagccctgctgccgacccacgcgctacgaagcggtctccttcatggacgtcaacagcacctggagaaccgtggaccgcctctccgccaccgcctgcggctgcctgggctgagggctcgctccagggctttgcagactggacccttaccggtggctcttcctgcctgggaccctcccgcagagtcccactagccagcggcctcagccagggacgaaggcctcaaagctgagaggcccctaccggtgggtgatggatatcatccccgaacaggtgaagggacaactgactagcagccccagagccctcaccctgcggatcccagcctaaaagacaccagagacctcagctatggagcccttcggacccacttctcacagactctggcactggccaggcctcgaacctgggacccctcctctgatgaacactacagtggctgaggcatcagcccccgcccaggccctgtagggacagcatttgaaggacacatattgcagttgcttggttgaaagtgcctgtgctggaactggcctgtactcactcatgggagctggcccc

SEQ ID NO: 221415 - DNA, 1000 bp, Homo Sapiens; identical to SEQ ID NO: 116116

SEQ ID NO: 221416 - DNA, 1000 bp, Homo Sapiens
acatacttggcaagtgcaagacaaaatcgatgcaaacaatgtggcttacacaactgggaagctaagctttcacactgattatccagccctccatcatccacctggggttcagcttcttcactgcataaagcaaacagtcacagggggtgattcagaaattgtagatgggtttaatgtgtgccaaaaactaaagaaaaataatcctcaggcattccagattttgtcctctacctttgtggactttacagacattggagtggattactgtgatttttctgtacaatcaaaacataaaattatagagttagatgataaaggccaagtggttcgcatcaacttcaataacgcaactagggacacaatatttgatgtacctgttgaaagagttcagcctttttatgctgctctgaaggagtttgttgacctcatgaacagcaaagaatccaagtttaccttcaagatgaatccaggtgatgtgattacttttgataactggcgcttacttcatggccgacgtagctatgaagcaggaactgagatatcccgccatctagaaggagcttatgctgactgggatgtggtcatgtcaaggcttcgtatcttaaggcagagggtggagaatggaaactgaagtcacctgtagataattttaataagattccaatgaccatattttgtgagatatggcacattattcacagaccatgatctttgtgatttacatataatttccttaacaatgaacatgtaacttctctcacaagagtactctttactttgtaatcatatacaatgtcaactttttagatgtttcaccactcttttgcaaataaagcatcctttctgctctgttgcatgcctgctctaatttcttttgcccatatatgagtatctccagaatgtctacaaatagtttttgtagcaaatgaaaatttcttcaaataagccttttgtttcaaataaaacttgtctcaaaacatgcttcaaaaaaaaaaaaaaa

SEQ ID NO: 221417 - DNA, 1000 bp, Homo Sapiens
atgggctacaccgaagcaattgaagtgatccaggcagcctccagcccagtgaagaccacctctcaggcccactcgctgcctctctcgcctgcctccacaaggcagcaaatagacgagctccgagacagtgacagtgtctgcgacagcggcgtggagacatccttccgcaaactcagctttaccgagtctctgaccagtggtgcctcactgctaactctcaacaaaatgccccatgattatgggcaggaaggacctctagaaggcaaaatttagcctgctgacaatttcccacaccgtgtaaaccaaagccctaaaattccactgcgttgtccacaagacagaagctgaagtgcatccaaaggtgctcagagagccggcccgcctgaatcattctcgatttaactcgagaccttttcaacttggcttcctttcttggttcataaatgaattttagtttggttcacttacagatagtatctagcaatcacaacactggctgagcggatgcatctggggatgaggttgcttactaagctttgccagctgctgctggatcacagctgctttctgttgtcattgctgttgtccctctgctacgttcctattgtcattaaaggtatcacggtcgccacctggcattccttctgaccacagcatcattttgcattcaaattaagggttaagaaaagagatattttaaaatgagagtcacttgatgtgccattttaaaaaaaaaggcatattgctttttctaatgtggttatttctctgatttgcaaaaaaaaaaaaaaaaaaaaaatacttgtcaatatttaaacatggttacaatcattgctgaaaatggtattttcccccttttctgcattttgctattgtaaatatgttttttagatcaaatactttaaaggaaaaaatgttggatttataaatgctattttttattttacttttataataaaaggaaaagcaaattgatgacctcaaaaaaaaaaaaaaaaaa

SEQ ID NO: 221418 - DNA, 1000 bp, Homo Sapiens
tttcatttgctttggaagttttaatctctaacagtggacaaagttaccagtgccttaaactctgttacactttttggaagtgaaaactttgtagtatgataggttattttgatgtaaagatgttctggataccattatatgttccccctgtttcagaggctcagattgtaatatgtaaatggtatgtcattcgctactatgatttaatttgaaatatggtcttttggttatgaatactttgcagcacagctgagaggctgtctgttgtattcattgtggtcatagcacctaacaacattgtagcctcaatcgagtgagacagactagaagttcctagtgatggcttatgatagcaaatggcctcatgtcaaatatttagatgtaattttgtgtaagaaatacagactggatgtaccaccaactactacctgtaatgacaggcctgtccaacacatctcccttttccatgactgtggtagccagcatcggaaagaacgctgatttaaagaggtcgcttgggaattttattgacacagtaccatttaatggggaggacaaaatggggcaggggagggagaagtttctgtcgttaaaaacagatttggaaagactggactctaaattctgttgattaaagatgagctttgtctacttcaaaagtttgtttgcttaccccttcagcctccaattttttaagtgaaaatataactaataacatgtgaaaagaatagaagctaaggtttagataaatattgagcagatctataggaagattgaacctgaatattgccattatgcttgacatggtttccaaaaaatggtactccacatacttcagtgagggtaagtattttcctgttgtcaagaatagcattgtaaaagcattttgtaataataaagaatagctttaatgatatgcttgtaactaaaataattttgtaatgtatcaaatacatttaaaacattaaaatataatctctataataaaaaaaaaaaaaaa

SEQ ID NO: 221419 - DNA, 1000 bp, Homo Sapiens; identical to SEQ ID NO: 115080

SEQ ID NO: 221420 - DNA, 1000 bp, Homo Sapiens; identical to SEQ ID NO: 116797

SEQ ID NO: 221421 - DNA, 1000 bp, Homo Sapiens
tggtgtctcggggcggcctgttgggagatcttgcatccagcgacgtggccgtggaactgcccttcaccctaatgcaccccaagcccaaagaggaacccccgcatcgggaagttccagagaacgagacgccagtagataccaatctcatagaacttgacacaaatgatgacgacattgtatttgaggactttgctcgccagagactgaaaggcatgaaggatgacaaggaggaagaggaggatggtaccggctctccacagctcaacaacagatagacgggccggccctgcctccacgtggctccggctccactctcgtgcactcggatgcttactcgtcttcttcctgttctggtttcttttcccctttgttcttccagtttctaccagggggccccgtgggcttccagatcacggtgatgaacctctggcctcaggattggccccacatcaccacgccaacaggaccacagcgcactggctccaccccatctctgccatctccactcccctccttttcatgctgtctcccagaaaagctgccagggctctggccttggaattggacttgagatggggagcagacaggggaggatggggaatgtgggacacggtgtggtgggcatgagggcttggaggggtggggatgagggctcaagacacgagagaagatgtccacggtcccaggtggttaacaaagttctggcagctaaaagatgaccgcgttgaaggccacctccttctggctgggaggggcagaactgtggacagattctcaatgcctttttgaagttctgacccaccaaagaccttctgccttcaccctcctccccacctgatgtccctctgtgtctgatagtgatgttggtgaaagttcgtagaccccaggagtagagaaaagcaactggactgactttcttaccagcagttacctagactgaggcaagctgtgtggactcacccaagtatatttcagtactgtcaggctgtgacatcttagc

SEQ ID NO: 221422 - DNA, 1000 bp, Homo Sapiens
cacaagtaggctggaagacattaatttgatggaagacatggctttgttggaagacgtggatttgctggaagacacggatttcctggaagacctggatttttcggaagctatggatttgagggaagacaaggattttctggaagacatggatagtctggaagacatggctttgttggaagacgtggacttgctggaagacacggatttcctggaagacccggattttttggaagctatagatttaagggaagacaaggattttctggaagacatggatagtctggaagacctggaggccattggaagatgtggattttctggaagacatggcttttttggaagacgtagattttcaggaagacccaaattatccggaagacttggattgttgggaagacgtggattttctggaagactgggaggttactggaagacatggattttctggaagacatggattttctggaagacgtggatcttcaggaagacatatattggctggaagacctggattttttccggaagatgtggattgactggaagacctggatttggtggaagacgtagatttttctggaagacactgactgactggaagacctggatttctttctggaagacactgattgactggaagacctggatttctttctggaagacactgattgactggaagatctagatttttctggaagaactagatttactggaagacttggatttggtggaagacacagatttttctggaagacatggattagctggaagatctgtatttgatggaagaccttgaaattattggaagacatggatttcctggaagacgtggattttcctggaagatctggatttggtggaagaccagtaattgctggaagactggatttgctggaagacttgatttactggaagacttggagcttcttggaagacatggattgtccggaagacatggattgtctggaagatgtggattttctggaagctcaggattatctgg

SEQ ID NO: 221423 - DNA, 1000 bp, Homo Sapiens
ggtctgactgtggccacagtagtggagtcagccctttgtgctctgagaaattgtatagccttcatgcccccagcggaacagaacccggcccccctggcccagccagagcctctggtgtgggtcagcaagtgggttgactactccaataagttcggctttgggtatcaactgtccagccgccgtgtggctgtgctcttcaacgatggcacacatatggccctgtcggccaacagaaagactgtgcactacaatcccaccagcacaaagcacttctccttctccgtgggtgctgtgccccgggccctgcagcctcagctgggtatcctgcggtacttcgcctcctacatggagcagcacctcatgaagggtggagatctgcccagtgtggaagaggtagaggtacctgctccgcccttgctgctgcagtgggtcaagacggatcaggctctcctcatgctgtttagtgatggcactgtccaggtgaacttctacggggaccacaccaagctgattctcagtggctgggagcccctccttgtgacttttgtggcccgaaatcgtagtgcttgtacttacctcgcttcccaccttcggcagctgggctgctctccagacctgcggcagcgactccgctatgctctgcgcctgctccgggaccgcagcccagcctaggacccaagccctgaggcctgaggcctgtgcctgtcaggctctggcccttgcctttgtggccttcccccttcctttggtgcctcactgggggctttgggccgaatcccccagggaatcagggaccagctttactggagttgggggcggcttgtcttcgctggctcctaccccatctccaagataagcctgagccttagctcccagctagggggcgttatttatggaccacttttatttattgtcagacacttatttattgggatgtgagccccaggggggcctcctcctaggataataaacaattttgcagaattggaaaaaaaaaaaa

SEQ ID NO: 221424 - DNA, 1000 bp, Homo Sapiens
aaccatgctgaggcaagccgtttgaatatcgaaaggatgaaacagatctatcagcagctttcacgatatagaggactaggtcttctggcatcagtaccttctaatcctaatgggaatggaggcttcatgggatattctgcagaaaatatcccaggttgtagcagcagtggaagttgctctcaagggagtggtattttacactatgctcatggcgacagtcagcaaactcacctgttgaagcaaggaagaagctccatgggcactggtctcagtggtgggaaacgtcctagtcaggaagaggacacacagagtattggtcctaaagtccagagacagagcactaattagaaaacattcaggaggaatactgttgcagctgaaattggtggggagttcaatagcttttcaattaagttatttaaaaatattcttcattgatggaaagcagttacatattgaaatatgttgtttctaatgacatttctgtggtttttaactttttaatgaatttcacagaggacaattggtaatttgtatataaagaacttggcaagagaatttgcttaatgtaaatataaacagtcacaattagtatagacccatcgatatatttttgataatttttcatgtatggtaaagttaaaatgacaaattgatattctgatataaaactcaaagtttgaagtcagtgggaaaaaaggaggtttttagactttcttaaaagacgttaaaattttaggacagaattttcttgatgttgtttaatctaactttgcactctttgataataatgttttagataatgtcgtaatccaaattggtattgtagcctctgttaacacagacagtatatgttttaaactttgatgtaaacctttttagacccaaacttgtggaagtatcatgtgttaagttctctgtctctgtttctttgttcatttattactaaaatgaacttgttattaaagtatatgcaaatatgaaaaaaaaaaaaaaaaaa

SEQ ID NO: 221425 - DNA, 1000 bp, Homo Sapiens
ctgtggagggttgccatggtaaccagccacagtacatatgtaattctttccatcaccccaacctctcctttctgtgcattcatgcaagagtttcttgtaagccatcagaagttacttttaggatgggggagaggggcgagaaggggaaaaatgggaaatagtctgattttaatgaaatcaaatgtatgtatcatcagttggctacgttttggttctatgctaaactgtgaaaaatcagatgaattgataaaagagttccctgcaaccaattgaaaagtgttctgtgcgtctgttttgtgtctggtgcagaatatgacaatctaccaactgtccctttgtttgaagttggtttagctttggaaagttactgtaaatgccttgcttgtatgatcgtccctggtcacccgactttggaatttgcaccatcatgtttcagtgaagatgctgtaaataggttcagattttactgtctatggatttggggtgttacagtagccttattcacctttttaataaaaatacacatgaaaacaagaaagaaatggcttttcttacccagattgtgtacatagagcaatgttggttttttataaagtctaagcaagatgttttgtataaaatctgaattttgcaatgtatttagctacagcttgtttaacggcagtgtcattcccctttgcactgtaatgaggaaaaaatggtataaaaggttgccaaattgctgcatatttgtgccgtaattatgtaccatgaatatttatttaaaatttcgttgtccaatttgtaagtaacacagtattatgcctgagttataaatatttttttctttctttgttttattttaatagcctgtcataggttttaaatctgctttagtttcacattgcagttagccccagaaaatgaaatccgtgaagtcacattccacatctgtttcaaactgaatttgttcttaaaaaaataaaatatttttttcctatggaaaaaaaaaaaaaaaaaa

SEQ ID NO: 221426 - DNA, 895 bp, Homo Sapiens
gcggagcgaggctggaggcgcgggagggcagcgagaggttcgcgggtgcagcgcacaggagaccatgtccgggggcagcagctgcagccagaccccaagccgggccatccccgccactcgccgggtggtgctcggcgacggcgtgcagctcccgcccggggactacagcacgacccccggcggcacgctcttcagcaccaccccgggaggtaccaggatcatctatgaccggaaattcctgatggagtgtcggaactcacctgtgaccaaaacacccccaagggatctgcccaccattccgggggtcaccagcccttccagtgatgagccccccatggaagccagccagagccacctgcgcaatagcccagaagataagcgggcgggcggtgaagagtcacagtttgagatggacatttaaagcaccagccatcgtgtggagcactaccaaggggcccctcagggccttcctgggaggagtcccaccagccaggccttatgaaagtgatcatactgggcaggcgttggcgtggggtcggacaccccagccctttctccctcactcagggcacctgccccctcctcttcgtgaacaccagcagatacctccttgtgcctccactgatgcaggagctgccaccccaaggggagtgacccctgccagcacaccctgcagccaagggccaggaagtggacaagaacgaacccttccttccgaatgatcagcagttccagcccctcgctgctgggggcgcaaccaccccttccttaggttgatgtgcttgggaaagctccctccccctccttccccaagagaggaaataaaagccaccttcgccctaggaaaaaaaaaaaaaaaaaaaaaaaaaaaaaaaaaaaaaaaaaaaaaaaaaaa

SEQ ID NO: 221427 - DNA, 1000 bp, Homo Sapiens
ggtaacgacaactcaactgatcccagcacttgcgaaggttctactctatagtttaggaggtgctttccccattgagaatatttacagtgcaactaaaataggaaaagaaagttgctttgaacgaataatgcaaaggtttggcagaaaagtagtgtatgttgtaattggggatggtgtagaagaagaacaggcagcaaaaaagcacaacatgcccttctggaggatatccagtcactcagacctcctggctctccaccaagcactggaattagagtatttgtaactgtgttctttagccggagatccattttttatatttcaagtacactgaatttttatgtgtgattcaatgcctctggctctacacatataaattgtcttaatggatgaaatcatatttggaataaaaattccagaatgaagaattcagattgctgaatggagttaaactttagtgctacagaaaagaaactctatggtcttatatttacaacactttaatgggttttttaaaaatctgtggaggttgctggtacacaccaaatgagtccaaactggaatgagcagctttagcaaagaactcttaccctggcaaagcagcaacacacatgctccgtctgacaaggtggtcaacaacattcctcaaaatgggagatcttctcagccctgaggtttgaatctgactttagcctacctaacccagaaaatctgaattggaatgcactcagactgtataaggacagtcctatttagacatgtaatttgtgtaaattattgatgaaaataatttactgtgactttattagcagctgactttcaaagtggatgcaatttttctttcttttgttggggaggggaatgggaggggaaatgggaatataatattgtctcttttttaagtttggcaaacagaatgttcatactgatgtgttgtgccttaaagacaagacagcatttgtgtgttacaatgtaactttggttaaaatctctgtagataatg

SEQ ID NO: 221428 - DNA, 1000 bp, Homo Sapiens
aaacatttccactaactccactgtttctataataaatcataaatctttagcctggcattcaaggctaacttgctaatcacacttcccattaaaccttgcttatgatataggcaccaaccaaacctcttgctctgctatatctccactctgcctcagactgaaaagctagtcctaacgtctttgccttaattctgttcattttttcaagtccttgaaggaccattcttccctgattctcaggctagaagtgtcacttttcttatctgtacttccaaagcactttcgtatatttttattatggcatttatatatagttcatttatatttaaattttaattccatgaacaatcaagtaccaagtataatggagaaggtgctcatcctctgccttccttgagcttctgggtgatgccaggcccaagtctttgtggcacccagctccatgctttgaatactatgtggctgaatgaatttttaaaatctcaaagcagttaaacagcaggaaagcccattaacttcgtactgaaaaagcaacatactgtgatgatacgggatgacatcatttcaggttgggcatacaaaaaagtaaggaagctaaactaagactatactcaccaggccatttagaagttttaaataatgcctccactattttttttcttagacatagcttttaatggggaaatggaattttgttattaatacccattatattcctgtaagtaaatgactatttttcccttaactcagtgattagacaggaaggaagacattagtgattagacaggagggaagatattagtgattagacagcagggaagatattagtggtaaagagtgaatgatagtagtgaatataaatggggctgaggaaactttaagcataaaagattcctgagatgactttacaagtctgtacgaatctgccttgactgtatatttcatactgcccaacaaaacaataaaaaacaattttaaatgcaaaaaaaaaaaaaaaaaa

SEQ ID NO: 221429 - DNA, 1000 bp, Homo Sapiens
gaggagtgcaagaggcagatgctgacggcttcacacaccctggctgtggacgccaagaacctgctcgacgctgtggaccaggccaaggttctggccaatctggcccacccacctgcagagtgacggagggtgggggccacctgcctgcgtcttccgcccctgcctgccatgtacctcccctgccttgctgttggtcatgtgggtcttccagggggaaggccaaggggagtcaccttcccttgccactttgcacgacgccctctccccacccctacccctggctgtactgctcaggctgcagctggacagaggggactctgggctatggacacagggtgacggtgacaaagatggctcagagggggactgctgctgcctggccactgctccctaagccagcctggtccatgcagggggctcctgggggtggggaggtgtcacatggtgcccctagctttatatatggacatggcaggccgatttgggaaccaagctattcctttcccttcctcttcggccctcagatgtcccttgatgcacagagaagctggggaggagctttgttttgggggtcaggcagccagtgagatgagggatgggcctggcattcttgtacagtgtatattgaaatttatttaatgtgagtttggtctggactgacagcatgtgccctcctgagggaggacctggggcacagtccaggaacaagctaattgggagtccaggcacaggatgctgtgttgtcaacaaaccaagcatcagggggaagaagcagagagatgcggccaagataggaccttgggccaaatccgctctcttcctgcccctctttctctttcttcctttactttcccttgcttttccctcttttcttactcctcctctttctctccccaacccccattctcatctgcacccttcttttctcatgtgtttgcataaacattcttttaacttctttctatttgacttgtggttgaattaaaattgtcccatttgc

SEQ ID NO: 221430 - DNA, 1000 bp, Homo Sapiens
cgaggacctgggcgcggactacaacctctcccaggtatgcgacgggaaagtatccgtccacgtcatcgagggtgaccaccgcacgctgctggagggcagcggcctggagtccatcatcagcatcatccacagctccctggctgagccacgcgtgagcgtgcgggagggctaggcccgtgcccccgcctgccaccggaggtcactccaccatccccaccccaccccaccccacccccgccatgcaacgggattgaagggtcctgccggtgggaccctgtccggcccagtgccactgccccccgaggctgctagatgtaggtgttaggcatgtcccacccacccgccgcctcccacggcacctcggggacaccagagctgccgacttggagactcctggtctgtgaagagccggtggtgcccgtgcccgcaggaactgggctgggcctcgtgcgcccgtggggtctgcgcttggtctttctgtgcttggatttgcatatttattgcattgctggtagagacccccaggcctgtccaccctgccaagactcctcaggcagcgtgtgggtcccgcactctgcccccatttccccgatgtcccctgcgggcgcgggcagccacccaagcctgctggctgcggccccctctcggccaggcattggctcagcccgctgagtggggggtcgtgggccagtccccgaggagctgggcccctgcacaggcacacagggcccggccacacccagcggccccccgcacagccacccgtggggtgctgcccttatgcccggcgccgggcaccaactccatgtttggtgtttgtctgtgtttgtttttcaagaaatgattcaaattgctgcttggattttgaaatttactgtaactgtcagtgtacacgtctggaccccgtttcatttttacaccaatttggtaaaaatgctgctctcagcctcccacaattaaaccgcatgtgatctccaaaaaaaaaaaaaaaaaaaaaaaa

SEQ ID NO: 221431 - DNA, 1000 bp, Homo Sapiens
ttttttttttttttttttggtggggggagcgggggacagggtcttactctgtcactcaggccagagtacaatagtatgatctcggctcactgcaacttctgcctcccagtttcaagggattctcgtgcctcagcctcccaggtagctggtactacaggcacggaccaccacgcctggctaatttttgtattttttctagggacagggttttaccacgttgcccaggctggtcttgaacttttgagctcgagtgatccacccacctcagcctcccaaaatgctgggattacagatgtgagccaccgtgcttggccataactattgaatgctttctatgtggagagtgcttgtcttaattttctgttgctataatagaataacacagactgggtaatttataaagaaaagagatttatttggatcatggttctggaggctgggaggtccaagagcatggtaccagcatctgcttggcatctggtgacagctttcttgctgcatcattacatggtggaagggcaagagaatgcgagtgagagcaagagggcaaaatgattatccttttatcaggagcccacttctgacataactaacccacacctgagataacggcattaatccattcatgaggtctctgctcttaaaggagatcacctcttaaaggacccacctttcaatgccattacactggcaatttaatttcaagatgagttttggaggggacattcaaaccatagcagtgctataattttaaagtacttcaaagccaatttattctcttaattagcttcattattcttgtctttgtgtgtggattacctaaactctccttccagagctactttaatgattatattcaaccaaagcactctaaaatttagagtataaattgtcttatatttcaaattagaaaagttcaaatgaagtttaattgtgttattttataaaaccttctaaaattattaaatggaggatataatctaaaaaaaaaaaaaaaaaa

SEQ ID NO: 221432 - DNA, 1000 bp, Homo Sapiens
gagcgagccaaatgaagaagagctgatcaagttcatgtgtggtgaaaagcagttctctgaggagcgaatccgcagtggggtcaagaggctgagtaagagccgccaaggcagcacccagggccgcctggatgatttcttcaaggtgaccggctcactctcttcagctaagcgcaaggagccagaacccaagggatccactaagaagaaggcaaagactggggcagcagggaagtttaaaaggggaaaataaatgtgtttccccattatacctccttcaccccagaatatttgccgtcttgtacccttaagagctacagctagagaaaccttcacggggtggagagaggattctaaggcttttctagcgtgacccttttcagtagtgctagtcccttttttacttgatcttaatggcaagaaggccacagaggtacttttccttttttagctcaggaaaatatgtcaggctcaaaccacttctcaggcagtttaatggacactaagtccattgttacatgaaagtgatagatagcaacaagttttggagaagagagagggagataaaagggggagacaaaagatgtacagaaatgatttcctggctggccaactggtggccagtgggaggtgatggtggacctagactgtgcttttctgtcttgttcagccttgacccaccttgagagagagccaccaggaaggcgcatcttagcagatgggaggaactgctgagagaagatgggcagaaagctggagcccctggagttggctgtgtctgtgtttgtgactgattactggctgtgtcttgggtgggcagaaactcgaacttgctatgtaatttgtgtctagttattcagaggagtaagatggtgatgttcacctggcaatcagctgagttgagactttggaataagacactggttttcatgcgctgtttttgttttaaagttatgaagaaaaaagtcaataaaattctaaaagtaaaaaaaaaaaaaaaaaa

SEQ ID NO: 221433 - DNA, 1000 bp, Homo Sapiens
tgtgttcacagagacctggccgccaggaacgtgcttgtcacccacgggaaagtggtgaagatatgtgactttggattggctcgagatatcatgagtgattccaactatgttgtcaggggcaatgcccgtctgcctgtaaaatggatggcccccgaaagcctgtttgaaggcatctacaccattaagagtgatgtctggtcatatggaatattactgtgggaaatcttctcacttggtgtgaatccttaccctggcattccggttgatgctaacttctacaaactgattcaaaatggatttaaaatggatcagccattttatgctacagaagaaatatacattataatgcaatcctgctgggcttttgactcaaggaaacggccatccttccctaatttgacttcgtttttaggatgtcagctggcagatgcagaagaagcgatgtatcagaatgtggatggccgtgtttcggaatgtcctcacacctaccaaaacaggcgacctttcagcagagagatggatttggggctactctctccgcaggctcaggtcgaagattcgtagaggaacaatttagttttaaggacttcatccctccacctatccctaacaggctgtagattaccaaaacaagattaatttcatcactaaaagaaaatctattatcaactgctgcttcaccagacttttctctagaagccgtctgcgtttactcttgttttcaaagggacttttgtaaaatcaaatcatcctgtcacaaggcaggaggagctgataatgaactttattggagcattgatctgcatccaaggccttctcaggccggcttgagtgaattgtgtacctgaagtacagtatattcttgtaaatacataaaacaaaagcattttgctaaggagaagctaatatgattttttaagtctatgttttaaaataatatgtaaatttttcagctatttagtgatatattttatgggtgggaataaaatttctactacag

SEQ ID NO: 221434 - DNA, 1000 bp, Homo Sapiens
ccagctcatccgccaacagatcgatggccggggggaccaccagctcagccactacagcttggccgaggcctggggccacgggacaggcacgtcccatgtgtctgtgctgggggaggatggcagcgccgtggctgccaccagcaccatcaacacaccctttggagcgatggtgtattcaccacggacaggcatcatcctcaacaacgagctcctggacttatgcgagcgatgcccctggggttccggcaccaccccctcacctgtgagtggagacagggtgggtggagctcccggaaggtgctggcccccagttccaggcgagcgttccccatcctccatggtgccctccatcttgatcaacaaagcccaggggtcgaagctagtgattggcggggctggcggggagctcatcatctctgctgtggcccaggccatcatgagcaagctgtggcttggctttgacctgagagcggccattgcagcccccatcctgcatgtcaacagcaagggctgtgtggagtacgagcccaacttcagccaggaggtgcagaggggactccaagaccgtggccagaaccagacccagaggcccttcttcctgaacgtggtccaggctgtgtcccaggagggggcctgtgtgtacgccgtctcggacctgaggaagagtggggaggccgcaggctactaagacactgctctgcccagagctgaagtctggccccaccatgagtcctgtgtccaggccggacatggctgggggaccaactactctggcaggatctggacccctggcaggggagtccagctgagagtggaagaggtggcggggaccagctgggcagatgagaggctgagcctcatccctaaccccctttcccagagcccctggtggtcctgaaccggcccctctatccctccgcaggcctcttacctggggccactctcccaccctctcgatctgtatatcctccagtccaagattaaagaagaggcggactgt

SEQ ID NO: 221435 - DNA, 1000 bp, Homo Sapiens
ccctctaccagaaaagcgtgtggacccaggaatccaagtgccacctgattgagaccaacatcagggaccaggaggagctgaagggcaagaaggtgccccagtacccatgcctgtgggtcaacgtgtcagctgccggcaggtgggctgtgctgtaccacacggaggacactcgggaccagaaccagcagtgctcctacatcccaggcagcgtggacaattaccagacggcccgggccgacgtggagaaggtcagagccaaattccaagagcagcaggtcttctactgcttctccgcacctcgggggaacgaaaccagcgtcctattccagcgcctctacgggccccaggccctcctcttctccctcttctggcccaccttcctgctgaccggtggcctcctcattatcgccatggtgaagagcaaccagtacctgtccatcctggcggcccagaagtagagccatccatccatgccataccacttgtcagggcacaggggactggctgggcccccagggctgctccccacttgcagcacaatgccttctccacctgccctcccactcttccagtccaatccacgctgtcttctgttgcaggactaacctttgagaaatccttttgtgaagtcattgcctgctcaagaatgtacagtggctccccaatgccttggaggccataaggccagccagttctagctctctattacctgtccccactcaactgactcatacctgtttccggctgcatcactatgtgccccacagagaacgatgatcgtcacctctgtgcctgagttctccctgttgtctcaaagcggtacccatcctcccccagaagctgtccccagcgagcctcccttctttgtttgaattctctaataagagcaacagcagctcccatttctagaacacatttacagtattactattttctaggatataaagtgccatatatatttttaattccaatattaataaatgtatgccaaacaacaata

SEQ ID NO: 221436 - DNA, 1000 bp, Homo Sapiens
ggcccacgcctgtgccatcctgatcaaatgaggaaggccagaactatcccgacctccacctgccctgctcggagctggagtgctggatccctggcacctgcctggccccttaacatagaaccacgcctgctaacctgtaggctccactgggacctgctgtcctgtcccgcctgaccctgggccctggagcagcaccagccccagggtgtgggcctgggacctgggccagaactgagccctcctgcaggcatttggctgccctgggggcccactgcctagggaagaggacaggtggggcccagcacctgtgccacctccccccctccacacaccatccttccccctcactttgcagagtatttttccttttttttttttttcttaaagacggagtcttgctctgtcgcccaggctggagtgcagtggccccatctctgctcactgcaagccccgccttctgggttcccgccattcttctgcctcagcctcccaagtagctgggactacaggcgcccaccaccacgcccagctaattttttctgtatttttagtagagatggggtttcaccatgttagccaggatggtctcgatctcctgacctcgtgatccacccacctcagcctcccaaagtgctgggattacaggcgtgagccaccatgcccagccctgcaaagagtatttttctagcgcctgggctggacagttgtttctaaaactaaactattttggtacctgcttctgggccagtccccagcctgtcatgagtgtgtgtgtgcgggcatggatgtgactgggagctctgctgggcacccacatctggggcctagtcaggtgtgtgtgtccggcggggggggggggcaggggggggggtcaagatgagtttccctgtagattgtaccttggggtttttttctgtcgttttgttaaaattagcgccattttaatattaaaaatactgatttttaatattgaaaataaaagcatttaatatctcttaaa

SEQ ID NO: 221437 - DNA, 1000 bp, Homo Sapiens
aaagtctgcatgtccgaggacggcccctgcactggagctgggcgccagagctgcagagctagtgttcggccctcagagaaggatccagaatcaaaagctcaagagtgacgtgaggtgggcaccggccccaagtgcagagtcaaggcagggagaggccggctggagccaggccccctcgcacgcagcccccaaatcatggacgcacctgtggggagcaccacatctccacctgcggcctcacatctccccactcccctttttgtacgtttaactgtttctttgtacgtggtttacgtaactttaaactgtaacagccttaatggaagaccaaatggttttttatatgtgtatgtacaaagttttctattaacgctgcccgtctcccttataacctggacgtgagctgtcagagcagaagccactaggccactgcgcgtctgaggctcagaccctgctgtggttggcttggggtggccaatgggctgggaccctccatgagagttttggacacttgggtcacctgacccgtgcctctctgacacatgtctccggggggcagccacctggccaatgtgcatttttgcacatgctggaaccttccatgggggtctgggctattggctggagccaggacatgagtcaggggcaccatggacctcacgtgccagggagacttgaatgtggctgtcactcttccggacgccaagggctgcaggaggctgcttttggcactacccaccccgtgtgacagaataggagccagcgactcaggactgctcacgggtcaggagggcaacgcctgaagtcagacctccctataggtcaacagggacaacctggggatctctggagcagggccctcctctctcaggcttggcccactcccccagacacctggacacgtggccacaaatctgggacaaggggcccccgcacagcatgaaataaaaagtgcctgagaagtgtgtgcaaaaaaaaaaaaaaaaaaaaaaaaaaaaaa

SEQ ID NO: 221438 - DNA, 1000 bp, Homo Sapiens
cacaatggacctgccagagcgaatcatgatgaaccgggtgtccagccgactgggtcttaccaggatgtgcttccagccctatacatatagccagctgcagcagatcctaaggtcccggctcaagcatctaaaggcctttgaagatgatgccatccagctggtagccaggaaggtagcagcactgtctggagatgcacgacggtgcctggacatctgcaggcgtgccacagagatctgtgagttctcccagcagaagcctgactcccctggcctggtcaccatagcccactcaatggaagctgtggatgagatgttttcatcatcatacatcacggccatcaaaaattcctctgttctggaacagagcttcctgagagccatcctcgcagagttccgtcgatcaggactggaggaagccacgtttcaacagatatatagtcaacatgtggcactgtgcagaatggagggactgccgtaccccaccatgtcagagaccatggccgtgtgttctcacctgggctcctgtcgcctcctgcttgtggagcccagcaggaacgatctgctccttcgggtgcggctcaacgtcagccaggatgatgtgctgtatgcgctgaaagacgagtaaaggggcttcacaagttaaaagactggggtcttgctgggttttgttttttgagacagggtcttgctctgtcgcccaggctggagtgcagtggcacgatcatggctcactgcagccttgacttctcaggcttaggtgaccccccaacctcatcctcccaggtggctgaaactacaggcacatgccaccatgcccagctgattttttgtagagacagggcttcaccatgttgccaagctagtctacaaagcatctgattttggaagtacatggaattgttgtaacaaagtatattgaatggaaatggctctcatgtattttggaattttccattaaataatttgctttttcctgaaaaaaaaaaaaaaaaaaaaaaaa

SEQ ID NO: 221439 - DNA, 1000 bp, Homo Sapiens; identical to SEQ ID NO: 116143

SEQ ID NO: 221440 - DNA, 1000 bp, Homo Sapiens
cactgcatttttcagagacgccatgggcttcttattaatgtttgacctcaccagtcaacagagcttcttaaatgtcagaaactggatgagccaactgcaagcaaatgcttattgtgaaaatccagatatagtattaattggcaacaaggcagacctaccagatcagagggaagtcaatgaacggcaagctcgggaactggctgacaaatatggcataccatattttgaaacaagtgcagcaactggacagaatgtggagaaagctgtagaaacccttttggacttaatcatgaagcgaatggaacagtgtgtggagaagacacaaatccctgatactgtcaatggtggaaattctggaaacttggatggggaaaagccaccagagaagaaatgtatctgctagactctacatagaaactgaacatcaagaaccccaccaaaatattacttttaaaaacaatgacaaaccacacaattgttgttgagtaaaccacgcacaatggcatgtctttctttttctgccagaaaatctattttaagaaaccagaatagtcaacagtgttcaaaagaattgactagttatccctgaggccctttcaaacatgatcaaagatttcccaatgtgatctcatcatcatggatactcaatttgttttttcttatagagaaaatgagtatataagacaatatacaagaagaaatatcagtgagttttaaatcagaacaagttacctgtcacattgaagaaaagggtaggcactaaagggagaacacagaaagaagaatttctaaaatattggatttacttcttatattgagtcagatgcatacttttagatttgcattggggaaaatgtactagctaaaaatggatacacaatgaagaattctatttggctaattaagaatgatatactatgtacacccaataagctgtactagaatgaataaattactgataaggttccaaaaaaaaaaaaaaaaaaaaaaaaaaaaaaaa

SEQ ID NO: 221441 - DNA, 1000 bp, Homo Sapiens
attcatttacaacttccagatttgagctgcctggagggaatccatatcagctctgcataagattatatacaaagctgtcactcacaaaaggctggatgtgctttcatccaactggaaggctttattcttccaagttcattcatactcaaagaggccagtactttgccatccttgcacttctgttatcagggcccaaataacagtggcaagctaccaactaagttgtattttaataaagattccatgggttgaacaagccacgttgcagaaaaagagcttcccctaacctgggttgttgcagagtaaatcccacgacataagctggtatcagtggttcgggggaaatagttccattctatgactcttgtctcctcctccaggaggactgttctaactagtaatcttggccctattcattacatcctctgcttgtcattctgctaatttatgaagatagtttattatagtctgtacttcagttctcatcttgtaaataatgcttaacataaacttgtacttacactgaaatccaaaatagtcatgtttctgcagtattctgtagccaacttaaacctgtgctttcatgtttaagaaatgagaaattgtgccaaagatagcagaagagtagataagtgctcagtattgacgacctacatctgaaatctacaacataatgatactgaattgttatgtaaacatcataaatagtaaataatgattcaatgtgaattttaaaatgcaaatattgctattgtttataggaaataaatctaaatataaatgaaattgaatcagtaatttatcttgggctaaatggttctaccccttactaggttgccccaattagtggcactagttggcagagctgttcatgagctgccagttatcattttggagtcagtttgaaaccagcctcttaacacactgctgttaactcataaaagagaagagtgttccatttcagtctcaataaacacttccctcattctttcaaaaaaaa

SEQ ID NO: 221442 - DNA, 1000 bp, Homo Sapiens
tcttctttaaggaagaataaaaaagaagaggttcatttttctggctttttttttcacctgaaacactttttctcgagtccaaaatcattccccccgtgaagtctgcttaccaaaacataagacgacttatatatttgaaagaagtcaaatgaatgagctctctaatagaagtccatgagttgagtgggtatttcttatttgaaagtgtttttctttaatcaaaagtccttagaatgagggaaacaaaatatttatttgttttggaatcccacttatcaaatcattcaaaactttcagctggagtggggtttgcttttgttttgtttgtgtccataagagaaatggtagaagatgaatcagtatgaagacactgtcaatgaggttatgagaaaaacagcaggggcattagtttcaggcaaggcagctcccaggtttagagattaatttttaccccctaaggaatatccagtcaaagacgctgagtgggagctgtcaggcagtagcagctgtgtttgagtttctggctgaaaatggtgaagaatggacttaatcatgctaacaaactgaaaaatctagacatagatcctctgatatacaattagagatatttttatatagaccccaagcattctgtgcataaaagttaacattaggctgtggtgcagtaaccatttaatgtcgaggctctatttcggaaatacactacaaatgttaaagtacgtggctgtcctcttaagacactagtagagcaaagacttaatcatatcaacttaattctgttacacaatatgtgtttttttaatatactaaccatttcttatggaaaggtcctgtggggagcccatcatctcgccaagccatcacaggctctgcatacacatgcactcagtgtggactgggaagcattactttgtagatgtattttcaataaagaaaaaaatagttttacattaaaaaaaaaaaaaaaaaaaaaaaaaaaaaaagaaaaaaaaaaaaaaaa

SEQ ID NO: 221443 - DNA, 1000 bp, Homo Sapiens
cggaaggtggatcggggtggggagggcgatgacccagcccgagaggagctagagccaaagagggtacggagctcagggccagaggctgaggaggtccaggaggaggaagagctggaggaggagactgggggtgagggcccccctgcacccatccccaccactggcagccccagcacccaggagaaccagaatggcttggaaccggcggaagggaccacttcaggcccctcggcccctttctccactctgactccccggctgcatctgccctgcccacagcagccgcctcagcaacagttgtgacagtggctgagcctagcacagaccctgacagagacccccctcggcctcaaggatcctctttctgaccatcaagcctgcttcttggggggtgggcgggtagggggggtggccatccctgctacccgcccacccctgagtcccttgacttttgtattctgactccaaggtattgttcagacctcagctcctgggggccggcccctggagtcttccctccctggtagcctctaaccagcattcccagacacctgaggcagatagatggatgggctggtgggcaggggggtggctggggctgggccatcaccattccagagacaaggccagtgtatatgcaaactgggggactctcctcccttctctccccagttctggtcctggccaggccatgctacactaacccctgcccccactctcctcccctcttttccttccttcctacccccttctccctctcccttcccctgactgttccacccaggaggaggaaacttcacatagccgtgctcacagttttttattttaaaggaatttggctggggagctgaacagggctccctgtgatctgaagaaagcttttggtgcttgtcctcacaaccacctcagtcctccctccctgtcctcccctgtctcctttcctcctcctgggttcatgttgtaataaaagaagattgttggtgtgtaattaatttgttca

SEQ ID NO: 221444 - DNA, 1000 bp, Homo Sapiens
agcgccccaccgggggtcccgggtgcggccctgggcgcctcctgcttgggacgggaacggacgcgcgctgctgccgggttcacacgacgcgctgctgccgcgattacccgggcgaggagtgctgttccgagtgggactgcatgtgtgtccagcctgaattccactgcggagacccttgctgcacgacctgccggcaccacccttgtcccccaggccagggggtacagtcccaggggaaattcagttttggcttccagtgtatcgactgtgcctcggggaccttctccgggggccacgaaggccactgcaaaccttggacagactgcacccagttcgggtttctcactgtgttccctgggaacaagacccacaacgctgtgtgcgtcccagggtccccgccggcagagccgcttgggtggctgaccgtcgtcctcctggccgtggccgcctgcgtcctcctcctgacctcggcccagcttggactgcacatctggcagctgaggagtcagtgcatgtggccccgagagacccagctgctgctggaggtgccgccgtcgaccgaagacgccagaagctgccagttccccgaggaagagcggggcgagcgatcggcagaggagaaggggcggctgggagacctgtgggtgtgagcctggccgtcctccggggccaccgaccgcagccagcccctccccaggagctccccaggccgcaggggctctgcgttctgctctgggccgggccctgctcccctggcagcagaagtgggtgcaggaaggtggcagtgaccagcgccctggaccatgcagttcggcggccgcggctgggccctgcaggagggagagagagacacagtcatggcccccttcctcccttgctggccctgatggggtggggtcttaggacgggaggctgtgtccgtgggtgtgcagtgcccagcacgggacccggctgcaggggaccttcaataaacacttgtccagtgaaaaaaaaaaaaaaa

SEQ ID NO: 221445 - DNA, 1000 bp, Homo Sapiens
agatgaaaagccaacatgctgtcgctgccgaggcagaaaacggtgtataaagaagttctccatccagaggttcccaaagatcttggtgctccgtctgaagcggttctcagaatccaggatccgaaccagcaagctcacaacatttgtgaacttccccctaagagacctggacttaagagaatttgcctcagaaaacaccaaccatgctgtttacaacctgtacgctgtgtccaatcactccggaaccaccatgggtggccactatacagcctactgtcgcagtccagggacaggagaatggcacactttcaacgactccagcgtcactcccatgtcctccagccaagtgcgcaccagcgacgcctacctgctcttctacgaactggccagcccgccctcccgaatgtagcgccaggagccacgtcccttctcccttccccgtggtggccccgctccctaaattttttaaaaagacaaaaacaaaacaacaacaacaacacacaaacctgacaagagaaaaacaaacctgaagctgccgagcaggagtggatgcagcctgatcagggtctggagcaaggagccgggctttcctgagctgtggcccggcagggaagatcgcctggacgtggagccagcatcgccccgtgccctcggcgtttgcatttgtaaacttgtggtcttcctatgtgtcagaaacaactgtgtcttgggggggaagaccctcgctgcgccgcttcccgccgcagcgcccgcgcctccgaggggacagcgccctctggagctcgctgggagcatcaccgcctggacgcccgcgccgcggaggagccggcgcccatctccacccgcacggctcgccggtccagagccatgagccaagagccctcttcacgctgctaactccaggggacagacgaagggacatctttggaaaacgctggttttggtttttaaaaagcccaacttttttttttaatttccataactaaagtgttcagactgg

SEQ ID NO: 221446 - DNA, 1000 bp, Homo Sapiens
cgcggacctggcgggctctacggcgggcgactacggcggcctcgtggtcttctgcatcttctttggcatctcctacggcatggtgggggccctgcagttcgaggtgctcatggccatcgtgggcacccacaagttctccagtgccattggcctggtgctgctgatggaggcggtggccgtgctcgtcgggcccccttcgggaggcaaactcctggatgcgacccacgtctacatgtacgtgttcatcctggcgggggccgaggtgctcacctcctccctgattttgctgctgggcaacttcttctgcattaggaagaagcccaaagagccacagcctgaggtggcggccgcggaggaggagaagctccacaagcctcctgcagactcgggggtggacttgcgggaggtggagcatttcctgaaggctgagcctgagaaaaacggggaggtggttcacaccccggaaacaagtgtctgagtggctgggcggggccggcaggcacagggaggaggtacagaagccggcaacgcttgctatttattttacaaactggactggctcaggcagggccacggctgggctccagctgccggcccagcggatcgtcgcccgatcagtgttttgagggggaaggtggcggggtgggaaccgtgtcattccagagtggatctgcggtgaagccaagccgcaaggttacaaggcatcctcaccaggggccccgcctgctgctcccaggtggcctgcggccactgctatgctcaaggacctggaaacccatgcttcgagacaacgtgactttaatgggagggtgggtgggccgcagacaggctggcagggcaggtgctgcgtggggccctctccagcccgtcctaccctgggctcacatggggcctgtgcccacccctcttgagtgtcttggggacagctctttccacccctggaagatggaaataaacctgcgtgtgggtggagtgttctcgtgccgaattcaaaaagctt

SEQ ID NO: 221447 - DNA, 1000 bp, Homo Sapiens; identical to SEQ ID NO: 116152

SEQ ID NO: 221448 - DNA, 1000 bp, Homo Sapiens
tttcatgatgggtgtagagtggacagactgtccaatggtggctgagatggtgggaatcaagttcttcataaatgagtttgtggcttatcagcaactgtctcaatacaagaacaaacgtctctctggaatggaggagtggattgagggagagaaacagtggatttctgtgagagctgaaatcattacaacattttcactctgtggatttgccaatcttagttccataggaatcacacttggaggcttgacatcaatagtacctcaccggaagagtgacttgtccaaggttgtggtcagggccctcttcacaggggcctgtgtatcccttatcagtgcctgtatggcaggaatcctctatgtccccaggggagctgaagctgactgtgtctccttcccaaacacaagtttcaccaatagaacctatgagacctacatgtgctgcagagggctctttcagagtacttctctgaatggcaccaaccctccttctttttctggtccctgggaagataaggagttcagtgctatggcccttactaactgctgtggattctacaacaataccgtctgtgcctaaggctgcttgatctatttctataacagttttgatcttaaaagctttgtgattgcaaaggtgtttatgtactcagggtgcccacaactcactcaccaagatgtttaacagtaagtaacagtaaatgtaaaagattcattttgggccgggctcagtggctcacgcctgtaatcccagcgctttgggaggccgaggcgggcggatcgcagggtcaggagatcgagaccatcctggctaacacggtgaaaccccgtctctactaaaggtacaaaaaattggccgggagtggtgtcgggcgactgtagtcccagctactcgcgagactgaggcaggagaatggcgtgaatccgggaggcggagcttgcagcgagccgggatcgcgccactgtactccagcctgggtgacagagcgagactctgtctcag

SEQ ID NO: 221449 - DNA, 1000 bp, Homo Sapiens
caagtcccgggacctgggctccatcatctgtgacatcaagttctctgagctcacctacctcgatgcattctggcgtgactacatcaatggctctttattagaggcacttaaaggtgtcttcatcacagactccctcaagcaagctgtgggccatgaagccatcaagctgctggtaaatgtagacgaggaggactatgagctgggccgacagaaactcctgaggaacttgatgctgcaagcattgccctgacctattccctcttctcactttggggactgttcccatcacccacctctggagcttacactgttctggggtttgttctctacccttccaaccaatcacacccctccctgcacccatgtgcctgggcttcccctttatttcccttttccatttaccccgtaatgtgtctctacagctaccttaccactgagccgtaagacaaatgtataggaagaagcaaagtctacagcacatagtctttgtaagggattgatgtgaacactttttttggatgcactgaggagttatcaatacttctggctttatgagagctcttaaattttgtctaaaaaaccaaagggctgtgagtaagggagctatgtggaaagtgggactctgaagtgtattttgaaaattaatcgccaccctcttccaaattatagaattttttaaaaacaagctgtggccctttccactctctcctggcctctggtgctgctcctctctgccgcctttcctccattccatggcttgaaacctctgcctgatgtggctccttcctttttcccatttgtcaaaccctcttcaaaggaggaacagataagactgggtctgcctagtcatgcctcccaactgtggtggtatatgtgtacacacatacacagggtggatggagaagaggttgctgattaaaatacactccccctataaaggggaagggggagtgtgacactttctttccatgttcaagtgaaaataaataatgtaccctgc

SEQ ID NO: 221450 - DNA, 1000 bp, Homo Sapiens
tcggcctgcctttgccctcggcctacttgccctagcatgaggctctgagagccacctgcccaccaatctggtgaggataatggtggctccagcgacaggaggccaaccctggagaccaagaacagggcgcctggctgccatcttttcctccagaggtggggctgcaccagactcagcactagcactccatcagcactagcacctcactccatcagcactagcacctcactccatcggccccggcaccctgctccatcggcactggcgccctgctccatcggcactaatgctccactcggcgccccactccatcggccccgctccatcggcactaatgccccactcggcgccccactccatcagcactaatgctccactccattggcactaacgccccaactccagcggcactaatgccccactcggcgccccactccatcagcactaatgctccactccattggcactaacgccccaactccagcggcactaatgacccgctcctttgacattggtgccccactccatcagcactaacgccctgctccatcggcactggtgtcccactccattgtcactaacgtccggctccatcggcactaccaccccgctccatcatcactatgtccagctccgtcggcactaccaccctgctccatcatcactatgtccagctccgtcggcactaccaccctgctccatcatcactacgtccagctccaacggcactggtgccccattccatcggcactaacgccccgctccaccggcaccagtgcctcgctccattggcaccaacgcccagctccaccggtactggctccccgctccatcggcactaacgccccgcttcattggcactttgctgctgcctcctgagcactgccttccatgaacagggacagaccagaggccgtgcaaggactccccctcagacctccaaagggcaacagaagagtattaataaacgtgaaaacttaaaaaaaaaaaaaaaaaaaaa

SEQ ID NO: 221451 - DNA, 1000 bp, Homo Sapiens
gagtgagttaagtgcaagcataaactaaaatttatatgactttgaatttaagaaccactaataactgtgttctaattaacacagtaatctgttcagccaaaggatactaacagccattctttggactgtggttaatttgataacttcaagaagttataactttgctaccctggattctgatgcaatttcaatataaaaagttgttcctttcatagtttttccccccaaaagaagtgcctattacattttaccttaatgtttatttatcatccaagtgttcttgatataaaatcagtatacagaaaattttaagagaacttacattcaagggacatagagggaaaatgttaatgtgtatttcattgtttcttgtggaatttttttttcattcggtttgagaatggacagtgtgtctaaggatgtgatttaaatttacttaggatggatttagcattgaggttattaagacaaagttagcagaggccagccagcactgtgctgcacaactccaggaactccatggtatgctcacaattttctgcaagttgcctccacttccaagtggccagtgatttgttaaaataccttgcccaagaatataactgattgatgaaagggcatatttaggtcaatataaaataatagcaagtatttactgagagcttactgtgtgctaggcattttcttaatatttcaatgtgtatttaatcctcacaacaacccaatgtggtaggttattgatatcctcttcttaaaaatgagtaaatggaggcccagagaaatgtaatttgcctgagatcaaattaaggttgcttaagatcaaactgctaagaaggggcagtttgagtctgagctagtgctcctaaacactggacatttttgctgtgaaccacagtcgggaaggtttaatgtttagactctttcctcagaggcttttaactacacacaattttgacatgttttccaagctcagaaagctcattaaaaacaactaaaactg

SEQ ID NO: 221452 - DNA, 1000 bp, Homo Sapiens
gaccaacccagtgtcccggttcatgcaggtgcgctcgttgcagtacctgtgtcgttttgttatacgtcagtataccagaatagacttaattcagaaactgcctttgccaaacaaaatgaaggattatttacaggagaagcactactgaaagattgagaaccctgcatcttgcactttgggaataagaacaagagattgaaatacagtttacaaactttcattgccatcaaaatcttttgctgccataactatttcagttttatgtgtaaaagagtcatcagtttgtttaggggtggggaagtgtcagcaaggtgtcttgggtttattttggttctttaaaaaagggaagtcttgaggttttagaggtgtgaattatgtttcatcaatgtgcagaataatcacaatgtgaattatcaaattctcctcaatgccccccccgcccagtcctttgctgctatccactgtgatttttatgcattaaaagcacatttcatgtgtattcaaccctaagtaaagttgaatgaaacttaacagaatggaaattgctatgtctttttaaatggtccattttcaaaagacagtgttgaataaacatacctgtgtgataaaacacagaatttacatatacactgaagatgagtttttaatctcttactttaaaaagatttatttagaatcgtgaattgacataatcttgggtaatggaacggagatctgcaacatatcttttaacaacacttttttctaaattatttctaaggttgtgctaattcttttggttgtgaaaagttgaatttttctgttgccttcgttttcatcttctagtttgtctattttaataaatggccttacattaaaaaattgtaaagaaatgtataccaccaatttagaaattgttgccttttctgtaattaaactcgggtacaaattggcataacatgaaaacctatggaactagaattattattaaagaaatattagatgaaaaaaaaaaaaaaaa

SEQ ID NO: 221453 - DNA, 1000 bp, Homo Sapiens
ccttttggcaagaagaacaagacagtggtgaccgaggattttagccacttgcccccagagcagcagcgaaaacggcttcaacagcagttggaagaacgcagtcgtgaacttcagaaggaggttgaccagagggaagccctaaagaaaatgaaggatgtctatgagaagacacctcagatgggggaccccgccagcttggagccccagatcgctgaaaccctgagcaacattgaacggctgaaattggaagtgcagaagtatgaggcgtggctggcagaagctgaaagtcgagtccttagcaaccggggagacagcctgagccggcacgcccggcctcccgacccccccgctagcgccccgccagacagcagcagcaacagcgcatcacaggacaccaaggagagctctgaagagcctccctcagaagagagccaggacacccccatttacacggagtttgatgaggatttcgaggaggaacccacatcccccataggtcactgtgtggccatctaccactttgaagggtccagcgagggcactatctctatggccgagggtgaagacctcagtcttatggaagaagacaaaggggacggctggacccgggtcaggcggaaagagggaggcgagggctacgtgcccacctcctacctccgagtcacgctcaattgaaccctgccagagacgggaagaggggggctgtcggctgctgcttctgggccacggggagccccaggacctatgcactttatttctgaccccgtggcttcggctgagacctgtgtaacctgctgccccctccacccccaacccagtcctacctgtcacaccggacggacccgctgtgccttctaccatcgttccaccattgatgtacatactcatgttttacatcttttctttctgccgctcggctccggccattttgttttatacaaaaatgggaaaaaaaaaaaagaaattatataaagttcctagaaaaaaaaaaaaaaaaaaa

SEQ ID NO: 221454 - DNA, 1000 bp, Homo Sapiens; identical to SEQ ID NO: 116155

SEQ ID NO: 221455 - DNA, 1000 bp, Homo Sapiens
actgtgatgaaacacttttcccgtgtcgtttgagtgcatcttctcaacaaccctaggagggttcttgaagcttttgagattaacaatggcaggaaaatcatcactttttaaagtaattctccttggagatggtggagttgggaagagttcacttatgaacagatatgtaactaataagtttgatacccagctcttccatacaataggtgtggaatttttaaataaagatttggaagtggatggacattttgttaccatgcagatttgggacacggcaggtcaggagcgattccgaagcctgaggacaccattttacagaggttctgactgctgcctgcttacttttagtgtcgatgattcacaaagcttccagaacttaagtaactggaagaaagaattcatatattatgcagatgtgaaagagcctgagagctttccttttgtgattctgggtaacaagattgacataagcgaacggcaggtgtctacagaagaagcccaagcttggtgcagggacaacggcgactatccttattttgaaacaagtgcaaaagatgccacaaatgtggcagcagcctttgaggaagcggttcgaagagttcttgctaccgaggataggtcagatcatttgattcagacagacacagtcaatcttcaccgaaagcccaagcctagctcatcttgctgttgattgttagattgttgatgcattctaaccaactcacacatatacacaaaatcaacatggggatggagaagagaattagcgtttgcagcagtgtatcatctactaataaaattaaactaatgttgctgcttcattagttggtgggagaagggacacatccactcttggaggaatatatttactcaataatggcaccttacatttataaattgtaacagttgtctaataacgtttctttaatttaaatatgtaagttgcagagctaataaatgaaatgaccaagactttaattataaaaaaaaaaaaaaaaaa

SEQ ID NO: 221456 - DNA, 1000 bp, Homo Sapiens
ggcaaatatcactgtgctgtggaggaatggctcctgtctacaaatggcacttggcacaagcttggagaaaagaagtcaggactaacagaattgaaactcaagcccacaggaagtaaggtacgtgtctccaaagtgtactggaccgaaaatgtgactgagcacagagaagtggccatccgctgcagcctggagagtgtaggcagctcagccactctgtactctgtgatgtggtactggaacagagaaaactctggaagtaaattgctggtgcacttgcaacatgatggcttgctggagtatggggaagaggggctcaggaggcacctgcactgttaccgttcatcctctacagactttgtcctgaagcttcatcaggtggagatggaggatgcaggaatgtactggtgtagggtggcagagtggcagctccatggacacccaagcaagtggattaatcaagcatccgatgagtcacagcggatggtgctcacggtgctgccttcagagcccacgcttccttccaggatctgctcctcggcccctttactctatttcctgttcatctgtcccttcgtcctgctcctccttctgctcatctccctcctctgcttatactggaaggccaggaagttgtcaacactgcgttccaacacacggaaagaaaaagctctctgggtggacttgaaagaggctggaggtgtgaccacaaataggagggaagacgaggaggaagatgaaggcaactgaatcccaagaggcacctgcagccaggaaggaaagccccgtgtggaatgtggtgacctagtcacctggaaccagctcctgacagaccccggcaacttctagatgaacccaagtgaactttcctcattaccatcctgaagtcactaccccagggggagctatagcttcatgaccgtaacatgtgacctgtgtgctggcaggacgactcactgcggctgcgccactgggacccctcccctacatgcaccaatgcacg

SEQ ID NO: 221457 - DNA, 1000 bp, Homo Sapiens
gtacccccctcaagaggctgagcagcttagccaccaagcagccccaggacccagaagggtctgcatgggccatgagcgggcactcccaatacagcttaccgtacaggctttggacatgccggaggaggccatcgagactttgctgtgctacctggagctgcacccacaccactggctggagctgctggcgaccacctatacccattgccgtctgaactgccctgggggccctgcccagctccaggccctggcccacaggtgtccccctttggctgtgtgcttggcccagcagctgcctgaggacccagggcaaggcagcagctccgtggagtttgacatggtcaagctggtggactccatgggctgggagctggcctctgtgcggcgggctctctgccagctgcagtgggaccacgagcccaggacaggtgtgcggcgtgggacaggggtgcttgtggagttcagtgagctggccttccaccttcgcagcccgggggacctgaccgctgaggagaaggaccagatatgtgacttcctctatggccgtgtgcaggcccgggagcgccaggccctggcccgtctgcgcagaaccttccaggcctttcacagcgtagccttccccagctgcgggccctgcctggagcagcaggatgaggagcgcagcaccaggctcaaggacctgctcggccgctactttgaggaagaggaagggcaggagccgggaggcatggaggacgcacagggccccgagccagggcaggccagactccaggattgggaggaccaggtccgctgcgacatccgccagttcctgtccctgaggccagaggagaagttctccagcagggctgtggcccgcatcttccacggcatcggaagcccctgctacccggcccaggtgtacgggcaggaccgacgcttctggagaaaatacctgcacctgagcttccatgccctggtgggcctggccacggaagagctcctgcaggtggcccgctga

SEQ ID NO: 221458 - DNA, 1000 bp, Homo Sapiens; identical to SEQ ID NO: 116158

SEQ ID NO: 221459 - DNA, 1000 bp, Homo Sapiens
aaagcagaataatgaatcaaccacgagataaacaaggaaggggacttttgtataaatcatcgactgactgcttgattcaggctgttcaaggtgaaggattcatgagtctatataaaggctttttaccatcttggctgagaatgaccccttggtcaatggtgttctggcttacttatgaaaaaatcagagagatgagtggagtcagtccattttaaacccctaaagatgcaacccttaaagatacagtgttcagtattattgaaatatgggcatctgcaacacataccccctattatttctacctctttaggaagacacctattccacagagactgatttatagggggcagcactttatttttttctggaaacccaagttctctttgactcctctttttgtccaaaagtgatctggtcggatctcacaaggccatccaatgagaccccgcacagcattttctaaagaagaatcgaagcctgaccactttcaccttgggcaagaaggtttggcctttgagttgctattctatgctgaagagcctgcttagaggaggagtaccaggagggagccagcatttcagatctgaagtagacgataggaatgtggaagaacacatacatagtgcttaagaaatacatttaacctgttatgtcagtatttatcaatgaagtttgataattcacttttctgtcattgttaaagcgtacatactgtaaattaaagggaggtgaatggaaattaatgaataaacattttgagtttccctagtgttgaaggaaggtgtactttttcttgtcagaaagataaaaaaaatcaagttgagatgatgtttgaatttcaagaaaagaggctgctttctgtcagtgccctctcattagatctgtgttaattagttagtactccactgcacatgctaatgacttcctctgacagccacacaccgaatcttgatgaaaaaagagaagagcatttgccttgttacatagtctgttacaagcc

SEQ ID NO: 221460 - DNA, 1000 bp, Homo Sapiens
gaaggagactcatagaggagaagaagaggcaaaaggaagaggctgaacataagaaaaagatggcctggtgggaatccaacaattaccagtccttctgcctgccctctgaggagagcgagccagaggaccttgagaatggggaagagagctctgctgagctggattaccaagacccagatgctacttccctcaagtacgttagtggtgatgtcacccaccctcaggctggggccgaggatgctctcattgtgcactgcgtagatgactctggccactggggcagaggtggtttatttacagctctggaaaagcgatccgctgagccaagaaaaatatatgagctggctgggaaaatgaaagacctgagtttgggaggtgtccttttatttcctgttgatgataaagaatcaagaaacaaagggcaagatttgttggccttgattgtggctcagcatcgtgatcgttccaatgtcctgtctggcattaagatggcagccctagaagagggcctgaagaagatatttttagcagcaaaaaagaagaaagcaagtgttcatcttccacgtattggacatgccacgaaaggttttaactggtatggtactgagcgacttattcggaaacatctggctgcaagaggcatcccaacttacatatattattttcctagaagcaagtctgctgtccttcattcacagtcttcatcttcctcctcaagacagctggtgccttaagaattggcccagcctcagatcctgtctttagcaaccagctaatatttacccagaggtactgcaatagagtatttcaaaatggaatcaggatctggtgggcctcagaaattgtctcttttctgagtttcagtttggttctcctggatgttttgctctgttttgatacctgtaatatagggaaacacaactttttttgggaaagccctttgaccccagcttgctagttgcataataataaattttctgttcctaaaaaaaaaaaaaaa

SEQ ID NO: 221461 - DNA, 1000 bp, Homo Sapiens; identical to SEQ ID NO: 116163

SEQ ID NO: 221462 - DNA, 1000 bp, Homo Sapiens
tttaaattgttgtgttatagtttatgcttcttaaatcatttttcaacctaaacagccaatttctaagcagacaggaaaactaaataataagttaattaatataacaaagatgcaggttcctgctcattccagtaatgtctttgaaagcaaaactaatatttattttctagattatccctgtgaataattgagaactttttggagtcaagtatgaataaaggtgtggcagaatataataatctggactattttctataggataattgctgggttataaaatcttaggtttgcttatgcccagtagctcctgcggaggcttaataataggcaattttgaatttgttcaaacctgtaatggcttgtaaacaaagatgaccatcagctgtttctcacatctatagtgacaataaagcgggaagtataagatttaataggaggggttaaggttcatgagaaccatggaaagatgtggtctgagatgggtgctgcaaagatcataataaagtcatttttatagacagtctaaacaaaatgggtggggatgtcatgttttttgcccaattcagcttttgttctgcctgaacattaatggcaagtctagaactctccgaatcctacagctttgtaattttttttctacaaatgtctaacatccaaaactgagggttgggaaaaggacttccctcctgtagtttttttcatattacttctcactttatatcttatattctaaatagctatcacctcagcagtcttttgcctattggttatgttagtatcacattacttctagcctttcaattactccatgttttatttaatatccattgaagtctatgaattctctgttctggtggcacagctattcataacctatattctagagtagacaatctggactatgtaataaatagtctgctgattttaaaaaaaaaaaaaaaaaaaaaaaaaaaaaaaaaaaaaaaaaaaaaaaaaaaaaaaaaaaaaaaaaaaaaaaaaa

SEQ ID NO: 221463 - DNA, 1000 bp, Homo Sapiens
agccgtgatgaacagcgtgctaaagctttgcatatccctttttctgtagatgaaattgtcggcatgcctgttgattctttcaatagcatgttaagtagatattatctgacagacctacaagtctcacttatccgtgacatcagacgaagagggaaaaataaagttgctgcgcagaactgtcgtaaacgcaaattggacataattttgaatttagaagatgatgtatgtaacttgcaagcaaagaaggaaactcttaagagagagcaagcacaatgtaacaaagctattaacataatgaaacagaaactgcatgacctttatcatgatatttttagtagattaagagatgaccaaggtaggccagtcaatcccaaccactatgctctccagtgtacccatgatggaagtatcttgatagtacccaaagaactggtggcctcaggccacaaaaaggaaacccaaaagggaaagagaaagtgagaagaaactgaagatggactctattatgtgaagtagtaatgttcagaaactgattatttggatcagaaaccattgaaactgcttcaagaattgtatctttaagtactgctacttgaataactcagttaacgctgttttgaagcttacatggacaaatgtttaggacttcaagatcacacttgtgggcaatctgggggagccacaacttttcatgaagtgcattgtatacaaaattcatagttatgtccaaagaataggttaacatgaaaacccagtaagactttccatcttggcagccatcctttttaagagtaagttggttacttcaaaaagagcaaacactggggatcaaattattttaagaggtatttcagttttaaatgcaaaatagccttattttcatttagtttgttagcactatagtgagcttttcaaacactattttaatctttatatttaacttataaattttgctttctatggaaataaattttgtatttgtataaaaaaaaaaaaaaaa

SEQ ID NO: 221464 - DNA, 1000 bp, Homo Sapiens
tccccaccgccgcctgtcatccctcacgtctctgtggccacccgggtgtcactgccagcaccaggcactgctttcacgtaaaatgtccaaatcacatcttcagcaagaaagcaacctcacggattgccccgcctcaaggtctttccaccctctttgagatcagcgttcggagaggtccccgccagcccggtggctgccctcaggtcccgtcacatgtctcaagggtccagcgttcgaggaagcactgttgtagatgacagagctttttgtttcacagctgcggggattctgctgaccatcttttagaaaattatttcataatttattctggctttgcccccttgctccttggtttattccctcatgttttactcaaaataaacatggccatgaactcaggggccattgggattctcccctctggcagccccaggtgggagctgggagggtccccagcccaggaggtggctggattgcagggctggcagcccccacgtggtggcatcctgacaggcacagtgagacccttgctgggtcaggtctcctttgtgtgtgaagctggggcagagtatgctacgaagggaccaggccaggccacagggctctcctcccagtctttatctgaaggcccagccaaagcacccctctaaaccggtcacctaggggaaatgcaaaaacctgcaaaagatccacctgtattccctgtgtgtgtgtgtcaaaatgaccatttgccaacctggctgtgaggtaatgtatgtaaagcaccgagtcaggtgcctgatacgcagtaggtgcttagcaaacggtagctaatactatcatcattgtcattgttattgtgacacccatgagcccacagacagagctgtattaagtaacctgttttgaatccagacattcactcccccacttgctatgactaccctcctttgatctatttttggtcataggtaaaaaaaaaaatctctcttgggagcatataaacaaaaaacatagaagc

SEQ ID NO: 221465 - DNA, 1000 bp, Homo Sapiens
accagctgtcggactctgccaaatattacctgactgacattgaccgcatcgccacaccatcattcgtgcctacccaacaagatgtgcttcgcgtccgagtgcccaccaccggcatcattgagtatccatttgacttggaaaacatcatctttcggatggtggatgttggtggccaacgatcggaaagacggaagtggattcactgctttgagagtgtcacctccattattttcttggttgctctgagtgaatatgaccaggtcctggctgagtgtgacaacgagaatcgcatggaagagagcaaagccttatttaaaaccatcatcacctacccctggtttctgaattcgtctgtgattttattcttgaacaagaaggatcttttggaagagaaaatcatgtactctcatctaattagctatttcccagaatacacaggaccgaaacaggatgtcagagctgccagagactttatcctgaagctttaccaagatcagaatcctgacaaagagaaagtcatctactctcacttcacatgtgctacagatacagacaatattcgctttgtgtttgctgctgtcaaagacacaattctacagctaaacctaagggaattcaaccttgtctaaaagctgctgcccactcctcccctataacagaagatgtgatttgcaaactccttgttttatttgcaagtgcttctgacatcaccagagccagccccatgccaggaactaaggatgtcatgtagatcgtggggacagagatgggtgatggaacttggaagatatttgagtttaccaacatactttaaaagtccttacatcccaaattgtgtttataattattttcttgacttttggctataagattttgtgtaatttttgaatttggtgttttctagaatttttaaaagccactttgatttagttttaaatatgtttaaaaatagcgattaaaattatgtaagcaaggaaaaaaaaaaaaaaaaaaaaaaaaa

SEQ ID NO: 221466 - DNA, 1000 bp, Homo Sapiens
ggcatctccccttcagatcacaccacagacagctaccgtggcctttgataatgtgcattttgaatacattgagggccagaaagtccttagtggaatatcctttgaagtccctgcaggaaagaaagtggccattgtaggaggtagtgggtcagggaaaagcacaatagtgaggctattatttcgcttctatgagcctcaaaagggtagcatttatcttgctggtcaaaatatacaagatgtgagcctggaaagccttcggagggcagtgggagtggtacctcaggatgctgtcctcttccataatactatttattacaacctcttatatggaaacatcagtgcttcacctgaggaagtgtatgcagtggcaaaattagctggacttcatgatgcaattcttcgaatgccacatggatatgacacccaagtaggggaacgaggactcaagctttcaggaggagaaaagcaaagagtagcaattgcaagagccattttgaaggaccccccagtcatactctatgatgaagctacttcatcgttagattcgattactgaagagactattcttggtgccatgaaggatgtggtcaaacacagaacttctattttcattgcacacagattgtcaacagtggttgatgcagatgaaatcattgtcttggatcagggtaaggtagccgaacgtggtacccaccatggtttgcttgctaaccctcatagtatctattcagaaatgtggcatacacagagcagccgtgtgcagaaccatgataaccccaaatgggaagcaaagaaagaaaatatatccaaagaggaggaaagaaagaaactacaagaagaaattgtcaatagtgtgaaaggctgtggaaactgttcgtgctaagtcacataagacattttctttttttgttgttttggactacatatttgcactgaagcagaattgttttattaaaaaaatcatacattcccattttctataaaaaaaaaaaaaaaaaaa

SEQ ID NO: 221467 - DNA, 1000 bp, Homo Sapiens; identical to SEQ ID NO: 116169

SEQ ID NO: 221468 - DNA, 1000 bp, Homo Sapiens
cgcctgagtcaggacacctggcttcttgaaaagttcgctctgccagaaaccacctagggaccacgttagctgccttccttgagctccccaggagtcggtttccacatctgtgaggtggagggctggtgtggaggtgctcatggggtgcggtgcttgggagacagccaggcccagggtggctgctgcttcctgctaagtgggggaggtgagacagatctggaaagccgtctccctcagatggtttcatttaatgctttatactgccgagtctgggggcttgttttggtttgggggcagccatcctccaccagaaagggggagctccttccgctgcggctccagatagatggggatgccgggctccaggccgaccagcacttgggatctgatgggacacggccagtgcctaggggtgccaagtccaaggcctcccactgggagtcatcgctgagaagatgccaatgtttcatccaccggctgcacaggcacaaactcccccacccaggacggctgtgatgaggtggccctccctgtcaaccctggtccctggagtccccagcacctggggccctggtggggctgatgtcacaggtgtttactgtgctgctgcactggtcctatgccagcctcacccatgtggggaccacggaaggcacactcccttacccccggtgccgggccgtgcggtcccccagacggacagcagctgtggcgacctgcgtttctccctgggcctgtgcttcctgtagttagtccgtcccctggttcccctgtggctcagaggccgcgtccctggcttgtacatatgtgattgctgtgggcacaccccagaccccatgtcatagctgccgtcccgacgtcacgacgcctgtcccgatgtcttacacccgagtgttagccctaggctcctgtactgtgcgtgcacttgaggctctgtccaattaagaaataaatgtggctcttactcaacacaaaaaaaaaaaaaaaaaaaaaaaaaaaa

SEQ ID NO: 221469 - DNA, 1000 bp, Homo Sapiens
ttatgatagtttgtcctgtgtccttagtgatgtgtgtgtgtctccatgcacatgcacgccgggattcctctgctgccatttgaattagaagaaaataatttatatgcatgcacaggaagatattggtggccggtggttttgtgctttaaaaatgcaatatctgaccaagattcgccaatctcatacaagccatttactttgcaagtgagatagcttccccaccagctttattttttaacatgaaagctgatgccaaggccaaaagaagtttaaagcatctgtaaatttggactgttttccttcaaccaccattttttttgtggttattatttttgtcacggaaagcatcctctccaaagttggagcttctattgccatgaaccatgcttacaaagaaagcacttcttattgaagtgaattcctgcatttgatagcaatgtaagtgcctataaccatgttctatattctttattctcagtaacttttaaaagggaagttatttatattttgtgtataatgtgctttatttgcaaatcacccactcctttacaaccatactttatatatgtacatacattcatactgtagaaaccagctcatgtgtacctcatatcccatccttaagagaagaaatgttataaagtagaactaaatataaattttcagaattaatgcattcaaagtaatatatcaaatccaggactttgttaacttcaggtaaaaacttcattagggtaatatcatctcaattttttcaaatgaaaggattctctaattagaaatttatatgtcagagctgttataaatttatcaactgtcaaatatgttctggacagctaaatcatttgagatttttggttttttgatttctattccctaacttgtgaagacaatgaaaaatcaggcagaaatatttagtatctagtcagtatctgtagctacactgtataactgttcttcaataaaatggttcatattttatagaaaaaaaaaaaaaaaa

SEQ ID NO: 221470 - DNA, 1000 bp, Homo Sapiens
gcccaggtgtacgaagctacccagggagatctgaatgatgctaaaaataaacagaaatttgttttaaaggtccaaaagcctgccaacccctgggaattctacattgggacccagttgatggaaagactaaagccatctatgcagcacatgtttatgaagttctattctgcccacttattccagaatggcagtgtattagtaggagagctctacagctatggaacattattaaatgccattaacctctataaaaatacccctgaaaaagtgatgcctcaaggtcttgtcatctcttttgctatgagaatgctttacatgattgagcaagtgcatgactgtgaaatcattcatggagacattaaaccagacaatttcatacttggaaacggatttttggaacaggatgatgaagatgatttatctgctggcttggcactgattgacctgggtcagagtatagatatgaaactttttccaaaaggaactatattcacagcaaagtgtgaaacatctggttttcagtgtgttgagatgctcagcaacaaaccatggaactaccagatcgattactttggggttgctgcaacagtatattgcatgctctttggcacttacatgaaagtgaaaaatgaaggaggagagtgtaagcctgaaggtctttttagaaggcttcctcatttggatatgtggaatgaattttttcatgttatgttgaatattccagattgtcatcatcttccatctttggatttgttaaggcaaaagctgaagaaagtatttcaacaacactatactaacaagattagggccctacgtaataggctaattgtactgctcttagaatgtaagcgttcacgaaaataaaatttggatatagacagtccttaaaaatcacactgtaaatatgaatctgctcactttaaacctgtttttttttcatttattgtttatgtaaatgtttgttaaaaataaatcccatggaatatttccatgtaaaaaa

SEQ ID NO: 221471 - DNA, 1000 bp, Homo Sapiens
attaaatgcttaagcttattaggaccataattcactttaaatataattgtatagaatatatttgcgtcgatcaaataattgcttcagatgaattcttagactcttgataatatcacacctaatttaacttgattttacaagctgtacaatccagttttagttttctattgtgataataacttttttcaaaccagtttcacatcttaatgaaataacattctctgactgcacttgcttcagtactctcttgcctgcctgtttttgacctctgcatgagttggattagatgtttttcttactgtcacttctaaatagaaaatgacagtgttataaaaaagggaaggataaaacctttgacatccccttgtgtctcaaaagtccacagttattcaaacaatggctttttttgtgatgagagtatttgttaaaaaaaaaaaaagacttcaagaaaaataaaagttcagtggagctgcaaataaatctggtgaataatttcatctttggtaatctcccatttcctgagttcttcctcaatccaagctgtcctgtgtagtatataacatttgggcattttctctgatatactatactctcatgttctataaatttctgtcccgtaattctaacactttacattttttctttgctatcagctatagctattcatggaagggaagaatcactaaatacttgtctagttatagcatgatgtgagcatctcctccttatccctcgatgcctggcttggtgtctggcaaacagtccataattagcagatgttgaaagaccgtttacaaagcagaatttggggatttaaagtgcaatgatacaacaaaaagatttaattacagcttccagtgttttgactatgtgaaccatatccaactacttttttgaaaatctagttctatgtaatatatttctgtggcatcaaattttagttgattgtattagtcaataggaagtggtggaaaatttctaaataaattcaactattaaa

SEQ ID NO: 221472 - DNA, 1000 bp, Homo Sapiens
ctagatgacctcattaaccgatgctttaccaaacagcaaaccaagagattgctaattgctgttgaaagcaaaaatgctaatattaaaagtcacaatgttctttatatacaataatggaaaaaaaaaaaagaggaaaaccctcaagggcatgagcattggatacagcagtagacattttaacaagaagatgaatggcgtccgtgggttgctaactgaactttgaagacccgctacaaaacgcgcagatgtgcagcagattggaaggagacacagatgttcggtttttttcctgtttctgaaaagaaataataatatccaggtcaacagaatgaaaaatgaaagatgatttgcaatgggatgtatgaatacagcagcaagaaaaaaaaatgccataatacaaaaggctccatatatatatatatatatatatatatacacacacacacacgcacatatacacacacacacacacacacacacacacacacacacacacacacacacacacacaagtaagagactcagcctgcagttaattagcattctggcagttttgacatcagccagctgccctaaataacccttcaacgtttcttcacttttgcaaggttccacagagtaagacattgggtctattccagctcattcattttatattgaaaaaaataattttaaaaatggtggcttcagctccagcccctttccaaaatttttcaaccccaccctgtttggatttttaattaaaaactagtagttctcttggtgttaaaacacttctgtcctgtgaggtttcccaatggtgtttttcttgtaaatgtgttggacaaatgtgaagatgcattgtagtttaaccatatgcccacatttagtctctttattcctagttggtgagaaacctgtatctttctatgctgcttttatatctgtatgtattagtgatatttctctagtagttaaaaaaaaaaaaaggaaaaaaagactctttttggttgtcctcaag

SEQ ID NO: 221473 - DNA, 1000 bp, Homo Sapiens
tgaattttgcaaaatgggaaagtgggcgcttgccaagggccaggctgcatggattctcacatcagagttctctggccctagaaaggcttagaaaaggcgtaagggaactcataaaggctagcagcatgcggtattttaactttctgcctcggcctctgtggatgcagaaatctgccctacaaaatgctcttcattggttgtctctgtgagagcactgtccccacccaacctgtcacaacggccagaaccatacaccagagacacactggcaggttaggcagtccttctggtgatcctattccattccctcctgctgcggtttctcttggcctgtcctcactggaaaaacagtctccatctcctcaaaatagttgctgactccctgcacccaaggggcctctccatgccttcttaggaagcagctatgaatccattgtccttgtagtttcttccctcctgttctctggttatagctggtcccaggtcagcgtgggaggcacctttgggttcccagtgcccagcactttgtagtctcatcccagattactaacccttcctgatcctggagaggcagggatagtaaataaattgctcttcctaccccatcccccatcccctgacaaaaagtgacggcagccgtactgagtctgtaaggcccaaagtgggtacagacagcctgggctggtaaaagtaggtccttatttacaaggctgcgttaaagttgtactaggcaaacacactgatgtaggaagcacgaggaaaggaagacgttttgatatagtgttactgtgagcctgtcagtagtgggtaccaatcttttgtgacatattgtcatgctgaggtgtgacacctgctgcactcatctgatgtaaaaccatcccagagctggcgagaggatggagctgggtggaaactgctttgcactatcgtttgcttggtgtttgtttttaacgcacaacttgcttgtacagtaaactgtcttctgtactatttaactgta

SEQ ID NO: 221474 - DNA, 1000 bp, Homo Sapiens; identical to SEQ ID NO: 116178

SEQ ID NO: 221475 - DNA, 1000 bp, Homo Sapiens; identical to SEQ ID NO: 116179

SEQ ID NO: 221476 - DNA, 1000 bp, Homo Sapiens
tgagctcggctggggccgccaccagcagtaccgggtgcgtgtggaggacatcatggtgcgggatgttccccatgtggccctcagctgcaccttccgggacctgcgtttggcactgcacaggaccaagggccgaatgctggccctagtggagtcccctgagtccatgattctgctgggctccatcgagcgttcacaggtggtggcattgttgggggcccagctgagcccagcccgccggcggcagcacatgcaggagcgcagagccacccagacctctccactatctgatcaggagggtccccctagccctgaggcttctgtctgcttccaggtgaacacagaagactcagccttcccagcagcccggggggagacccacaagcccctaaagcctgcactcaagagggggcccagtgtcaccaggaacctcggagagagtcccacagggagcgcagagtcggcaggcatcgccctccggagcctcttctgtggcagtccaccccctgaggctgcttcggagaagttggaatcctgtgagaagcgcaagctgaagcgtgtccgaatctccctggcaagtgacgcggacctggaaggcgagatgagccctgaagagattctggagtgggaggagcagcaactagatgaacctgtcaacttcagtgactgcaaaattgatcctgctcccttccagctggtggagcggacctctttgcacaagactcacactatcttctcactgctgggagtggaccatgcttatgtcaccagtattggcagactcattggaatcgttactctaaaggagctccggaaggccatcgagggctctgtcacagcacagggtgtgaaagtccggccgcccctcgccagcttccgagacagtgccaccagcagcagtgacacggagaccactgaggtgcatgcactctgggggccccactcccgtcatggcctcccccgggagggcagcccttccgacagcgacgacaaatgccaatga

SEQ ID NO: 221477 - DNA, 1000 bp, Homo Sapiens; identical to SEQ ID NO: 116183

SEQ ID NO: 221478 - DNA, 1000 bp, Homo Sapiens; identical to SEQ ID NO: 116184

SEQ ID NO: 221479 - DNA, 444 bp, Homo Sapiens
ctttagtcaggaaggacgttggtgttgaggttagcatacgtatcaaggacagtaactaccatggctcccgaagttttgccaaaacctcggatgcgtggccttctggccaggcgtctgcgaaatcatatggctgtagcattcgtgctatccctgggggttgcagctttgtataagtttcgtgtggctgatcaaagaaagaaggcatacgcagatttctacagaaactacgatgtcatgaaagattttgaggagatgaggaaggctggtatctttcagagtgtaaagtaatcttggaatataaagaatttcttcaggttgaattacctagaagtttgtcactgacttgtgttcctgaactatgacacatgaatatgtgggctaagaaatagttcctcttgataaataaacaattaacaaatactttgaaaaaaaaaaaaaaaaaaa

SEQ ID NO: 221480 - DNA, 1000 bp, Homo Sapiens
tgaccaccctgcctgtggaggtgacctgttaggtctcatgcccactcccccaggagcagctggcactgacagcctgggggggccgctctccccctgcagccgtgcaggactctagctcatgagtggaaagtcacctacaggactgggccgggcccagggcctctggcttccctgcccaatcctccctggagaagggacatgggaatgaattgaaatggggcgctggacacctacagcagcacgcatgtccctccaaggctgtcttctcccagagcacaagaaggccagcccactgggccctggggctgccctcggcaaccgtggggaggccatttgctgccctggggcatcatgggcaactcgtgacagcctctgactcaccacgatgacgcctctggacctcggtgatgccttccgacaccactgggaaccaagggccctcactcaggaaccctggagacagaagtcaggtgtcatcatcagacttgcggccacagcactagagtcacccccccaggcctccagaaccttactggcactgtggcactgccaccagcaatgccctgccttgctgccttcaccctgaacatttagtaccctgcaggccaggccagcttcccctcacttaaccaccccataccagtcacctcctgctccttttcctcttttgtgagaagatgggggctggagggggcagagtggcctgtgagcaagagccaggggtgtcccagtcccagcctctggggcagagcttgtagccctggatggcctctggggcaggaccactagctaagcaagccaggagaagacccctgcccaagtggctcttgggacaacgtgctgcttacactccaggtgtggaccggccgcagcccccactgacctgcccatgtccagagggactggacagccagggcagggctttggggggcactagaagatgagggtgtcggctgtgaggcgggtggctggtataaataatatttatcttttcaaccag

SEQ ID NO: 221481 - DNA, 1000 bp, Homo Sapiens
gggcaaagattaatctaccttgcagtgtaggaattctattgagtggcagtgtcattgagcagtatatatataaagcacagatttgcatttcagaatattagccagtaccagctttggtaatgttagcagttctggagcttaattttctgtggatcatttcctgtagtgtgtaaatgtgttgccctctgcccgctttgatacataaacttttgcaggaatgggcaacctgagagctgttaactttcatgctacagaaagctgcttgccattctcttgcattgtgacaagaattgttacctgtcattttgcactgtaaattgctggcagatgctttacagtcaatagtgttgctttaaattgtgcccctcccaacatgcttgatgtttggcctgatctccaggcaaaaggagtgagatgaatcaaaaccagtgaacttttttttttaatgtttttaattcccttttaacccagtgtactaggtcaatcaggaggcatctggaaagggggggaaaaaagcaaaaaacaaaattaaaaaaaattgatttccatattttttcaaaaccctaaaatattacaaaataagtcccgcatatactttaatgttttaactcttttggacaaaggaatcaattacttgaagttgcttttttgactctgcctacttctgagcaaactatttgcgactcacccacaattccttggagatcaaaatcctgcagatgcctcctgatgggacatagccctaactccttaacaactgtagcaagaactgcacggtacaaacccaaaaaagaacaagctcatctatttggaacccaagcctcatattttctgtccagtcaatgttggttactaaatagaaaacctaattaaggaagtaacttttttccagggaggggtgggagagggaatttaaaaggtgtcaacttttgaccaaaaaaattgtgcccttgtaccgatgcagctctctttctcccccacctcttgcgagataagaggg

SEQ ID NO: 221482 - DNA, 1000 bp, Homo Sapiens
tcaccgggagaagtcggcctcttcctgatgggcaaccacaccactgcctggcgccgtgcccttcctttgtcctgcccgctggagacagtgtttgtcgtgggcgtggtctgcggggatcctgttacaaaggtgaaacccaggaggagagtgtggagtccagagtgctgccaggacccaggcacaggcgttagctcccgtaggagaaaatgggggaatcctgaatgaacagtgggtcctggctgtccttggggcgttccagggcagctcccctcctggaatagaatctttctttccatcctgcatggctgagagccaggcttccttcctggtctccgcaggaggctgtggcagctgtggcatccactgtggcatctccgtcctgcccaccttcttaagaggcgagatggagcaggcccatctgcctctgccctttctagccaaggttatagctgccctggactgctcactctctggtctcaatttaaaatgatccatggccacaggctcctgcccaggggcttgtcaccttcccctcctccttcctgagtcactccttcagtagaaggccctgctccctatcctgtcccacagccctgcctggatttgtatccttggcttcgtgccagttcctccaagtctatggcacctccctccctctcaaccacttgagcaaactccaagacaccttctaccccaacaccagcaattatgccaagggccgttaggctctcaacatgactatagagaccccgtgtcatcacggagacctttgttcctgtgggaaaatatccctcccacctgcaacagctgcccctgctgactgcgcctgtcttctccctctgaccccagagaaaggggctgtggtcagctgggatcttctgccaccatcagggacaaacgggggcaggaggaaagtcactgatgcccagatgtttgcatcctgcacagctataggtccttaaataaaagtgtgctgttggttaaaaaaaaaaaaaaaaaa

SEQ ID NO: 221483 - DNA, 1000 bp, Homo Sapiens
gccctcgcagaaatgccagatagcgcggcagctctgctgggcacttgctgcaaactccagatcattcccacactgtgccacttgcttcgtgctctgtctgatgatggagtatctgatcttgaagacccaaccttgactcccctgaaagatacagaaaggtttgggattgtgcagcgcttgtttgcctcagctgacattagtctggagagactgaagtcatctgtgaaagctgtcattctgaaggactctaaagtcttcccactgcttctttgtataaccctgaatggactctgtgctttaggcagagaacattcatgatgtcatatgtgaactagaagtacgtgttactggccaaggctatttttcagaactgttaaaggtcatatgcacgttaaaagttgaccaatgaaatgaatttacagaacagtttaagaagtggtgacattttgcatgatgaatgacctgacttttagccaccaggtactctttaaacagttttccttatcagaggccctcctgtgctggtgacccagcatctgagttaggttccagcatgtaaagagctgggagggcggagaattcttagcatacattcagacgttttttctgcacaataataagtccatctgtcacttgcattccactttttgttacatagaaagagtctgaccctttaatccaaaaggtctttttacattgtgaatgctgtgggaaggcaatttctctgcacacaagaggctacgttttggaagtgatgtatgttatttgatgactgaaaatgaactgtaaatgctcctagagtatattcctctgctgaacaaaattaaacttcaaaaaaatctaacagtaacacacccctgcttgggaccctagctatatgcattttatgtgaccttgccatgcttcagtgaacatactaattctatgtctagcacatgttgatttcctatgtattctgggtattctattaaaggaaactttgaactattaaaaaaaaaaa

SEQ ID NO: 221484 - DNA, 1000 bp, Homo Sapiens; identical to SEQ ID NO: 116195

SEQ ID NO: 221485 - DNA, 1000 bp, Homo Sapiens
agctggcaaagaagttgctgttggggactcggaaggccgtatttgggtctatgacgttggagagcttgcagttccccacaatgatgaatggacccgatttgccaggacccttgtggaaattcgtgctaacagagctgatagcgaggaggaaggcactgttgagttatctgcctagtggaaatgagccacccccactgcagcccccacctttgtgtcctagagctcagcgtctgcagtcaagtctcttgtattcggtgtccattcagtatcagtattgctgtgacattttgggtgccatattgtgccagctttgctccaagtattctaaatgtgtcccatcatgctttccactgacccaaaattcaccacagcatttctatctttattatttctgtctcaaaaatgaagagaagggggttatgggttaagttgctgccttttaactactttgtagctgtatttaatagctggaaacctctggttgaatttgtgcttacatgcactcctggcatagtcctattaaatccatatgaagccagatatgattgggtgcagatgtggtgttcctcatattatggtacagggccaaagacttgagacgtggtgttttacatggtgactcacattatgaatggatttactagaagaacattgctgctccttatttattgtagtgtgctgcatggaacgtatttatttgaaagcattaaaataaatgatcctagagcatgtgcataatgagaggactgtattctctctgctgctgttgaggttatattaagttccacatagcaattacagtatgccagttccactgaagacatgaaatctttagaggtttcttgcagtgaacgaaatgaattttaagtccttattatcgggtactttaacaatatttcaaatatcattgaccactaatacttctcactgaagctaacacagtctgagaaaagtctatggttcctaaatatgacatcagtgttgccaataaaaccaaaaa

SEQ ID NO: 221486 - DNA, 1000 bp, Homo Sapiens
gtgtcatcccattcacccatgaatggatgcaggaattgtgttccgtgcatgcagtggaatagtaccagccttccgcaggaaggaaattctgacatatgcggtgacatggatgaaccttgagtacattatgcgaagtgaaataagccaccctgtggggatggagaatgggtagttagtgcataatggatacaaagtttctgattggggtgatgagaaagttctggaggtggatggggaggatggttgcacaacagtgtgagtgtacttaatgccactgcaactgtatatttaaaaatagttaaaatgataaattttacattatgtatattttactgcaattgaaaaaatcatactctattaccaatttttcagaactcatagataaatatgaatgtagggaagctgtaagccagcccatatacagaaactatcactatctacatttttcatatgtgttcagacagagcctattacaagtctcataaatttcagtaaacaatcacaaattattttggcacactttcatgtaggttctgttcactgctgaaatattctaaataaaatggtttagagttttactgtaactatgaataattatgctataattatagtatcccacattcggttgagcaacattatacaaaataagtgtcgagttactgtgcaccaactataaatacttgaaaggtctgtagagacatttgcttacaaactggtagacagaatgtagcttagtggaattcttaaattatgggaatgtattcacaggaagacggtgattcttgcccttaattcataattgaaaatatgcagtaacaagcataaaactcacatcttaatgaagatgtatctaccagtgtcattcaattagcagatgtatatgtatgcataattaatttggaaaatgttattttatggaatgtctgctatatgcttttggtaataatgctgtatataaaatttgcactggaaattctgtttcctgataaaaaaaaaaaaa

SEQ ID NO: 221487 - DNA, 1000 bp, Homo Sapiens
cgccagctgccccaaccactttgagggccttttccgctacaagagtatccctgtggaggacaaccagatggtggagatcagtgcctggttccaggaggccataggcttcattgactgggtgaagaacagcggaggccgggtgctggtgcactgccaggcgggtatctcgcgctctgccaccatctgtctggcatacctcatgcagagtcgccgtgtgcggctggacgaggcctttgacttcgttaagcagcgccggggggtcatctcccccaacttcagtttcatggggcagctgctgcagtttgagacccaggtgctgtgtcactgaggtggtgcccctctgcctgcctgccccactgtgctggcaggagctgactgtggactggtgggctcccctctgggccagcacagtcccctcacctccggcagggctgctacctcctcagagtttcagaagcccccacatgggggctctaggaatgccggcatgctggtctttccgacctggtgctcttctgctgggggactgaggctggccctcattcggggtcgggaaccaagggtgtgtctgctctttccctccccatcctctggcagaaatcagctagacgctataccgtggactctccctggtccaccaccatgttgaagcccttggcagcctgagagctccaaggaacaagctgtgacaaccaggagccctgtctgtgggttcgtctgcccagggcctggagcccaagccctgtgttcctggggaagctggggacttgggaagtgatgggtgtgtcatgttgcgtgtgtctgtctgtgagcctttcacacctgtgctggcgctggaaaattatttgtgctcagctgacatttaacacttcctcccccgcttcctcctagccctgtgggcaggggttggaaacttagcactttatatttatacagaacattcaggatttgtcaataaaatattgttatatttaaaaaaaaaaaaaaaaaaaaaaaaaaa

SEQ ID NO: 221488 - DNA, 1000 bp, Homo Sapiens
accccggcgaggccccgaagctctgcaagctggacagcccgtcgggggccgcgctgggcctgtcctcgcccagcccggacagcccggacgccgcgcctgaggcgcgcccacggccccgccggcggccccggccccccgccggctcccccgcgcgctcccccgcgcacagcctcggcctgaacttcggcgatgcggcccggcagactccgcggcacggcctctcggccctgtcggcgcccgggctgcccggccctggccagccggccggccccggggcctgggcaccgccgcttgactccccaggcacgccgtcgcccgacgggccctggtgcttcagccccgagggcgcacagggggcgggcggggtgctgtttgcgcccttcggccgggcgggcgccccgggaccaggcggcggcagcgacctgcggcggcgggaggcagcgagggctgagccccgggacgcgcggaccggctggcccgaggagccggccccggagacgcagttcaagcgccgcagctgccagatggagttcgaggagggcatggtggaggggcgcgcgcgcggcgaggagctggccgccctgggcaagcaggcgagcttctcgggcagcgtggaggtcatcgaggtgtcctgacccctccgctgccctcggccccgccgcccgcagccaggcccgttataaatgtatattatatataatgcaaagaaaggtaaatggttttactgggatttttatcgagaagtaaatatttcgattttttatttatttaagctgttcattctggcaatgatttggcaacagtgcgggtggtcctcgagctctatttttactgtctggtatttaaactgaaacatacgtttctaagcaatacgaggccaccttcagtcgcaagctgggtgccaggcctggggccctcccagttcccccgccccaggaaacactgctgacctttgcaaaggctgccgagctttcgtgcactttttacataacaaaaaggg

SEQ ID NO: 221489 - DNA, 1000 bp, Homo Sapiens; identical to SEQ ID NO: 116196

SEQ ID NO: 221490 - DNA, 1000 bp, Homo Sapiens
tgaggccgagttctcggtcaagacccgaccccactggtgctgcacgcggcagggggaggctcggttctcctgcttccaggaggaagctccccagccacactaccagctccgggcctgccccagccatcagcctgatatttcctcgggtcttgagctgcctttccctcctggggtgcccacattggacaatatcaagaacatctgccacctgaggcgcttccgctctgtgccacgcaacctgccagctactgaccccctacaaagggagctgctggcactgatccagctggagagggagttccagcgctgctgccgccaggggaacaatcacacctgtacatggaaggcctgggaggatacccttgacaaatactgtgaccgggagtatgctgtgaagacccaccaccacttgtgttgccgccaccctcccagccctactcgggatgagtgctttgcccgtcgggctccttaccccaactatgaccgggacatcttgaccattgacatcagtcgagtcacccccaacctcatgggccacctctgtggaaaccaaagagttctcaccaagcataaacatattcctgggctgatccacaacatgactgcccgctgctgtgacctgccatttccagaacaggcctgctgtgcagaggaggagaaattaaccttcatcaatgatctgtgtggtccccgacgtaacatctggcgagaccctgccctctgctgttacctgagtcctggggatgaacaggtcaactgcttcaacatcaattatctgaggaacgtggctctagtgtctggagacactgagaacgccaagggccagggggagcagggctcaactggaggaacaaatatcagctccacctctgagcccaaggaagaatgagtcaccccagagccctagagggtcagatggggggaaccccaccctgccccacccatctgaacactcattacactaaacacctcttggatttggaaaaaaaaaaaaaaaaaa

SEQ ID NO: 221491 - DNA, 1000 bp, Homo Sapiens
gccaggaagcataggatgccatttcttttatagattccttggtatttctggtggggtaaggggcaggccagggctgttcacgcccatgagggaagaggaaagtgccactgggcaaggtgtcccaccctcccctcctgaccctcctacgaggcttatcctggcaatggggtagtcactgccacccttccacacacacacacacacacacacacacaaaaaaaaatcccttccttgtgggattcttgggcatctcctgcctccctcactctcacggtaattaatgtcttaattggctgttgcctggggaacaggagagctgctgcaggcagatgacctcatggggggtggagggaggtgaggtgcccaggtggctatttgccctgcagagctgggagtttcacccccaccccccaccctgttctctccttacctttggcatcctttggcctggtggggaaacagaggcccagggtggagacctaagcgggtataagaccaggtggcctgctccttttctgggccctagcacaggtgggtaacccccacccaacccagctcctgctgctgtcccagtcttgggctggggcctggaaagaggaagaggctgcctggggctgggccagcccgctgtgcactttgaccccagttccttgccagcacggctgctaacagactgccacttgagtgcgccttgcaggcactcccagagcagccatggaaggagctggccctcacaccatccacctccacactgcctcctggccagctgcccaccccagtgccaggtgggagagggagcagaacagccagccccttccaggtggcagtcggaagggtttttgtttttgtttctgttgccatttgtgtaaatactagtctttttggaaaaaaaataatgtaaagatgttttgtataaactctgaattattttcttgttgcttttttcttagaaaaaaatgagaactaaaaaaaaaaaattaaccacatggaaaaaaaaaaa

SEQ ID NO: 221492 - DNA, 1000 bp, Homo Sapiens
tcatcaataaatatttattacattctgacagggtgtgtggcattgtgttctatgccagagtgacaaagttgattcacccctttttggggaccttaatatattttttaagggatgtgcctatgcattgatgcctgaaaaatatgtataaagaaatgaggttgactcttctgagcagttcatcttttccagaggtaagggtaggaggccaacttcagggtctgggtctgagcccgtgggcaagccctggccgagtgagctccaatgctaactcatgtgccgatctctagagcagtgggaaactaccccgctgcaccaaatcaagtagcttcaccttgtgtatgcaggccccaagttattttttagcaatcttacgagtgaaatgttctggtgggttgaaaaacgttcttattttaaagaaaggttgtgctcgctacactgctggtgtgtgcattctgagacctcttgtattcaatctgtgaaggatatgtgtattaatccgtacacccgtatagcctcaatatttgtctgaagacacttaaattctgacccataaaggaaagttctagaagcaatattttcacttatttaacattctccaaacaacatcaagcattgatacacactgaagagtgcgtttattttttgtatcactctaagtatgttggaatatgcaaggactgtggttcaaattagaatgtataaggcatattataatttagttcatactgaataagaaattaacagaacattgttcggttcacacgttccaaactttgagtgatttctggagttagacatagattttctattttgttttaatttgtcaaggtatttttcttcccttcatgaactttaggtacacataacttatgtcatttatttatggtcttttatacctagtttgtaaaattgtaaaatagcaaactaaatgcaaagagtttgcatttgaaaataataaagtagttgccgtatacaaccctgcaaaaaaaaaaaaaaaaaa

SEQ ID NO: 221493 - DNA, 1000 bp, Homo Sapiens; identical to SEQ ID NO: 116204

SEQ ID NO: 221494 - DNA, 1000 bp, Homo Sapiens
gcttcctcaggcagcgggagggccagttcagcagcctgcagctggtggccatgcagcggggagtggctgctgccatgcagtacctgtccagctttgccttcgtccatcgctcgctgtctgcccacagcgtgctggtgaatagccacttggtgtgcaaggtggcccgtcttggccacagtcctcagggcccaagttgtttgcttcgctgggcagccccagaggtcattgcacatggaaagcatacaacatccagtgatgtctggagctttgggatactcatgtgggaagtgatgagttatggagaacggccttactgggacatgagtgagcaggaggtactaaatgcaatagagcaggagttccggctgcccccgcctccaggctgtcctcctggattacatctacttatgttggacacttggcagaaggaccgtgcccggcggcctcattttgaccagctggtggctgcatttgacaagatgatccgcaagccagataccctgcaggctggcggggacccaggggaaaggccttcccaggcccttctgacccctgtggccctggactttccttgtctggactcaccccaggcctggctttcagccattggactggagtgctaccaggacaacttctccaagtttggcctctgtaccttcagtgatgtggctcagctcagcctagaagacctgcctgccctgggcatcaccctggctggccaccagaagaagctgctgcaccacatccagctccttcagcaacacctgaggcagcagggctcagtggaggtctgagaatgacgatacccgtgactcagccctggacactggtccgagaagggacatgtgggacgtgagccgggctccaacagcctctgtgagagatgccccacaccaaacccaaccctcccgatggctgcattccctggtcctccgcctctccaccagccccctcctcattaaagggaaagaagggaatttgcaaaaaaaaaaaaaaaaaa

SEQ ID NO: 221495 - DNA, 1000 bp, Homo Sapiens
ctgaaaaaatttaaactgaattttttgaccttggaaaatatttttcttactttaccaaggtgaagtttccttaattagactaattattttatccccatcccagggtataaacaggaattgttttgatagtggtggagttattcactgcaacaaagcaacaatgttgtccatgattcaaaatctaagcagtttcgattttgcctgtgaatatggtgtctgtcattcagggcatagctcactgtaggctagcctctgcttacttaagtctcttctctgacatactcaatggaagaatatttagatttatttaaagttcttaatgccaacagtttaaaaaaaaattaaaacatttgaatgaactgtaaagtacagccataccttggacatgcaaatataaatctatggagcattctcaagacagtttgtcatggctctgttgattgcaactccttgtatagcttgtattttgatttagtttatattctgcttattatgtatactgtgttcttatatatgagaaagcacaaatgcgaaagaggtcatgtcttctcaaaatctagcaaaggaagtagtctgcattggtgtgcattacagtattttgcttaatgaaagcctcagttctgaatgttgatatgagtagttaaaaggaagtggggccattttatgtgtttatctgtgtcaagtatttctggtaataagaagcacttaatttacacatattttaatcctgtgaaagattccacatagagaaaagaaagatacctaaccttcaacaaatgttatttttggaaacacaatttttgtcattaaatgttatattatttcacatatataaaacagatgttatgtaagaatgttgtatattttaacataaatcatttagagaaattatctagattcattaattttcatagtgcctttttcacatgagtcagctggaaagtctgcaataaacagtatttgctgtctgttaataaatggtttctgtctcattaaaaaa

SEQ ID NO: 221496 - DNA, 1000 bp, Homo Sapiens
gagcagctgcgagaagctctgcacgaggccctgctggagtatgaagccggccgggctggccccggagggggtgctgagcggcggcgggcgggcaggctgctgctcacgctaccgctcctccgccagacagcgggcaaagtgctggcccatttctatggggtgaagctggagggcaaggtgcccatgcacaagctgttcttggagatgctcgaggccatgatggactgaggcaaggggtgggactggtgggggttctggcaggacctgcctagcatggggtcagccccaagggctggggcggagctggggtctgggcagtgccacagcctgctggcagggccagggcaatgccatcagcccctgggaacaggccccacgccctctcctccccctcctagggggtgtcagaagctgggaacgtgtgtccaggctctgggcacagtgctgccccttgcaagccataacgtgcccccagagtgtagggggccttgcggaagccatagggggctgcacgggatgcgtgggaggcagaaacctatctcagggagggaaggggatggaggccagagtctcccagtgggtgatgcttttgctgctgcttaatcctaccccctcttcaaagcagagtgggacttggagagcaaaggcccatgcccccttcgctcctcctctcatcatttgcattgggcattagtgtccccccttgaagcaataactccaagcagactccagcccctggacccctggggtggccagggcttccccatcagctcccaacgagcctcctcagggggtaggagagcactgcctctatgccctgcagagcaataacactatatttatttttgggtttggccagggaggcgcagggacatggggcaagccagggcccagagcccttggctgtacagagactctattttaatgtatatttgctgcaaagagaaaccgcttttggttttaaacctttaatgagaaaaaaatatataataccgagctc

SEQ ID NO: 221497 - DNA, 1000 bp, Homo Sapiens
tccatttagagagttccaaaggtggaaacaccatcctagcattcggccaaccttggaaggtggaaaaaggattgcatacggagccagagctctcaatgaaggtggctttcagtctataccaaaactcacctttcctggtggtttactaattggttgtagtcctggttttatgaatgttcccaagatcaaaggtactcacacagcaatgaaaagtggaattttagcagcagaatctatttttaatcaactaactagtgaaaatctccaatcaaagacaataggactccatgtaactgaatatgaggacaatttgaagaactcatgggtatggaaagagctatattctgttagaaatataagaccgtcctgccacggagtactgggtgtatatggagggatgatttacactggaatcttttactggatattgagaggaatggagccgtggactctgaaacataaaggttctgactttgaacggctcaagccagccaaggattgcacacctattgagtatccaaaacccgatggacagatcagttttgacctcttgtcatctgtggctctgagtggtactaatcatgaacatgaccagccggcacacttaaccttaagggatgacagtatacctgtaaatagaaatctgtcgatatatgatgggcccgagcagcgattctgtcctgcaggagtttatgaatttgtacctgtggaacaaggtgatggatttcggttacagataaatgctcagaactgtgtacattgtaaaacatgtgatattaaagatccaagtcagaatattaactgggtggtacctgaaggtggaggaggacctgcttacaatggaatgtaaactgcagctagccagtttctttcaagtatggcaagctaacgttaaaatgtttagagattaacagatttcagaatgtctttctgcatattactgaacagaatagtcacaaaatgattatcaaataaaaattttatactataaaaaaaaaaa

SEQ ID NO: 221498 - DNA, 1000 bp, Homo Sapiens
gcgggcccacacgtcggaccccggttggccaatcacaacaggggggcgtggccttaccttctcctgctcgccctcagccgcggagcctctgcggaggctgagccccgcgaccggagcgccgctctccgcttctccacccagctaacttctgctcgtctttcagagcattgtctcctccagggacttgcctggccctcctccccctccgcccccaatgggttcggtctcctttgcgctttcgcagcccagtgtttgccgcggttcccgcacggtcaggccccaggactggcttgcgagccccggggggcgggtcgtgtcgtgtccttttctctctggctaggcaggtgtgccgcaaatatttgacgaatagatggatggcagacattaactgcgtgcctggccctatgagggcggcggcgggacagggtgagcggagagacagaactgtccccgccccaccccgccacccattcctagggttcctagtcccgggaaggcaactacccaaagacgcctgggttgtcaggctcaatccttgagcctcaaccaaggagcagaggggtgcgggtaaacgaggagtggggcgaggaaagcgggatgggaacaagtggcctgtccccgcacggcccgcggctcagcctcggccgtctgccctgcactaccaaggccgaccactagaggtcagcgtcgcgccgcactcttcacccgcatgcccagagggcggccgggatgtggagggtgaacgctgtgggcagctcgggggctgaaagctgggaagagaaatctgaagaacagccccatctctttcgcctgcacacttggaactcagcaagaagggactgtttctaggtgggctgggcgcgagcagggactgtcccgagctggtataggtgagaatggagttggggggggacactaggtctccggggttcacccacctggagctggaattatcacttccgaaataaagcgcgtgtccttgcaaaaaaaaaaaaaaaaa

SEQ ID NO: 221499 - DNA, 1000 bp, Homo Sapiens
cagcagcacccagcccgtgaccagcacgacaccttcttccttcgagatccagcggaggccctgcagctcccaatggactatgtccagcgggtcaagcggacccactctcagggcggctacggctcacaggggtacaagtataactggaagctggacgaggcccggaaaaacctactgcgaacccacaccacatcagccagcgcccgtgcgctctaccgccttgcccagaagaagcccttcactccggtcaagtacttctccatcgaccgcgtattccggaatgagaccctggacgccacgcacctggctgagttccaccagatcgagggcgtggtggcggatcatggtctcaccttgggccacctcatgggcgttctgcgggagttcttcaccaagctgggtatcacgcaactccgcttcaagccagcctacaacccatacacagagcccagcatggaggtgttcagctaccaccaaggcctgaagaagtgggtggaggtcggaaactcgggggtcttccgtccagagatgctgctgcccatggggcttcccgagaacgtgtcggtcattgcctggggcctctccctggagcgcccaacgatgatcaaatatggcatcaacaatatccgggagctggtgggccacaaggtgaacctgcagatggtgtatgacagtcccctgtgccgcctggatgccgagccgaggccccctcccacacaggaggctgcgtgacatgggccactctaggacaggtcatcctccccgagtccctgctgctgcgctcctttgcatccctggccagtgaccttgtatttatgaggctctgtgaggccagcccccaccttcctctttcccacctgtcccaggaccagaatcccagggacagaggactgggtagcaggttccttctgttgtcctgtgtggtgtgtctactgtgagggtgggccctgaggagacctgtgggccacctattgtctaataaagtgggcagttgccccca

SEQ ID NO: 221500 - DNA, 627 bp, Homo Sapiens
atgtggaaatggatactgacacattgtgcctcagcctttccccacctgcccggctgctgctgctgctgctttttgttgctgttcttggtgtcttccgtccctgtcacctgccaagcccttggtcaggacatggtgtcaccagaggccaccaactcttcttcctcctccttctcctctccttccagcgcgggaaggcatgtgcggagctacaatcaccttcaaggagatgtccgctggagaaagctattctctttcaccaagtactttctcaagattgagaagaacgggaaggtcagcgggaccaagaaggagaactgcccgtacagcatcctggagataacatcagtagaaatcggagttgttgccgtcaaagccattaacagcaactattacttagccatgaacaagaaggggaaactctatggctcaaaagaatttaacaatgactgtaagctgaaggagaggatagaggaaaatggatacaatacctatgcatcatttaactggcagcataatgggaggcaaatgtatgtggcattgaatggaaaaggagctccaaggagaggacagaaaacacgaaggaaaaacacctctgctcactttcttccaatggtggtacactcatag

SEQ ID NO: 221501 - DNA, 1000 bp, Homo Sapiens
tccagatccctgaagaagatcgctgttcccattccaagaaactctgtcctattgacatgctatgggatagcaacaaatgtaaatgtgttttgcaggaggaaaatccacttgctggaacagaagaccactctcatctccaggaaccagctctctgtgggccacacatgatgtttgacgaagatcgttgcgagtgtgtctgtaaaacaccatgtcccaaagatctaatccagcaccccaaaaactgcagttgctttgagtgcaaagaaagtctggagacctgctgccagaagcacaagctatttcacccagacacctgcagctgtgaggacagatgcccctttcataccagaccatgtgcaagtggcaaaacagcatgtgcaaagcattgccgctttccaaaggagaaaagggctgcccaggggccccacagccgaaagaatccttgattcagcgttccaagttccccatccctgtcatttttaacagcatgctgctttgccaagttgctgtcactgtttttttcccaggtgttaaaaaaaaaatccattttacacagcaccacagtgaatccagaccaaccttccattcacaccagctaaggagtccctggttcattgatggatgtcttctagctgcagatgcctctgcgcaccaaggaatggagaggaggggacccatgtaatccttttgtttagttttgtttttgttttttggtgaatgagaaaggtgtgctggtcatggaatggcaggtgtcatatgactgattactcagagcagatgaggaaaactgtagtctctgagtcctttgctaatcgcaactcttgtgaattattctgattcttttttatgcagaatttgattcgtatgatcagtactgactttctgattactgtccagcttatagtcttccagtttaatgaactaccatctgatgtttcatatttaagtgtatttaaagaaaataaacaccattattcaagccaaaaaaaaaaaaaaaaaa

SEQ ID NO: 221502 - DNA, 1000 bp, Homo Sapiens; identical to SEQ ID NO: 116205

SEQ ID NO: 221503 - DNA, 1000 bp, Homo Sapiens; identical to SEQ ID NO: 116207

SEQ ID NO: 221504 - DNA, 1000 bp, Homo Sapiens; identical to SEQ ID NO: 116208

SEQ ID NO: 221505 - DNA, 1000 bp, Homo Sapiens
catcagtttccaagtttatatcatattaatacatttcagtggataatttatttaaaaaaaaaaactatgcctaaatatcccttatttgcaatattcagtatcaaattagagcattttgaccaactgaaacatataacgttttcatctcctttcctggagaaagcagctgcagaggttctgtatttcctgcatttccatcatcctagtaaaaagacaacaacccacaggattggaatggttttcttttgttttttttttgttgttgttgttgttttgagatggagtctcgctctgtcacccaggctggagtgcaatggcgtgacctcagctcactgcgacctccacctcctgggttcaagcgattctcctgcctcagcctcctgagtagctgggatcataggcacgcgccaccacacccagctaattttttgtatttttagtaaagacggggtttcaccatgttggtcaggctggtctcaaactcctgacctcgtgatccacccgcctcggcctcccaaagcgctgggattacaggcgtgagccaccacacccggccgtggaatggttttcttagcatatcctcctggggccgtggcgcccaggctgtgggccgtggtggatgtcccttgtttcagtggtcctacaaaggtagatggtgggcggacaccgaagtcaacttgactgtaaaagtaccccataccgttgacgcgctgtggcagacctgtgggtgcggtctcccctctccaaatgccacctcttcctgctccctcctcttttggctcctactcagtagttccattgtgggctgcagtaatataaggacctgttctggacacagcactgggcccgctggggttttagtagggcagccccttccctgcaggagtgaggcatggtgacagcagtcccctatgtgcccccaagtcatctgagcattggtgtgcattaaggtactcaatcttccaacaataaataccataagtgcaaaaaaaaaaaaaaa

SEQ ID NO: 221506 - DNA, 1000 bp, Homo Sapiens; identical to SEQ ID NO: 116211

SEQ ID NO: 221507 - DNA, 1000 bp, Homo Sapiens; identical to SEQ ID NO: 116212

SEQ ID NO: 221508 - DNA, 1000 bp, Homo Sapiens; identical to SEQ ID NO: 116213

SEQ ID NO: 221509 - DNA, 1000 bp, Homo Sapiens; identical to SEQ ID NO: 116214

SEQ ID NO: 221510 - DNA, 1000 bp, Homo Sapiens
cctcttcagagttttaaaaggcgtttgtggggtggagttgagtgtgctctgggcttggacacttgccgtggtgcccctggctggccgaggagactggctctggccaggggccccgtcctgagaggtcctcagcgtctgactctcggccaggcgccagcaaggaggggccggtccccggggctaccaggcaggcacgtgcacatcgccatcgccacacgccaactccgcctgggttttacaaagtcgttgccttaatgcatgtggacaggaactccctgaggtcgccccatgccccctggctgtgccaggtacggacgccctggaccctgcgaacaggtggggcgggcgaggggcccaagggacgggctccagagacacgcgcagggcaggaggggtctcacggaggggtctcgcactgaggcgcccagagctggtggtcccgctggacgccatccctctgcccgggatccacacggcccacgtgtgcccgccatgcccgcgccccacgccattgcagtctgccatcctctggccgtgacggtggctgcagcttccccatttgcgccgttgcctctggctgtctgcacttttgttcatgctccaaagaacatttcataatgccttcagtaccgacgtacacttctgaccattttgtatgtgtccttgtgccgtagtgaccaggcctttttttggtggatgtgttaccccgcacacttcaatctcaactttgtgcaccgtccattttctagggatagacgcccagggaatgaactctagttttctaacagattagctgagatattaacttactcacacggacaggttgatgccagagccgtaagaatgcgccagtgcgggtttgcgggggacttcgggtgtggggtcctgcggccgcgatggccgtggaaggttctggggatccctgctgccacggggacgagttcggacgccaggtggacctgtgcactcagtaaaacgcagtgattcaaaaaaaaaaaaa

SEQ ID NO: 221511 - DNA, 1000 bp, Homo Sapiens
gttgaaagacaggttcaggacatggggaagaagctggacttcctcgtggatatgcacatgcaacacatggaacggttgcaggtgcaggtcacggagtattacccaaccaagggcacctcctcgccagctgaagcagagaagaaggaggacaacaggtattccgatttgaaaaccatcatctgcaactattctgagacaggccccccggaaccaccctacagcttccaccaggtgaccattgacaaagtcagcccctatgggttttttgcacatgaccctgtgaacctgccccgagggggacccagttctggaaaggttcaggcaactcctccttcctcagcaacaacgtatgtggagaggcccacggtcctgcctatcttgactcttctcgactcccgagtgagctgccactcccaggctgacctgcagggcccctactcggaccgaatctccccccggcagagacgtagcatcacgcgagacagtgacacacctctgtccctgatgtcggtcaaccacgaggagctggagaggtctccaagtggcttcagcatctcccaggacagagatgattatgtgttcggccccaatggggggtcgagctggatgagggagaagcggtacctcgccgagggtgagacggacacagacacggaccccttcacgcccagcggctccatgcctctgtcgtccacaggggatgggatttctgattcagtatggaccccttccaataagcccatttaaaagaggtcactggctgacccctccttgtaatgtagacagactttgtatagttcacttactcttacacccgacgcttaccagcggggacaccaatggctgcatcaaatgcatgcgtgtgcgtggtggccccacccaggcaggggcttcccacagcctcttcctccccatgtcaccacaacaaagtgcttccttttcagcatggtttgcatgactttacactatataaatggttccgctaatctcttctaggata

SEQ ID NO: 221512 - DNA, 1000 bp, Homo Sapiens
acttcagactttacacaacctgcgcaaactctttgttcaggacctggctacaagagttaaaaagagtgctgagattgattctgatgacaccggaggcagcgctgctcagaagcaaaaaatctcctttcttgaaaataatcttgaacagctcactaaagtgcacaaacagttggtacgtgataatgcagatctccgctgtgaacttcctaagttggaaaagcgacttcgagctacagctgagagagtgaaagctttggaatcagcactgaaagaagctaaagaaaatgcatctcgtgatcgcaaacgctatcagcaagaagtagatcgcataaaggaagcagtcaggtcaaagaatatggccagaagagggcattctgcacagattgctaaacctattcgtcccgggcaacatccagcagcttctccaactcacccaagtgcaattcgtggaggaggtgcatttgttcagaacagccagccagtggcagtgcgaggtggaggaggcaaacaagtgtaatcgtttatacatacccacaggtgttaaaaagtaatcgaagtacgaagaggacatggtatcaagcagtcattcaatgactataacctctactcccttgggattgtagaattataacttttaaaaaaaatgtataaattatacctggcctgtacagctgtttcctacctactcttcttgtaaactctgctgcttcccaacacaactagagtgcaattttggcatcttaggagggaaaaaggacagtttacaactgtggccctatttattacacagtttgtctatcgtgtcttaaatttagtctttactgtgccaagctaactctaccttataggactgtactttttgtattttttgtgtatgtttattttttaatctcagtttaaattacctagctaaaaaaaaaaaaaaaaaaaaaaaaaaaaaaaaaaaaaaaaaaaaaaaaaaaaaaaaaaaaaaaaaaaaaaaaaaaaaaaaaaaaaaaaa

SEQ ID NO: 221513 - DNA, 1000 bp, Homo Sapiens
caatcctcttgatcgtcgtaattggagctctggcaattgcaggattcttccactatagaaggaccggctcccttttgcctgctctgcccaagctgccaagcttaagcagtctcgtcaagccctctgaaaatgggaatggggtgaccttcagatcaggggcagatcttaacatggatattggagtgtctggttttggacctgagactgctattgacaggtcaatggcaatgagtgaagactttgtcatggaaatggggaagcagcccataatatttgaaaacccaatgtactcagccagagacagtgctgtcaaagtggttcagccaatccaggtgactgtatctgaaaatgtggataataagaattatggaagtcccataaacccttctgagatagttccagagacaaacccaacttcaccagctgctgatggaactcaggtgacaaaatggaatctcttcaaacgaaaatctaaacaaactaccaactttgaaaatccaatctatgcacagatggagaacgagcaaaaggaaagtgttgctgcgacaccacctccatcaccttcgctccctgctaagcctaagcctccttcgagaagagacccaactccaacctattctgcaacagaagacacttttaaagacaccgcaaatcttgttaaagaagactctgaagtatagctataccagctatttagggaataattagaaacacacttttgcacatatattttttacaaacagatgaaaaaagttaacattcagtactttatgaaaaaaatatatttttccctgtttgcctataggtggaggtatcctgtgtgtctttttttacttatgccgtctcatatttttacaaataattatcacaatgtactatatgtatatctttgcactgaagttgtctgaaggtaatactataaatatattgtatatttgtaaattttggaaagattatcctgttactgaatttgctaataaagatgtctgctgaaaaaaaa

SEQ ID NO: 221514 - DNA, 1000 bp, Homo Sapiens
agaaaaatcagaatgaggagagtcaaggacagcaactcagctgctgcaagccagaaacacatccctgtctccaaatttgttggctaagtggagacacttctgagaactgactagagaagacagaaaaatagcccgatgtaggtttcggtgtccccatataggcccgtccacacaggcttgactgggtggacaagaatgaacccatgacagcacctgctgcttcaaaatcaaaatcaatttagggatacagcaggggctgttgggctgtgctccagagaaaaggagcagctactccttttaaatccacgatttctggattgaaaacctgtccagatgctgagttgttgggctgaacaactaggagctgaaaacaacgtagaggctggaaagtgtcccctgcattctggaggggaggggagataataaggagggctgctgggtgagggcctggagatgtggaaccctggagtggaaggttctccagtgacagtgtcctgtgactgcaaaaggggacaagaaaatccctcttcctccatgggatggatttaagctcttgctgtgtgttctacaaatgctgttattgtgggaggaaatgctaggtttttgtgtgtggactgcccagacctcagccaggtcttctggagatgacatttgaggactgatggccaaagagcatgggggactgaagccctggctgcctcagcgctctgtctcccaacaccagctggtgttgcagagggaggtcaacgtgagtttggatctcttgtacgcagatgtaatcattcacatgtaaaaataaccccacctccccaccccaaaaagggcaagagctgtggaaaatgattgccaaatgagatggctggttagagcatgattttttctaaagcatacttcatatattttcttaagattacatcaagctaattgtgcgagctcaattcactttgtaagaaaactctcggagaaataaaatcaataaaaagccaaaaaaaaaaataag

SEQ ID NO: 221515 - DNA, 1000 bp, Homo Sapiens; identical to SEQ ID NO: 116217

SEQ ID NO: 221516 - DNA, 1000 bp, Homo Sapiens
aactatagaaattaaagtttctaacgacatcattcaatcaaaagaagacgacagcaaagcataacaacaatattacaggggcttgaacaacactacgaagagtatttggattgcgtgaccctatgaccaaaactattccattgaccttaatttcttgggaaacttctagcttggaatagcttgtacacatatacatatgatcaaatactcctgcccatgatccattcccttttgttattgttgttgttgttgctgttgttgttaattttgttaagaatttcaatatcaagactgactggcaccaacactttggtattcaatttgattctatgactgaagtactggaatttattatgtggctaaagtgctctatttattaagaactatatttaataccaccaacaaatataggggttaaggaaaaaaaacgtgagctacatgtgtaagaaggccctgcatgtgtatgagtcctattctgggcaaatagattcttaaagtggctttcaacttcaagatgaaggagcttaataatggttactcattttatcaggggaatttcagggaacgtaggcgtcaaagagccagttatctttagcagatattaaaaattgaaaactttggagaactcatttcaagttatgattcagtgcattttcaacattgatttttgatagactgaagtgccagatcaaaattgttacccatttgaaagaatattagttgtatataaaattagattagaaagactttctaaatctctatctctttatatatgtcctattcattcacaatggattatacaaaaaaaagtgtattgcaagtgaaataatattgatttctgccctcagcttcaaataaagtaaattgaaatgggaacaatatcaatatggtgtcttgatatatttataaatatgtgattatcatttatttttaaaataatttatcaaaaaacaagtctttagtgttcaaatacttcaaatcatatcctcagatatatttt

SEQ ID NO: 221517 - DNA, 1000 bp, Homo Sapiens; identical to SEQ ID NO: 116224

SEQ ID NO: 221518 - DNA, 1000 bp, Homo Sapiens; identical to SEQ ID NO: 116226

SEQ ID NO: 221519 - DNA, 1000 bp, Homo Sapiens
cccctggtgctctacgacgccacatctctgcccgcaggtgcagacccacagcaagtgatcaatattgaccagattcgggagacactcccggagctccccagtgtgacccgagagaagcttgtccaacagtatgggatgctgctggaacacagcttcactttgctgaacgaagtcggcctactggagttcttccaaaatgtgataaaagaaactagggcagagccaaaaaaggtgactagttgggtcctcaacacttttctgggctatttaaagcaacagaacctcgctgtcagtgagagtcctgtcacaccctctgcactcgctgagcttcttgacctgctggacagcagaacaatttcttcatcagcagctaaacaggtgtttgaggaactgtggaagagggaaggcaagactccagggcagattgtttcagaaaagcagcttgaactgatgcaggaccagggggcactggagcagctctgccactctgtgatggaggcccatcctcaagtggtaatggatgtgaagaacagaaaccccagagctataaataaactgattgggttggtccggaaagcgactcaaagccgagcagatccagtcatgataaaggagatcctggagaagaagctgtcattgtgagatgtttgggatccccttgcccaagggacaacaacaaacagtgcagcctgactgggaacaggatcctgtgaaagctgatgcccatgtgccctgagagctgcctctcaatccctgtcccaagccacagctatggcgttaatgtcaccagtgttctcaccctctaggccctgtgcctggaggtgcctccacagccgaccagcagccaccccgcctgcttcatccacatcaggagggtccggtgaggctgcagcagtggttaaggagtaacaccttcttgtattaaggaattttaaactaaataaaatgtatgttggagatactgttaaaaaaaaaaaaaaaaaaaaaaaaaaaaaaaaaa

SEQ ID NO: 221520 - DNA, 1000 bp, Homo Sapiens
gctggagaggatgtctctgtccgcattcccgtgcagctccaggctcgcgcagttttctctctctccctggatgttgagtctcatcagaatatgtgggtagggggtggacgtgcacgggtgcatgattgtgcttaacttggttgtatttttcgatttgacatggaaggcctgttgctttgctcttgagaatagtttctcgtgtccccctcgcaggcctcattctttgaacatcaactctgaagtttgatacagataggggcttgatagctgtggtcccctctcccctctgactacctaaaatcaatacctaaatacagaagccttggtctaacacgggacttttagtttgcgaagggcctagatagggagagaggtaacatgaatctggacagggagggagatactatagaaaggagaacactgcctactttgcaagccagtgacctgccttttgaggggacattggacgggggccgggggcgggggttgggtttgagctacagtcatgaacttttggcgtctactgattcctccaactctccaccccacaaaataacggggaccaatatttttaactttgcctatttgtttttgggtgagtttcccccctccttattctgtcctgagaccacgggcaaagctcttcattttgagagagaagaaaaactgtttggaaccacaccaatgatatttttctttgtaatacttgaaatttatttttttattattttgatagcagatgtgctatttatttatttaatatgtataaggagcctaaacaatagaaagctgtagagattgggtttcattgttaattggtttgggagcctcctatgtgtgacttatgacttctctgtgttctgtgtatttgtctgaattaatgacctgggatataaagctatgctagctttcaaacaggagatgcctttcagaaatttgtatattttgcagttgccagaccaataaaatacctggttgaaatacaaaaaaaaaaaaaaaa

SEQ ID NO: 221521 - DNA, 1000 bp, Homo Sapiens; identical to SEQ ID NO: 116229

SEQ ID NO: 221522 - DNA, 1000 bp, Homo Sapiens
accttcatagaaatgggcaaggtcaaggatattgtcatcaatgaggccatttacatgcagaaggtgatttactacctctgcatcttattgaaagatccagtggaaccacatgggatatcccaagtagtacccgtcttccagagtgccaagccccggctggactgcttgattgaagtatacaggagctgccaggagatcctggcacaccagaaagccacatcaacaagcccatgagccccagcgttcagaaggccagcattgtcttccatgggagatgactcttaagccataggggctggttttccgtactccaaaccatcaggtggacacagtcctaggaaccattatggatgtagtgcatcttagagccatagagcaggtgactggaaatctaactcagtatatttccgtgtattatagtgttttccttgtaaggttttgcctactttaccaaaggaggggagaccttaagaattttgacacagtatgtcaaaagtaatgtcagcaaagaacactttcggaaattgctaagcatgttcaggtttactttgttgatgtttgtgaagcaaaacaatgggaaactgacatcagatgtcttgagaaagctatattttccaatagtaccccttgtgtaaagttacgaaaaaaacaagcccttcagtactggttagcaggaagaaatgtcctacaaaagacgagtctgtcaacctagtgcctgtgttctgtacagggcttatttatttactgttaataaacagatcttccaaaacacacagttacctggttcacagatagctgctttttattgacaaacaagatcatagtatttcagtcatggtgtcaagcacattaatacttttctgttactcagcatttttttttatatcagttcaaaagctacttttgccaagaaggatgagacaaaaggccagacagaaattggactttggttttcagacatgggactctcatgttaacaaagaataaataagcaaatatt

SEQ ID NO: 221523 - DNA, 1000 bp, Homo Sapiens
cgctggcagagtacgaggccaggatgaagggtctggaggcagaggtgaaggagtcggtgagggcctgcctcaggacctgctttccctccgaggccaaggacaagcctgagagggcctgcgagtgccccccagagctgtgtgagcaggacccactcatagcaaaggcagatgcccaggagagccgcctctgatgcccccatcccactgggacatttagcaaggaggttcagccccttctctgggatgtggttctattcccccaggaaaaaggagccccagccttctgaggctgtgggaacctgtggctgccttggacgctgcagccccctcctcaacggccaggccagagtctgagacaggacccaggcaccctcacggcagggcctctctggggcctagaagtcttctcaagctgacttcctacctccccctccatctctagataagtgtcatatatttgttgagggcaaaagactatggactggaaggcagaaagtgggatcctggccccactctgcctttcctattgagcaaccagctctgggctcagtttcctcacctggagggttggacccactcacctccactctagccccgaaccctcctgccccaggcttccaggccccatcaggcctgccctgagttggccttgtccactccttgaggcagatcctggcactacctcacagctccctggggacggccactccctggctgagggccctcccctcccctctgcctgtccggaacgggaggctgaaatggaaaagctgccttggccctgcttggctgagtcacaaggggcagtgggctcttgggtgctgttccaccctgaccctggctcacccctcttcctaggcctgggggcaggcagttcctaccatgtacccctctcaggctgcctgcctgacaaggtcagcatcatttgctctcctgaatttatgaggtttatttatttttctctttcctactcctattaaagaacctcgtcccagtgaaa

SEQ ID NO: 221524 - DNA, 1000 bp, Homo Sapiens
ctgcagtggtatgagccgctgcagaagtttctgctgctgaagaacttctccagccctctgcccagcccagctgggatgctggagccgctggtgctggatgggaaggagctgccgcaggtgtgtgttggggccgaggggcctgaggggcccggctgccgcgtcctgttccatgtcctgcccctggaggctggcctgacgcccgacatcctcatcccacctgaggggatcccaggctcggcccagcaggtgatccaggtggacagggacacaatcctagtcagctttgaacgctgtgtgaggattgtcaacatgcagggcgagcccacggccacactggcacctgagctgacctttgatttccccatcgagactgtggtgtgcctgcaggacagtgtgctggccttctggagccatgggatgcaaggccgaagcctggataccaatgaggtgacccaggagatcacagatgaaacaaggatcttccgagtgcttggggcccacagagacatcatcctggagagcattcccactgacaacccagaggcgcacagcaacctctacatcctcacgggccaccagagcacctactaagagcagcgggcctgtccaggggctccccgccccaccccacgccttagctgcaggcccttttgggcaaaggggcccatcctagaccagaggagcccaggccctggccctgctggggctgaaggtcagaagtaatcctgagaaatgtttcaggcctggggagggaggggagcccccgacgcctctgcaataactggaccagggggagctgctgtcactcccccatccccgaggcagcccagtccctagtgcccaaggcagggaccctgggcctgggccatccattccattttgttccacatttcctttctactctttctgccaagagcctgcccctgcatttgtcctgggaaacacggtatttaagagagaactatattggtattaaagctggtttgttttaaaaaaaaaa

SEQ ID NO: 221525 - DNA, 1000 bp, Homo Sapiens
gtccatgacttctcccagagcaactagcaaagtatatgacattttgaatagagattagtggaaaggaaaatgtagagatttaagttcagaggtacaaacctcaataaaacctccttagagcacataccatgagtagagtatatgtaaacgtatatgagaagagagtcgctataatagtcctctctaagtagattagttcattgtctaatggaagtgaacatctttactcctgttatcaccatagtactgaatgaactgtataatgagtttttcaaacaagtatttaaaatagaactttcacgtacaaagcaagggcataaagattttggtttgtgtttctgtaagtgtagtttaccatctaaagctttggtttttaattttaaaaaaagcttcaaggtattgccattccttagcatccttattgattatgggtgatgagtttttaactcttaaaatcatatacgtgtattagtttatcttaactgttgccctaagcaaaagggaaggtatacacctaagggatgtacttattttgcatttttggtcatgggtgggaatggggtgggtgcctacttaaatagtttttaaaaaagaaaaaaatcacaaatatttttctactgttatatatgatcttcctttatactagtttctctctagtaaggcatgccagaagcccaagataccatatcatgaattcttacatattgtaccttttgttggtggttaaatcgcatcagatgcttggcattgctgccataattataaaatgcttgtaaaggatcaaatatcactaaatactttaaattgttttacttaagagtctaatctgggaagttttcaaatcatactattaatgtgtaatctaagctcttcagatgtatccatgaataatcctggaacaatattgcttgtattcctgtcatagaacaggttttgtaatctttaaaagaaatgaaaatttatataataaagtttcaaatcaatgcaaaaaaaaaaaaaa

SEQ ID NO: 221526 - DNA, 1000 bp, Homo Sapiens
attttgattcattaaaacattaaataaaaagccctcctcagattggaacccccaaatcgatggagtcacattaataatacttttcatgcctcactttgacatgacagcattcgatttttttaaagatctttaatactttccatgagtactaaagattgtaatgagttaccttatccttagaagtagaatgtttgctttcttcttcttggaaatagtcctccaaaaagtccacttgtaccagtgacaagaagtcacttgtatagtgaccaagtacacataaaataccgattataaaaatattgtaataaaccacttcctcatttgatactggtattaagctgaatcctcactaattcacttttgaaaagttcttaatgaacagttttattcttataccatgaacagctcttttaatacaatttccttggtatccaacttaaatcccagaattttgttccaccatggttagttatttgccatatgaatgtattcttgtttctaccaatattctaggcatgagaataccttaatactgagttggagattttgtatctgtttctcctcctttacgcccattttcctacccacagcagcaaatgacaacgtgtctgtccaggtctgtccccctgctcatcccaggatgccactcacatttttttcttctttgttacccttgacccacgctgtacaagtaacatccaagagcccattctacaagtgggtggttttggtctttttataactttttctcaaagtcactgatgtttgttcctgttaaatgtatagcattgtaatgagagcccatcaaatcctgagtgtcagtttgttgtccctattgtagatgaaatagtgatgtagcaaaaacctagtaaattctgaatgcttttccacgtagacttatctggaatgtgaacacaactctttggttaatagtaaatgcttaactgtagtcctgagtaggtgcatttctgtctgtctcaataaattttactttgtctgc

SEQ ID NO: 221527 - DNA, 1000 bp, Homo Sapiens
ttacctcattgtgtatataatgtttaatatttgtcagagcattctccaggtttgcagttttatttctataaagtatgggtattatgttgctcagttactcaaatggtactgtattgtttatatttgtaccccaaataacatcgtctgtactttctgttttctgtattgtatttgtgcaggattctttaggctttatcagtgtaatctctgccttttaagatatgtacagaaaatgtccatataaatttccattgaagtcgaatgatactgagaagcctgtaaagaggagaaaaaaacataagctgtgtttccccataagtttttttaaattgtatattgtatttgtagtaatattccaaaagaatgtaaataggaaatagaagagtgatgcttatgttaagtcctaacactacagtagaagaatggaagcagtgcaaataaattacatttttcccaagtgccagtggcatattttaaaataaagtgtatacgttggaatgagtcatgccatatgtagttgctgtagatggcaactagaacctttgagttacaagagtctttagaagttttctaaccctgcctagtgcaagttacaatattatagcgtgttcggggagtgccctcctgtctgcaggtgtgtctctgtgcctgggggcttttctccacatgcttaggggtgtgggtcttccattggggcatgatggacctgtctacaggtgatctctgttgcctttgggtcagcacatttgttagtctcctgggggtgaaaacttggcttacaagagaactggaaaaatgatgagatgtggtccccaaacccttgattgactctggggaggggctttgtgaataggattgctctcacattaaagatagttacttcaatttgaaggctggatttagggatttttttttttccttataacaaagacatcaccaggatatgaagcttttgttgaaagttggaaaaaaagtgaaattaaagacattcccagacaaa

SEQ ID NO: 221528 - DNA, 1000 bp, Homo Sapiens; identical to SEQ ID NO: 116239

SEQ ID NO: 221529 - DNA, 1000 bp, Homo Sapiens
gaagcaaaaggccccgggccagttcctcagacatggggtccacagcaaagaaaccccggaaatgcagcctttgccaccagcctggacacacccgtcccttttgtcctcagaacagatgagctcagggtagggtagagaacgccactttctcagacctgtcccctttgtgtttagaaatgagttaaccaggaccaagtggccatttagtgtcctggaaacttagaggacagtgttggcctttggagtcgggccttcttgtgttaaggggcacaaggtccagatcactctggagcaggccagctctgctggacagtgaccctcttcccaggcctcaggagtgaccatagccactgctgaaaagtcacgcagctgctccctcggaccccccaaggatggttgctgttagcagaggattggtgcagtcccagctgaagcccactgtgtgccaaaggaagaagctcccagggctgcttccttcacctgcagaaagccccaagtgagccaccagcactcatggggcagtccctgtccaggctgcccagggcttctcatagacgtcctgagaaggacggtgtaatgcaaggaaatggctgtggtaacactgatccttcagaagaagcttcattccctcttaatctagttaagccaggacatccagaattcattgctttaataaagaacccaggccgggtgcagtggctcatgcctgtaatcccagcactttgggaggctgtggggggcggattgcctgagctcaggagttcgagaccagccagggcaacatggtgaaaccctgtctctactaaaatacaaaaaattagccaggtgtggcggtgtgcgcctgtagacccggctactcaggaggctgaggcaggagaattgcttgaacccgggaggcggaggttgcagttagctgagattgcgccactggacgacagagcgagactcagtctcaaaaaaaatttaaaaatttaaaaaaataaaaagaatccaaccccgg

SEQ ID NO: 221530 - DNA, 1000 bp, Homo Sapiens
ctacattttttcatcatgaggaaagcagttgaaatgaggcatgagttactgtgcattgggattttagaacaattttcttgtgacagctctttttgtgaagttaggttcttaaaagtgcccatgatggtcacttaaaatgtgcagtaatagcactgccaggatcaagcatgaaaggcttttaaattagatcatcccacagacaatacgtttgataatagttttttcttttaacctctttaagtattgattctgcttgagaatattgaagtacttgccagaagttgtggatttcagttttaacaaatgctattaaagtggagaagcacactctggtcttggaattccatttgaggatttagaagtgtcatgtttataactattcagttgtgtttgttgctggcttgttgtaaagcaataaaatttttttggtctttttgtaagtgagtgtgctgctgtaagaaatctcccatgtgcataacaaattctgaatattttttgaggctaaagaagaccggggtgacaagcagatactgctgtgtaatggttacactaaccaaaagacaccagccactcagagttctatactgtaaagcgcagataacatttgtgtgttataccttgattggggaattaaaagtcatttaactgaagatgttgagaaacctgggctctggttttagtataccggaattacttttttccaattttagaaaatcaagcaggttagagaaaatagagatgaattaggggacactgtcttatggattcatttataagaagagaaccagccatatacacttggggagatttgccacatcttaaacttgaataatagtatgagtaatgcttaagggagtttaatagagaaggaaagctttggcagtgttttgagaacttaagtggctaaagagatgagacaaacatgcaggtcgctactggcatagtttcataattgtgtactcggaaattaaagtttgcttgtttcttggtctggattaaa

SEQ ID NO: 221531 - DNA, 1000 bp, Homo Sapiens; identical to SEQ ID NO: 116242

SEQ ID NO: 221532 - DNA, 1000 bp, Homo Sapiens
gctgctgcaggctggacagcctccagacctggacagaattcgcacacttctggagctggaaaaatttgaacatcaagggagtcggacaaggagccgggctctggagaggcgacggcggcggcagaaggtggatcagggtagaaacgttgagaatcttgttcaacaggagcttcagtcaaaaagggctcggagctcagggattatgtctcaggtgggccgagaagaagaacattatcaggagaaagcagaccgtgaaaatatgttcctgacaccttccacagaccacagccctttcttgaaaggaaaccaaaatagcttacaacacaaggattcaggctcttcagctgcttgtccttctttaatgcctttgctacaactctcctactctgatgagcaacagttgtgacagtggcaccaaaggtcatttgtggttgtttttgtttgtttgtttcttaaatcctactatctcctggcctggacctcagaaggagctttttgcttatctataatttttcactgccaatttttgatatcctctctcctagagttactgttaaaaggttggttcgtaaagtccacaccccgatgctcagaagtgtcttgccagcaacattcctgctagcatacaggagtgatttcctaaaccagtttcattctagtctgaatagggacaaacaaatcttgaggaagcccaagtgcgtacctttatttttgcccccaccaccctctttctgtacttcaatttttgtttgttttttgtttttttgtccctgtcataaaatattttggtgcttcaaaacttgtaccttcattgtacatccttttcttttctccccttgggtcttattataaaagaagacaatgtacgttgtaattaccaaaaagaatagggaaaaacaagaatttcatgactctacctgtggtctatctttaatttcatttcttttgttaaaaataaaacaatgagtatgtttggatactatgaaaaaaaaaaaaaaaa

SEQ ID NO: 221533 - DNA, 1000 bp, Homo Sapiens
gctgctttaaacttggaagggggagacaggaagttttaattgttctgactaaacttaggagttgagctaggagtgcgttcatggtttcttcactaacagaggaattatgctttgcactacgtccctccaagtgaagacagactgttttagacagactttttaaaatggtgccctaccattgacacatgcagaaattggtgcgttttgtttttttttttcctatgctgctctgttttgtcttaaaggtcttgagggttgaccatgttgcgtcatcatcaacattttgggggttgtgttggatgggatgatctgttgcagagggagaggcagggaaccctgctccttcgggccccaggttgatcctgtgactgaggctccccctcatgtagcctccccaggcccagggccctgaggcctgctagaatcactgccgctgtgctttcgtggaaatgacagttccttgttttttttgtttctgtttttgttttacattagtcattggaccacagccattcaggaactaccccctgccccacaaagaaatgaacagttgtagggagacccagcagcacctttcctccacacaccttcattttgatgttcgggtttttgtgttaagttaatctgtacattctgtttgccattgttacttgtactatacatctgtatatagtgtacggcaaaagagtattaatccactatctctagtgcttgactttaaatcagtacagtacctgtacctgcacggtcacccgctccgtgtgtcgccctatattgagggctcaagctttcccttgttttttgaaaggggtttatgtataaatatattttatgcctttttattacaagtcttgtactcaatgacttttgtcatgacattttgttctacttatactgtaaattatgcattataaagagttcatttaaggaaaattacttggtacaataattattgtaattaagagatgtagcctttattaaaattttatatttttcaaaa

SEQ ID NO: 221534 - DNA, 1000 bp, Homo Sapiens
tccgcgccgtggagcgcgtagacgagggcgccttccaactgccccacgtgatgcaggtggtgacgcaggacggcacgggggcgctgcacaccacctacctccagtgcaagaatgtgaatgagctcaaccagtggctctcggccttgcgcaaggccagcgcccccaacccgaacaagctggccgcctgccaccccggtgccttccgcagcgcgcgctggacctgctgcctccaggctgagcgctcagccgccggctgcagccgtacacactcagctgtcaccctgggggactggagtgacccactggatcctgatgctgaggcccagacagtgtatcggcagctgctcctggggcgggaccagctcaggctgaaattactggaggattctaacatggatacaactctggaggcagacacaggggcctgtcctgaggtcctggcccggcaaagagcagcaactgcccgcctgctggaggtgctcgcagacctggatcgtgcccacgaggagttccagcagcaggagcgagggaaggcggccctgggcccccttggcccctaaggaaatgccagagctagcccggaaggaggagcaagagccagggggccctcttcagcgcatcctgccccgggagtctcctgtctccttggacctctttgattctgtggtttggaggctcccagagacgtgcctagtcctgtgtgccttgagtccagaactcagggcatggaagccctttggcaggggccagccttgcactgagtgaaacttgccctctggcttgattcagactggagtggataggataaggaacctgacttatttgactgagactggggtctctacttcaccaaactggcctctatccataccaaggaggccagcctggccctgagctgctggatacagctggacctgaattcctgatgcccatgtgatgttgttgccccagatgggcactaaatggcctcactcctaaaaaaaaaaaaaaaaaaaaaaaa

SEQ ID NO: 221535 - DNA, 1000 bp, Homo Sapiens; identical to SEQ ID NO: 116249

SEQ ID NO: 221536 - DNA, 1000 bp, Homo Sapiens
cataacaccctccttcaacaatgaccccacgacacaggtattaagcatcgatgtgactgacagaaacatcagcctacataattttacttcattgacgtggataagcactctgtgaatttttacagcaagattctaactaactatgaatgactttgaaactacttatacttcatactcataaaaattattgtgtgttgctaatttgttcatacccactattggtgaaatatttctgttaattttgttatatgttttttgtgtgaaccctaaaggttaaaccttagccctgtgggataggcagttagggaggtgtggaaaatctatgcattaccttaatgtctctgtgtggttagtatggtagtgactgttcatcatatgacatttactgaagatgaactgggtccatgatgaagtgtgtgtatgtccacgtttgtaatcatagaatggaccccattcttttgttaaatacacaagagaaagctttctgtgacagttccaggtcttgaagctaatcagcatctcaagaaagtatccagaaagaacatctgctagttggttataggcggtgggaggaataatatacctaattggttataggtggggggagcatgataagcaaagaaaaggcaaacacaaggaaagatcagatgaaacagaagatgatagtaaaagtgatcctaagtaagaacataatgtaaaattgtcagcagcctcatggggaggaaaaaggaagagtcaactcacttgaagaagagggtcttgagaaatccttagcataaagggctactggtgagattgagatctgagcaggcaaagctcaaaagagagtttggaggttaaaaataatttatttttgcagtagtgtgctttgaaatgtgtaaatcttatttctaatgtatacaaccacatttcacataaaaatatgcaatttatatgccagataaaaataaaacaagtgaatttgcaagtgaaaaaaaaaaaaaaaaaaaaaaaaaaaaaa

SEQ ID NO: 221537 - DNA, 1000 bp, Homo Sapiens
tttttaaaaataaaaaaaaacccaaaaataatgcatgcataatttaaatggtcaatttataaagacaaatctatgaatgaatttttcagtgttatcttcatatgatatgctgaacaccaaaatctccagaaatgcattttatgtagttctaaaatcagcaaaatattggtattacaaaaatgcagaatatttagtgtgctacagatctgaattatagttctaatttattattactttttttctaatttactgatcttactactacaaagaaaaaaaaacccaaccaatctgcaattcaaatcagaaagtttggacagctttacaagtattagtgcatgctcagaacaggtgggactaaaacaaactcaaggaactgttggctgttttcccgatactgagaattcaacagctccagagcagaagccacaggggcatagcttagtccaaactgctaatttcattttacagtgtatgtaacgcttagtctcacagtgtctttaactcatctttgcaatcaacaactttactagtgactttctggaacaatttcctttcaggaatacatattcactgcttagaggtgaccttgccttaatatatttgtgaagttaaaattttaaagatagctcatgaaacttttgcttaagcaaaaagaaaacctcgaattgaaatgtgtgaggcaaactatgcatgggaatagcttaatgtgaagataatcatttggacaactcaaatccatcaacatgaccaatgtttttcatctgccacatctcaaaataaaacttctggtgaaacaaattaaacaaaatatccaaacctcatagtggtattattctttgttttacctgtggtcatcttaaactggtttttcagtccctctccacttccttcagaaccaaagaatctgttataagattcctggaaggaactgggcatctaactgttacaccaaatcttaagtgaataaaactttaccaaggcttctcagttaaaaaaaaaa

SEQ ID NO: 221538 - DNA, 1000 bp, Homo Sapiens
cgtgaaaagcgtgtccagcgtgctcagcagcctgacgcccgccaaggtggcccccgtcatcaacaacggctcccccaccatcctgggcaagcgcagctacgagcagcacaacggggtggacggcaacatgaagaagcgcctcttgatgcccagtaggggtctggcaaaccacggacagaccaggcacatgggaccaagccggaacctcctgctcaacgggaagtcctaccccaccaaagtgcgcctgatccgggggggctccctgcccccagtcaagcggcggcggatgaactggatcgacgccccgggtgacgtgttctacatgcccaaagaggagaccaggaagatccgcaagctgctctcatcctcggaaaccaagcgtgctgcccgccggccctacaagcccatcgccctgcgccagagccaggccctgccgccgcggccaccgccacctgcgcccgtcaacgacgagcccatcgtcatcgaggactaggggccgcccccacctgcggccgccccccgcccctcgcccgcccacacggccccttcccagccagcccgccgcccgcccctcagtttggtagtgccccacctcccgccctcacctgaagagaaacgcgctccttggcggacactgggggaggagaggaagaagcgcggctaacttattccgagaatgccgaggagttgtcgtttttagctttgtgtttactttttggctggagcggagatgaggggccaccccgtgcccctgtgctgcggggccttttgcccggaggccgggccctaaggttttgttgtgttctgttgaaggtgccattttaaattttatttttattactttttttgtagatgaacttgagctctgtaacttacacctggaatgttaggatcgtgcggccgcggccggccgagctgcctggcggggttggcccttgtcttttcaagtaattttcatattaaacaaaaacaaagaaaaaaaatcttataaaaaggaaaa

SEQ ID NO: 221539 - DNA, 1000 bp, Homo Sapiens
atcctgaacatgcattctatgaatttaccttccgaaggttttttgatgacaatggctacccatataattatccgaagcctattgaatatgaatacattaattcacaaggctcagagcagcagtcggatgaagatgatcaaaacacaggctcagagattaaaaatcgcgatctagtatatgtttaacacactagtaaataaatgtaatgaggatttgtaaaagggcctgaaatgcgaggtgttttgaggttctgagagtaaaattatgcaaatatgacagagctatatatgtgtgctctgtgtacaatattttattttcctaaattatgggaaatccttttaaaatgttaatttattccagccgtttaaatcagtatttagaaaaaaattgttataaggaaagtaaattatgaactgaatattatagtcagttcttggtacttaaagtacttaaaataagtagtgctttgtttaaaaggagaaacctggtatctatttgtatatatgctaaataattttaaaatacaagagtttttgaaatttttttgaaagacagttttagttttatcttgctttaaccaaatatgaaacataccccctattttacagagctcttttttcccctcataaccttgtttttggtagaaaataagctagagaaattaagccatcgtgttggtgagtgttcctaggctaatgataatctgtataattcacatcctgaaactaaggaatacagggttgaaaaaatattaatatgtttgtcagaaggaaaaataatgcatttattttcccccccaccccccgccccatggaatatttaatctatttaatcttcttgcatttatttctcaagaattactggctttaaaagaagccaaagcactactagctttttttccatattggtatttttgatgctgcttccaattttaaaagggaacaaagctgccataaatcgaaatgttcaatactaaaagctaaaatatttctcaccatcg

SEQ ID NO: 221540 - DNA, 1000 bp, Homo Sapiens
tgaaatgaaccgcatgatccagaggctgagagctgagattgacagcgtcaagaagcagtgttccagcttgcaaacggccattgctgatgcagagcagcggggagaactggctctcaaggatgcacgggccaagctggtggaccttgaggaggccctgcagaaggccaagcaggacatggctcggctcctgcgtgagtaccaggagctgatgaacatcaagctggccctggacgtggagatcgccacctaccgcaagctgctggaaggcgaggagtgcaggttgagtggagagggagtttctccagttaacatttctgtggtcacctctactctttccagtggctatggacgcggcagcagcattggaggtggaaacctgggcctcggtgggggcagcggctactccttcaccaccagtggtgggcatagcctgggtgcaggcctgggaggttctggattcagtgccaccagcaaccggggcttagggggcagtggttctagcgtcaagtttgtctccaccacatcctccagccagaagagctacacgcactaagagagccccatggctccctctaccctgccttgaggcctgtttgcagtcacacctggacaccagggtcctcctccttcctctctccttgtaaggtgcacctgtgctgctgggagcctggagtactggctatacccattcccaggcctaagccagcctctccctcctgacagtgcccagactgccagcagcacccgtctgttacacatgtgaaaccaaagcctgctctctcctaaggctctcattcagcctatcttgcgaggcccgggcagctggaaagtcctcctccagctccacctccctccctccctccagatgcagaggctggggagtctctcaatgccaggttgtcacccacctgtctcatagtgtttataagtggcctgctgggagtgagtgctccctctgttccctccctggaatgtgtctattaaatgcatgtgtcacctg

SEQ ID NO: 221541 - DNA, 1000 bp, Homo Sapiens
attcctcgagccaagaagggtgccgagggaaagccccctggccacagcagccacgtcctctgcatggccatctcctccgacggcaagtaccttgcctctggtgaccgcagcaagctcattctcatttgggaggcccagagctgccagcacttgtacaccttcacaggacaccgggatgcagtgtcgggtctggcattccgcagaggcacccaccagctctacagcacatcccacgatcgctccgtgaaggtgtggaatgtggcagagaactcctacgtggagacgctcttcggacaccaggacgctgtggctgcactggatgccttgagccgggagtgctgtgtgacggctgggggccgggatgggactgtacgtgtgtggaagatccccgaggagtcccagcttgtcttctatggccaccagggctccatcgactgcatccacctaatcaatgaggagcacatggtgtccggcgcggacgatggctctgtggccttgtggggtctctccaagaagcgaccacttgccctgcagcgtgaagctcacgggctgcggggagagccaggcctggagcagcccttctggatatcgtcggtggcagccctcctcaacacagaccttgtggccacaggctcccacagctcctgtgtgcggctttggcagtgtggggaaggcttccggcagcttgaccttctctgtgacatccccctggtgggttttatcaacagcctcaagttctccagctctggggacttcctggtggctggggtagggcaggagcacaggcttggccgatggtggagaatcaaagaggctcggaattctgtctgcatcatcccactccgcagggtccctgtacccccagctgctggttcctgacactcttatcctccttatttaagtccttcccaggctatgccccaccctctttgtattaaaagcctcctcttttgggaaaaaaaaaaaaaaaaaaaaaaaaaaaaaaaaaaaaaaaaaaaaa

SEQ ID NO: 221542 - DNA, 1000 bp, Homo Sapiens
tcagtcctaacatttaaggattcttgagtcccaatcacataactgtggtgttactctgtcatttatatggtgtcaaaagcacttgatgagtaaacccagtagcatctttttgagtgtttcataatgcattttccaacttgaaaacaataattgaaaaatagccttattgtatattttatgccatgactaaaagtgccatttttactgatgctattagactgataatttcttgaagtgaaatttaacctttttttctctttagtattatgtttataatgccatatttttagaaagcattccagatcaggcatggtggcttacacctgtaatcccagcactttggaaggctgaggtgtggggattgcgtgaagccacaagtttgagaccagcctggttagcaaggcaagatccccaactctacaaaaaaataaaaattaaaaaaaaattattaggctgcagaggcaagaggatcccctgagcccagaagttcaagggtatagtgagtcgtgattgtaccactgcattcctgctgagcaacagagtgagaccccatctcaaaaaagaaaaaaaaaggcattctagtaaatcgaatgtaatgtgaatggaatttcaaaacaggatctaagatggtatgtagtagaattcaaagtaatatcattttaaagttaaatgagtatggaaaaggtctgttctctagttttgtccagttcagtttactgaaggaatatatttaattatattcatatatttaacaaataaaaatatgttgaattttcgtattgtttgccactgagggttcagatgatagacctcaaaaaatcgaaaatactggttgaaatttgtagcatccatttagttattctttttgacctaaataacttaatagtttattaaatctaaggttagctaaatatgtagctaaccttatttgttttctttcctaacaactctgaagaatacataggactttgcactttttttttttttttttttttttaaa

SEQ ID NO: 221543 - DNA, 1000 bp, Homo Sapiens; identical to SEQ ID NO: 116257

SEQ ID NO: 221544 - DNA, 1000 bp, Homo Sapiens; identical to SEQ ID NO: 116258

SEQ ID NO: 221545 - DNA, 1000 bp, Homo Sapiens
ccgctaccgagagaccacgctcagcctggtcaagactgttgtcatcatcctgggggcgttcgtggtctgctggacaccaggccaggtggtactgctcctggatggtttaggctgtgagtcctgcaatgtcctggctgtagaaaagtacttcctactgttggccgaggccaactcactggtcaatgctgctgtgtactcttgccgagatgctgagatgcgccgcaccttccgccgccttctctgctgcgcgtgcctccgccagtccacccgcgagtctgtccactatacatcctctgcccagggaggtgccagcactcgcatcatgcttcccgagaacggccacccactgatggactccaccctttagctaccttgaacttcagcggtacgcggcaagcaacaaatccacagcccctgatgacttgtgggtgctcctggctcaacccaaccaacaggactgactgactggcaggacaaggtctggcatggcacagcaccactgccaggcctccccaggcacaccactctgcccagggaatgggggctttgggtcatctcccactgcctgggggagtcagatggggtgcaggaatctggctcttcagccatctcaggtttagggggtttgtaacagacattattctgttttcactgcgtatccttggtaagccctgtggactggttcctgctgtgtgatgctgagggttttaaggtggggagagataagggctctctcgggccatgctacccggtatgactgggtaatgaggacagactgtggacaccccatctacctgagtctgattctttagcagcagagactgaggggtgcagagtgtgagctgggaaaggtttgtggctccttgcagcctccagggactggcctgtccccgatagaattgaagcagtccacggggaggggatgatacaaggagtaaacctttctttacactctaaaaaaaaaaaaaaaaaaaaaaaaaaaaaaaaaaaaaaaaaaaaa

SEQ ID NO: 221546 - DNA, 1000 bp, Homo Sapiens
tcttggaaaacgcccagagttctgagaaaacggaagaaaatgaattcagcggctgtaggtctgagtcatccctcggcacctctcatctcggcacccctccagcgctacctcgaaaaacaaggcctctgcagaagagtggagatgactcctcagaagaggaagaaggggaagtagatagtgaagttgaatttccacgaagacagaggccccatcgctgtatcagcagctgccagtcatattcaacctttagctctgagaatttctctgtgtctgatggagaagagggaaataccagtgaccactcaaacagtcctgatgagttagctgataaacttgaagaccgcttggcagagaagctagacgacctgctgtcccagacgccagagattcccattgacatatcctcacactcggatgggctctctgacaaggagtgtgccgtgcgccgtgtgaagactcagatgtctctgggcaagctgtgtgtggaggaacgtggctatgagaaccccatgcagtttgaagaatcggactgtgactcttcagatggggagtgttctgatgccacagttaggaccaataaacactacagctctgctacctggtaatgaaggaatacacatcctgaagatctcgtgactatactggcatttcagatccaccccacccccagactcatcccactctctcccagcattttgtctgggaagagagactaccccatctttaccaccccctagaaatgagctgcaataacaggaacatgagacttcgcaaatctctggaaaataatatccaaatgaaattaagtctcactgaacatttcaatcaagaatggcagggatctattttattgaatattctagctactgtaacattgatatttatttttgtttgacattttaacactttgtactgcaaagagtgaactatatatgagatagagagacaataatttcttgcaaaaaaaaaaagagataaaagaaagaacaaaaaaaaaaaa

SEQ ID NO: 221547 - DNA, 1000 bp, Homo Sapiens
tcctagcggctctgagatgcgcattggcttgacggaagagttttgtgtggggaagtcagagctgagaggttatgggccaggaatccgggtcgatgaagtctcgtttcacagctctgtgaatctggacgaatttgagtctcatcgaatcctccgcttgcaaccacctcagggcgagctgactgtgatgcggtaccaactctccgatgacctcccctcaccgctccccttccggctcttcccctctgtgcagtgggaccgaggctcaggccggctccaggtttatctaaagttgcgatgtgacctgctctcaaagagccaagccctcaatgtcaggctgcacctccccctgcctcgaggggtggtcagcctgtctcaggagctgagcagcccagagcagaaggctgagctggcagagggagcccttcgctgggacctgcctcgggtgcaaggaggctctcaactctcaggccttttccagatggacgtcccagggcccccaggacctcccagccatgggctctccacctcggcctctcctctggggctgggccctgccagtctctccttcgagcttccccggcacacgtgctctggcctccaggtccgattcctcaggctggccttcaggccatgcggcaatgccaacccccacaagtgggtgcgacacctaagccacagcgacgcctatgtcattcggatctgaggctccccaaacgaggacacgacggccaaggtggcagtttgtcccacgggaggacagtcgtttcttttccagcctcctggccttcggactctgaatctgggcaggaagagtcctcagtcccaagaccaggagggggcaatgggcccagcctttctgtggtatctgatgcaggaaggactgcagtggatcagaacttacaaaccaaacttttattctgagaaactggctgtacaatatctaaaaagaaagtgacatgaaggaagcaatctacaacttccttccgcttagcgagcatgc

SEQ ID NO: 221548 - DNA, 1000 bp, Homo Sapiens
ggattacaggcgtcagccaccgcgcctggcctataccagtattttctagtttaaaggaggactacattaactcttattgttgtgtttctgaaaagtgaaatttaaaaagcagcctgaaaaataaaaatttataatttgcccttgaattggaaggaatggagattagggaaggaaaactactctagaggccatttaaaagtatgtatttattagaacatcgaaattcgtgttgtctccatcagtggtcaccttgagggattagacattctaatggaatgtcctggctccaccctccagcatgttctcacccaacaatgacagttgagtggagtgggaagggaagtcattctaaagagtccaaagtcagtagcgccacatctggtttataaagtaagagatccagtggacaatgctatttttgtatgccaacctagataggattataaagcaagactgatttcttctgtggtttatgaatgatcttaaggtaattacaaaagggaaattccaagaatgcataacacaatgacaacatggtgagaaaagtgcagtactacttccaaggtggctagtgtaaaggacacttgagtttttaaaactgtggttaaatgttttatgtggaatttgatgagtttgtatattaaataccactgcttgctgcttttactagaatcaagttaagggacacgttagaaatagaacagcttaatatcactggcttcagagcaaaatgagctcgggtgactgcagattatgatggtaaatatggctttaattacaaacatgaggaatgattcactgaagatgaaaagataggacggatgtgatatgaaaaaaacccaaacattttggcattgaatgatggctaaggtgttccaagtattccatcttttaagatgaattgcttaattaattgcctcgctaccccaggattctcattctttggaaataatttttattaaatttcaataaactgtgaatcccaatggtattttacttt

SEQ ID NO: 221549 - DNA, 1000 bp, Homo Sapiens; identical to SEQ ID NO: 116262

SEQ ID NO: 221550 - DNA, 1000 bp, Homo Sapiens
tttctgtgggcattaactatattgctacagcatctagtgtactgagcctgcggtgcatggctcaggccttttcccatcgacgtctagggggactctggaccgtgtgaagctagggggtgtttctcagcacactgcagaagggcagctcagaagaatgcagggcccattcagcatggggatcccagcacatcactgtagaatttgagtgatctatgctgaataaacagtggaatgtgaccagtcaagtagaaatcttgagtaatcagatggaatgcaatctttctaacattaagctaccaagatcctgaatgtcagagatgtactcagagggttaacagacaagcacaaggcatgctgactacattggtgtatccagattgctttgcttttagccagtgctttctaatttttttctcgacattcttgggatagttcaagtttgaaataattaagtggtggtgttctttaaggaatttctataaccaaattgatcttatttttgatttcacttatcatagaacaaatatgtatcattatggcagtgtatctatgtaattatcaatttaatcatcaccaccggtgtttccatattttttcccaagtatttaatatagctctcttatggtggtggcctggtgatggggaccgtctttcttttactgacacatgaccaatcatatggtattttcaagggaattttaagattcatcttttcagtttgatagtagactagttaaggaagaactctttcattacttgcatcgtgtaaatcatctctgtagacatgtgttcatattaatgaacacattttttctcaacattgtagcagaaatcattttattcgtcatgatcaatgaatatgtgatttgctccagatcgttagaaggaaaagtaagatttcagtcatcaaaaatgtttttaccgtagccctcatctaacttacacgtggtgcatattaaaataagcagagaaaaaaaaatgtgaataaactactgaaaac

SEQ ID NO: 221551 - DNA, 1000 bp, Homo Sapiens
tatgcttcccatcataactggggagaaagggaagtcagggttctaggggttattcgtcccaggaaatagaagtgaaattgtctttattaagtgaaaactttcccctttgccctgcaatgtagctgggcattcaaacggagggcaaaccgatgatctaaaccaaccacttggaaaaacccaatggggacattgtaaccagagggtcctggaggtggggttgatgggtttccttatccccaaagtcactcctgttttgttttgtttttctttgggggttttgtttatttttggggctggcaatccaaaatagaaaatctgatcctttgaggctctaaaggaaaatcagctgcctctaccaaccaccctctatcagcagtggcccaggaaggaggtcaagcatcttcggccgatatttaaacatgggcagcttccttcaggatgatcaccgaggctcccgtgactttgaactccctactctccagaatccaggggctatagcgatggggactgcggaattacgagggctggctgttttacaccggtcacattttctattggcagtgactgattcatgggaaagggctttgaaggaactacttcagtgcacacacaaggtacgaacctctcaggcctttcgaagaactttcataattcatgaaagcccagttctgaagattcacgtatccatctggagacctacaggaagaaagtgattgggttcctctggttcttgcctgcttcactgtggatgggaagaggtgacaacctcagtctccctttgggacctgtccaagggtaggcaaccaccttcaccttcacacagattgaggagacactggactttttacccattttctttaatcttcaatattaatattgtgtttacattgatgagaacaagagttaatgccctaccctctgctgggctgtttgtattgagttgcaatgtgaccagcgaaagctgcatttaataaatgaaagtacagactgtttcttcccc

SEQ ID NO: 221552 - DNA, 1000 bp, Homo Sapiens; identical to SEQ ID NO: 116265

SEQ ID NO: 221553 - DNA, 1000 bp, Homo Sapiens; identical to SEQ ID NO: 116266

SEQ ID NO: 221554 - DNA, 1000 bp, Homo Sapiens
ttgtgtacaaagatatttgtattcactttctttaaaaaatccaagtaaaagtgccaaaactacatttctgtaaatctcttgcattattcatatgtgtatctatatctgcataatgtttgttaatgtctactaaaattgctactttttcactttggatttgtttttggcaaaattttagtctaaacagacatctaaattttcgagacttagaataacattcactaaagtttgataatgtcttttttaaatattttcttactgctttatagtgacttgatttggtttctgttgtgtttttgcctaaatactagtaacatatcagtgaaaaaccctaattttttttctcttcaatgtcactagtaagagaggtggtaatttttcacctctgaaattattctgggtttaggtgtcagcttttgagctgcttccctcatcacaccacactcacatgcatctgttctctctcacactctatacccctgccacttcctggcacctccccccatgcttgtcatttaattttggccacttgtaggtatcagtgtgatctgatcaacactctggttaccttggtcagtgaaaagatgctactatattgcttttgtcccaaagtgagtaaaatcccctagagcagagagagagagagagagagagtgtcttcatgccaaccacagcctgtttctgctgagtttcttatcagccctcaagctatgctaggaaaagttataaaatgccaaaatatttataaacatttactttgtccataaaaaatttacattggatactctgtaagtaggaggtactttgtcccaaaaagatgtataagaatgtactaatagttttatttgattaggattgaacagttcagttgtatctatgccccacagtgaccagtaaagtccaattaaaatatggaaatgtaaaagtgtatgccgaataccttaaagtaactaattatccttacacacaaaaggctcagtgcattaaatatttgcctatc

SEQ ID NO: 221555 - DNA, 1000 bp, Homo Sapiens
gctgaccccagccacctctccccaccagcctcctcccctaggccttctcgaggtcaccgccgctcagcctcctgtggctccccgctgagtgggggtgcagaagaggcctccggggggactggatatgggggagagggatctgggccaggggcctctgattgccgtatcatccgagtccagatggagttgggggaagatggcagtgtctataagagcattttggtgacaagccaggacaaggctccaagtgtcatcagtcgtgtccttaagaaaaacaatcgtgactctgcagtggcttcagagtatgagctggtacagctgctaccaggggagcgagagctgactatcccagcctcggctaatgtattctacgccatggatggagcttcacacgatttcctcctgcggcagcggcgaaggtcctctactgctacacctggcgtcaccagtggcccgtctgcctcaggaactcctccgagtgagggaggagggggctcctttcccaggatcaaggccacagggaggaagattgcacgggcactgttctgaggaggaagccccgttggcttacagaagtcatggtgttcataccagatgtgggtagccatcctgaatggtggcaattatatcacattgagacagaaattcagaaagggagccagccaccctggggcagtgaagtgccactggtttaccagacagctgagaaatccagccctgtgggaactggtgtcttataaccaagttggatacctgtgtatagcttcccaccttccatgagtgcagcacacaggtagtgctggaaaaacgcatcagtttctgattcttggccatatcctaacatgcaagggccaagcaaaggcttcaaggctctgagccccagggcagaggggaatggcaaaatgtaggtcctcgcaggagctcttcttcccactctgggggtttctatcactgtgacaacactaagataataaaccaaaacactacctgaaaaaaaaaa

SEQ ID NO: 221556 - DNA, 1000 bp, Homo Sapiens; identical to SEQ ID NO: 116270

SEQ ID NO: 221557 - DNA, 877 bp, Homo Sapiens
cgagagagggcgcggccaactccaggggggacggcaggccgagagcgcggcgcccgggcctggcgcggagcctgagcccgccggacgggaggcggccccgccgcgggctcggccccggccccagccccgccagcatggccggccggactgtacgggccgagacccggagccgggccaaggatgacatcaagaaggtgatggcgaccatcgagaaggtccggagatgggagaagcgatgggtgactgtgggcgacacttcccttcgtatcttcaagtgggtgccagtggtggatccccaggaggaggagcgaaggcgggcaggtggcggggcagagagatcccgtggccgggaacgtcggggcaggggcgccagtccccgagggggtggccctctcatcctgctggatcttaatgatgagaacagcaaccagagtttccattcggaaggttccctgcaaaagggcacagagcccagtcctgggggcaccccccagcccagccgccctgtgtcacctgccggacccccagaaggggtccctgaggaggctcagcccccacggctgggccaagagagagatcccgggggcataactgctggcagcaccgacgaacccccaatgctgaccaaggaggagcctgttccagaactgctggaagctgaggcccccgaagcttaccctgtctttgagccagtgccacctgtccctgaggcagcccagggtgacacagaggactcggagggtgcccccccactcaagcgcatctgcccaaatgcccctgacccctgagaagccggcctgcctgtcctgttgccccaggggcccctttggctttttacaaataaagacccttttgtaaaaaaaaaaaaaaaaaaaaa

SEQ ID NO: 221558 - DNA, 1000 bp, Homo Sapiens; identical to SEQ ID NO: 116274

SEQ ID NO: 221559 - DNA, 1000 bp, Homo Sapiens
gctttgtccagttatcttcatatgactgttctctgagaaaaggtcttactacctgatatcaagtacatatcttaattttggatgaatttttccacagtaaagccgaacagtattcttttttgaaaattagcaattataaagattgtttaaaatatcttgatattttcacaaattttaaacaaaaaattaaatatctataaagtgaatgttcaacaacaatgatgagcaatagaaatctatatatgagaaacgtttggataatatttgcctcaaggattgtttacctaaaacagaactatggttatttatctcagattgtaagttttattttgaagtgtcatttttatggcaatattgataacacaaatgaccacaaactaaatcataaaataattgaatccttactttgagaaaatggatagcttctgtgttatgataccaaacaaaatattttcatatttatttcttagaactatttccaaaatatttatatttcagtttttttatggtactcgaaaaatcaaaccttctgaaaattatgatatttgtacttcatttgtgtattagttcattttctgtttctattacatagtttttaaagtcaatgaaagagattgagaatgttaacatttgttgatcaatgtggagctgtccacattcggtatcttttcatttttatatatattttacagtttcaagaaaacttagtactactagtatctgccttattttcttaagtctgatgttaatttttgtttcaggagtgagatataaacattttgctttttttcagttttgaaatatagtttgtcatcctgtgaaaaccacctcgtttgctttttgtttgtttgttttgcttttttagtgtagacctaaaattatttttgcctataaacagtgaacttaatatgtttctgtgagagtgacagagctgtgcccgtttatcttcattgtattaattattacataaagattaacaaatacattgcaaatgcaaatt

SEQ ID NO: 221560 - DNA, 1000 bp, Homo Sapiens; identical to SEQ ID NO: 116276

SEQ ID NO: 221561 - DNA, 1000 bp, Homo Sapiens
gttcttgtcattgtgggaagtgcatttgttctgctgaagagtggtatatttctggggagttctgtgactgtgatgacagagactgcgacaaacatgatggtctcatttgtacagggaatggaatatgtagctgtggaaactgtgaatgctgggatggatggaatggaaatgcatgtgaaatctggcttggctcagaatatccttaacaattacatgagagaggtctggattcttattttttctgggccattagaacatataaatgcgaaggaaaccatgtatattcaccactaggacaggttaaaaagaccattgtatgtttttctatttctgaattacgaatgaaatccgagtacctattagaaatgagttatgcaaatttagatgcaaataacattagaaaaaaaagattcttccataattaacataagtggttcctaacgagagcaatttttccacccaaaagtcatttggcaacatctacagacaattttgattgtcacactgggtcgggtaggaaggtatgctgcagacatttggtgggtagaggccagggatgctgctgagcatcccgcagtgtacaggacagcccccaaacaaggaattatccagccccaaatgccaatagggctcagactgagaaacattgagttatatggctattagaaatccacattcttacacaagaaagaccatattagaatctaaggaaaacatgcatattcacattaattaatcgatcagatttttccagaattccgtatcagtcaccattttaatatggggacaatgaagacaagcacacaggaggtagaatatcagagtggggctggatcaagggcaaaaactggtcattaagtcatctgacattaaatcatttagccactaagttatttgtgtactctcactttaaactcaccaaagaagattctcttaaagaaattatgaaaaatgtacaatttaacattttaaataaatagtgacagaagttgtttaaaaa

SEQ ID NO: 221562 - DNA, 1000 bp, Homo Sapiens; identical to SEQ ID NO: 116279

SEQ ID NO: 221563 - DNA, 1000 bp, Homo Sapiens
aaaacaacaaaaaagcaaaccttaaaatgtgaagaaagtgtgaattttagttttgtcacagttaactgtgtcaaagagaattaaaaaaaaaaacttcagattttgtttacatattttactacatttttgctggtataattccttagccacctatgtacatactgctttaagaaatgtttttttcctgtttatttctgtttggtttatattctggttgtctttttctttttgtaaagaggaaacaatgtacagaaaaacaataaactggttgtatggccatagctatccgaaaagcaagagacaaagcaagacaaatattcacacaaaaatgaagtgtgtcctctggagggtcatatatacaatttcttttgtacagatgaaaatcaatcagctgcttagatttagaaatctactcttgctggtctttgtaagttgcatgaatatttgactttgaaaaaatatcttaacgacatggggcaaaaagtgcaatctaaatggtagcctttactaatgtgtgtggaaagaggtgttcctcattatctaatatttcaatgtgttaagagtttaatttttttgttatcattaaaaaagacaggattataaagagatatcaaagcacgattttagataacctaaacggcccagcctatacgaagttgattatatctcgatgtctgtaaaagattgctgttcttggagtcttgaggtcttgtgaattgatttcctgctttctttcatttttttcaatttaagtaataatacatttgttatattcctttcagtgtaagtttctatttggacaattttatgggaacatgtgcattctctatgtgagcttctatcatattcctgttttattagcagaacctaaaggaatttatttaatgatgttgtgacattactgctttttcttttttcttttcttagttcatatttgcattttcgttcaaggatatgcttagcaataaaatgttcttcccaaaaaaaaaaaaaaaaaaaa

SEQ ID NO: 221564 - DNA, 1000 bp, Homo Sapiens
gaaggcggacgcggaggaaccccaggagcacatccacatccagtgggtggatgatgacaagaacgttagcaagggtgtcgtaagtcctatagatgggaagtccatggagactataacaaatgtgaagatattccatggatcagaatataaagcaaatggaaaagtaatcagatggacagaggtgtttttcctagaaaacgatgaccagcacaattgcctcagtgatcctgcagatcacagtagattgactgagcatgttgccaaagctttttgccttgctctctgtcctcacctgaaacttctgaaggaagatggaatgaccaaactgggactacgtgtgacacttgactcagatcaggttggctatcaagcagggagcaatggccagccccttccctcgcagtacatgaatgatctggacagcgccttggtgccggtgatccatggaggggcctgccagcttagtgagggccccgttgtcatggaactcatcttttatattctggaaaacatcgtataaacagagaagacttcatttttttctgttcagacttgttgcaacagcagtcatacccaaatcatttgcactttaaaactggaagattaagcttttgttaacactattaatggggtggggaatagggtgggagtgggggtttgggagacgggtgggaaagggtggttggggggaccgatgttccataattctaagtcttctatgcattgtccaccaagaagatctgggcagcttctgttcctgcacaacagttatgctatccttgcagctaatccccttctgttactgtttagacaagaattccgctcctctctcaagatttacttatggtcatgtgctcagaaatgctcaaatgggtacaaccatcaccaagggtgggatgggagggcagaggggaaataaaatataaagcatcagttcttgcactctttgtacagaattggtataaaaaggataattccacactgaaaaaaaaaaaaaaaa

SEQ ID NO: 221565 - DNA, 1000 bp, Homo Sapiens; identical to SEQ ID NO: 116281

SEQ ID NO: 221566 - DNA, 1000 bp, Homo Sapiens
tagaaaagggactgtttttctatggactaagtagaagttacagagtcatgtaagaaaatctttgctattgtgtggagagaaattgctgcatttctgtttcttaagtgatggtacatttgtccatgtaacagaacaaaagatccatttggaaattttttttactggtatcaccttacatggtatcactgggaacatttatggaatcaacacttctgtagctcagtgacaggtggtggttgtttaagtgcagagcaatattaaatgtactggtgactagtacatgtatttctccataagcagagttgccgaatcaataaacatgcaagtttgtactttgatctttaccaggtcagtggattgcttcaaaagcagagttttgtgcaagcactcactgtgctctctgaaagagcctgaggccgggcgtggtggctcacgcctgtaatcccagcactttgggaggccaaggtgggcagatcatgaggtcaggagatcgagaccattctggccaacatagtgaaaccccatctctactaaaaatacaaaaattagccgggcgtggtggcgtgtgcctgtagtcccagctgcttgggaggctgaggcaggagaatcgcttgaacctgagaggtgaggttgcagtgagccgagatcgagccactgcactccagcctgggtgacagagcgtgagactccgtctcaaaaaaaaaaaaaaaagaaagagcctgtacccgcgactaactagacttttcttgctgttgtgcaaagttcagtttcttctcagcaacatcaaggatatatgaagaaaaggaaataaaaaactgtaaagtcaaaagagatgcctggtggaacttattcgtgctatcagggcattgatagtttgaatgtttttattacttatgcaaaattgcacatactcctctatgctgattttatcatgaaaactgtcatgtgtcatgctaatggaaaatgtcttatttgtaaataagtattcataattttgccg

SEQ ID NO: 221567 - DNA, 1000 bp, Homo Sapiens
ttcgccgattcgcacgagctgtcagagctggtgtactctgcctctaacctgcttgtgctgctcaatgacgggatcctacggaaggagcttcggaaaaagttgcctgtgtcgctgtcccagcagaagctgctgacatggctgagcgtgctggagtgcgtggaggtgttcatggagatgggagctgccaaggtgtggggtgaagtgggccgctggcttgtcatcgccctcatccagctggccaaggctgtactgcggatgctcctgctgctctggttcaaggctggcctccagacttcaccccctatcgttccactggacagagagacccaggcacagcccccggatggtgaccacagccctggcaaccatgagcagtcctacgtggggaagcggtcaaaccgggtggtgcgaaccctccagaacacgccgtccctgcactccaggcactggggagctccccagcagcgggagggacggcagcagcagcatcacgaggagctgagtgcgacccccacccccctggggctgcaggagaccatcgcagagtttttgtacattgcccggccgctgctgcacttgctcagcctgggcctgtggggtcagaggtcgtggaaaccctggctcttggctggtgttgtggacgtgaccagcctgagcctcctgagtgacagaaagggcctgacccggagggagcggcgggagctgcggcgccggaccatcctgctgctctactacctgctgcgctctcctttctacgaccgcttctccgaggccaggatcctcttcctgctccagttgctggccgaccacgtccctggcgttggcctggtcacaaggccgctcatggattacttgcccacctggcagaaaatctacttctacagttggggctgacagacctcccggaaggagggtgtggggaggggtggggcagggagcccctcttccctaataaaactgactccggcagcgtcaaaaaaaaaaaaaaaaaaaaaaaaaa

SEQ ID NO: 221568 - DNA, 1000 bp, Homo Sapiens; identical to SEQ ID NO: 116287

SEQ ID NO: 221569 - DNA, 1000 bp, Homo Sapiens
tcagattcgggaaactcaaaatcaaaagacttagcttctaggataaatacttctgatgaaaaatccgctgaggagcataccccaaaccagacatatgcttaggattcatgctgagatatcaattggtttccccttctttttaaaatacgtccagttcttacccagttaacatgaagaaaccactgtctctagaagaaagcttgttttgcagtattagtgaatcactgaatagcttaagtatgactatctaagttataagttagtctttagtgggttttaaatagtttttctgacccttctgaaaaataactacataagtgcttcttgttgctgggtgagaaatactactttatagacagttttggttttctgtttgcagatatgattgatgtatttcaccaaaataaaatatttttatgtttataaagtgtaatttttaggttcacttagaatatattttatttaataagttaaaattcttttggcacactattaaatgcaaaaactcctttcaaaacaaaaaagaactaccttatattcaacatttaatgttcttggcctctgcttttatgtctatacaatatactgagttcagtatggtgtccaagagtgccctgtgtggatagacatgtgcactccttccaggagtgggtactgattccagactccagatgcctattattagttaggcttctgagcttgcaatcatattgaatgtatgaagagcgaaatcaaattcttatttttgtacagttttgaagtttatacttagaactgaccacctccccggccacgcggagagctgtacagtgtgtaaatctgcctttatcttggattgattggtacagtatttttgcatctgtgggacctaccttttcgttcagtagtttgaactatatataaactgtacaatctgtaaagtttttatagaataaatattcagctgtgaaaactggttaaataaaactaatatttcttaacacaaaaaaaaaaaaaaaaa

SEQ ID NO: 221570 - DNA, 1000 bp, Homo Sapiens
ggaggtggacaagtccacgtggctgctccccccacaggcgctcaatgcctactatctacccaacaagaaccagatggtgttccccgcgggcatcctgcagcccaccctgtacgaccctgacttcccacagtctctcaactacgggggcatcggcaccatcattggacatgagctgacccacggctacgacgactgggggggccagtatgaccgctcagggaacctgctgcactggtggacggaggcctcctacagccgcttcctgcgaaaggctgagtgcatcgtccgtctctatgacaacttcactgtctacaaccagcgggtgaacgggaaacacacgcttggggagaacatcgcagatatgggcggcctcaagctggcctaccacgcctatcagaagtgggtgcgggagcacggcccagagcacccacttccccggctcaagtacacacatgaccagctcttcttcattgcctttgcccagaactggtgcatcaagcggcggtcgcagtccatctacctgcaggtgctgactgacaagcatgcccctgagcactacagggtgctgggcagtgtgtcccagtttgaggagtttggccgggttttacactgtccaaaggtctcacccatgaaccctgcccacaagtgttccgtgtggtgagcctggctgcccgcctgcacgcccccactgcccccgcacgaatcacctcctgctggctaccggggcaggcatgcacccggtgccagccccgctctgggcaccacctgccttccagcccctccaggacccggtccccctgctgcccctcacttcaggaggggcctggagcagggtgaggctggactttggggggctgtgagggaaatatactggggtccccagattctgctctaagggggccagaccctctgccaggctggattgtacgggccccaccttcgctgtgttcttgctgcaaagtctggtcaataaatcactgcactgttaaaaaaaaaaaaa

SEQ ID NO: 221571 - DNA, 1000 bp, Homo Sapiens; identical to SEQ ID NO: 116289

SEQ ID NO: 221572 - DNA, 793 bp, Homo Sapiens
tgcgccacgatgtccggggagtcagccaggagcttggggaagggaagcgcgcccccggggccggtcccggagggctcgatccgcatctacagcatgaggttctgcccgtttgctgagaggacgcgtctagtcctgaaggccaagggaatcaggcatgaagtcatcaatatcaacctgaaaaataagcctgagtggttctttaagaaaaatccctttggtctggtgccagttctggaaaacagtcagggtcagctgatctacgagtctgccatcacctgtgagtacctggatgaagcatacccagggaagaagctgttgccggatgacccctatgagaaagcttgccagaagatgatcttagagttgttttctaaggtgccatccttggtaggaagctttattagaagccaaaataaagaagactatgctggcctaaaagaagaatttcgtaaagaatttaccaagctagaggaggttctgactaataagaagacgaccttctttggtggcaattctatctctatgattgattacctcatctggccctggtttgaacggctggaagcaatgaagttaaatgagtgtgtagaccacactccaaaactgaaactgtggatggcagccatgaaggaagatcccacagtctcagccctgcttactagtgagaaagactggcaaggtttcctagagctctacttacagaacagccctgaggcctgtgactatgggctctgaagggggcaggagtcagcaataaagctatgtctgatattttccttcagtaaaaaaaaaa

SEQ ID NO: 221573 - DNA, 1000 bp, Homo Sapiens
cttcaggaggagaaggagaaagttgataagcaatacaaatcggtaacaaaaccaaagccactaagtcaagctgaaatgagtcctgctgcatctgcagccatcagaaatgatgtcgcaaagcaacgtgctgcaccaaaagtctctcctcatgttaagcctgaacagaaacagatggtggcccagcaggaatctatcagagaagggtttcagaagcgctgtttgccagttatggtactgaaagcaaagaagcccttcacgtttgagacccaagaaggcaagcaggagatgtttcatgctacagtggctacagaaaaggaattcttctttgtaaaagtttttaatacactgctgaaagataaattcattccaaagagaataattataatagcaagatattatcggcacagtggtttcttagaggtaaatagcgcctcacgtgtgttagatgctgaatctgaccaaaaggttaatgtcccgctgaacattatcagaaaagctggtgaaaccccgaagatcaacacgcttcaaactcagccccttggaacaattgtgaatggtttgtttgtagtccagaaggtaacagaaaagaagaaaaacatattatttgacctaagtgacaacactgggaaaatggaagtactgggggttagaaacgaggacacaatgaaatgtaaggaaggagataaggttcgacttacattcttcacactgtcaaaaaatggagaaaaactacagctgacatctggagttcatagcaccataaaggttattaaggccaaaaaaaaaacatagagaagtaaaaaggaccaattcaagccaactggtctaagcagcatttaattgaagaatatgtgatacagcctcttcaatcagattgtaagttacctgaaagctgcagttcacaggctcctctctccaccaaattaggatagaataattgctggataaacaaattcagaatatcaacagatgatcacaataaacatctgtttctcattcc

SEQ ID NO: 221574 - DNA, 1000 bp, Homo Sapiens
gtttaaaaaccaaacttgaagccaggcatggtggcccacacctgtggtcccagctactcaggaggctgaggtgggaggatcatttgagcccaggaggtcaaggctgcagtgagctgtgatgacaccactgcactccaacctaggtaacagagagacacctctgtctctgaaaaaacaaaacttgaagtttgaaacccccagcttgctgaggagccctttttatttttggtactgagagtctcaaggtcccatagctacatggtacagggctgttgtctgcttgctgcacagcagaaattacaccatccacaggaaatggactatttttgcagtccaacatcagccaaccacacacagccgtgtttggaagctgaagagtaaagaaatttctaggaatggctgttgttctgttttttagcacagccatttagatataacatccttcacttaaaaattaaaaacatcagtactaccaccaccaccaacaacatcaacacagatcttcacatctgcccattctgtggttagtcaatggcttgcaataaatgtgcaaactgcatctataggaaacatttttgtgattacggaatactttagttgattgctgaaaatattgaaaggtcttcattttacagtgatgagtacatatgcatgtttcggggacttggcccttctgatgaggggccctcggtactctggataacgaagcttgtgcagagtggtaaccatgcttacacactaaactataatataaaggaaatgaagccatgttaatctgagagcagtgtcgccatagttgtgttgtttacaatactctataaatgggttcctgttgccctgtaattaaactgctgcccgtagaggcctttcagttccttttctgtccttccccttcttaacacaagctcaaattttctaacttgtttttattttgaagacttttaaaatggacattttcaatacataaaaataaacagtgctttataaaaaaaaaaaaaaa

SEQ ID NO: 221575 - DNA, 1000 bp, Homo Sapiens
tctatgtacatagggaacttagttctgggccatgtacagaaaatatcactgtaatataccaaaaggaagttaataatgtagattacctttttgattattgctatttttattattgttttcctcttgttgaaagcactgcagttgttacaggaagtaaagtaggaactgttgtgtgagcgagacatgagcctgtaggttcagtaggtagagaccaagcatctatctgatagaagcacatggagtgcaataggacattgtgagaaggaatttttcagggattcatctactagtttaaaaaccccactctggccctcttgtcctttcagaaaacatgcaaataccaagatccatacaaaacaataatttattccactgatcaaccaagactggttctggttggacagctaatctgatttggggattcactgtttcagaggacacagacaaaagctgttgcatcaaaactggactttaggagtaatttctattgaactcctgtcaatatgtttatttcctctgtctacagcagatgggagtcttctcttttagacaggggctttttgtttttaaccccaattgtaataaagggtgttctttttcctctttagagtttacaaaactataaatatttgtgtctccacataccatcttcatcttcacacattcactgtgctttcctccccatagtgggagctgtcatcaccaacagggtttactctcccctggagaggttatttaaatagctgtccataagccatccagatcaacaccctttcttccatacagaaaagggctaaccataccacagctggaatctctgaatatttcctattaaaaattttttctatgtgttgttataatttttgtttgggataaagactctatccattgtactagcaaatctatggggggtaattttatctccatctttaacttttaaagtacttcttccccttatcccctcaataaagaaaggaaatccaaaaaaaaaaaaaaaaaa

SEQ ID NO: 221576 - DNA, 1000 bp, Homo Sapiens
gtatgagaagcacttcctgcccacacctgaggagctgggccttctggggccccccaggccacaggttctggcctgaaccacacgtctggctgggggctgccagccaggctagagggatgctcatgcaggttgcaccccagtcctggattagccctcttgatggatgaagacactgaggactcagagaggctgagtcacttacctgaggacacccagccaggcagagctgggattgaaggacccctatagagaagggcttggcccccatggggaagacacggatggaaggtggagcaaaggaaaatacatgaaattgagagtggcagctgcctgccaaaatctgttccgctgtaacagaactgaatttggaccccagcacagtggctcacgcctgtaatcccagcactttggcaggccaaggtggaaggatcacttagagctaggagtttgagaccagcctgggcaatatagcaagacccctcactacaaaaataaaacatcaaaaacaaaaacaattagctgggcatgatggcacacacctgtagtccgagccacttgggaggctgaggtgggaggatcggttgagcccaggagttcgaagctgcagggacctctgattgcaccactgcactccaggctgggtaacagaatgagaccttatctcaaaaataaacaaactaataaaaagcaaaaaaaaaaaaaaaagaaaagaaaaaacactgcatttgggcaccatctcagctcccttgcatccaggtgcagcatggactgagttcttgacaacagaatgtggtcagaagtgacatatgccaacacggggtctgggtgggggctcccccacatcctttccttgcctatgagctggaacataacacatgcctatgatccagctttggtcatacccaaggggaaggtggagcaagaaatgaaaaggaacctgaatccctgaatgactgcatggatagaaccactaagaaaaataaacttttatatttttata

SEQ ID NO: 221577 - DNA, 1000 bp, Homo Sapiens
gaacattttatggttctcatccatggcactggtacttcagtcaaggatttccagttatcttgggtactcacttacccttctttattcatggctgctatctagcaccaaagagataccggatacttttggtgactgtgctgtggacactgcttgtttatagcatgttgagccacaaagaattcaggtttatttatccagttttaccattctgtatggtgttctgtggatactcattaacccacctgaaaacatggaagaaaccagctctaagtttcctgtttttatcaaatttgttcctcgccctttatactggtttagttcatcaacgaggtactcttgatgtcatgagtcatattcaaaaagtttgttacaacaatcccaataaatcttcagcttcaatatttataatgatgccttgccactctactccttattacagccatgttcactgcccacttcccatgagatttctccagtgcccgccagacctgactggaaaaagtcattatcttgatgaagcagatgtattttacctaaatcccttaaactggttacatagagagtttcatgatgatgcatcattgcctactcacttgatcaccttcagcattttggaagaggaaataagcgctttcctaatttcaagcaattataaaagaactgctgttttcttccacactcacttgccagagggtcgaattggaagtcacatatatgtctatgaacggaagttaaaagggaaattcaacatgaagatgaaattctgaactttcctagataaattaacattgctgggtggaaatattcagatgctgcttaaatacttcggtaaacactgggtaagattcatggaacttagaaaaaagctgtatgaactgctttaccaaatatcactactgaggaaatgtataaaataccacatagtataaaattacatgttaatacaatgccagattttaaataaagacctttagttttcctcaaaaaaaaaaaaaaaaaa

SEQ ID NO: 221578 - DNA, 1000 bp, Homo Sapiens
aggaccgtcatggatggaggcctggaatcagatgggcccaacatgacagagaatggcctggaagatgaatcaagacctcaacgtcgtaatcgcagccgccgccgccgtaaccgtggtaatcggactgatggctctatcagtggagaccgccagccagtgactgtggctgactatatctcacgagcagagtctcagagccgccagagcgcacccctggaacgcactaaaccctcagaagactctctttcaggacagaagggtgactctgtcagcaagcttcctaagggcccctcggagaatggggagctctccgcccccttggagttgggtagtatggtgaatggggtttcataaaacctccaacctgcacccctcccttctccatctcgcttgctgcccaacaccatggccctcacaggcccaactgacctgcgctggagctgctcttatctaggggggaggggggtggcacagcagcttgggtaccccccaacctccaggagctagtggaggggtgtgtaacagggtcataccccctccctcttgtccaccctacccccagggtaaggggagcctctctccttccccatcagactggatgtgcctttatcctctaatgccccaatctctctctgaacacccccattctccacctgttggtggggggtgctcctcgacccacccagatttgaccgttcagggggcctcccctgctatccctcctcccatcctgtaccccccatttctggggcctcatcactgtggaagacggggatagtaagagataagtgggtgggaggcacggggaaggttttggagtagaaccaggggtgtgtatgaaggggggtgacaaggtccccctggggaggggaccaaccttgtctggtggatgagaaggcgtatttatttttcactgtacagtatttaaaaagagaataaaaaaatccaaatggcaaaaaaaaaaaaaaaaaaaaaaaaaaaaaaaaaaaaaaaaaaaaaa

SEQ ID NO: 221579 - DNA, 1000 bp, Homo Sapiens
ctgcaagacccggatcgctactacgaccccaacggcttcaatgcccactacctccgaaacctgctcttcttcgacctgggctatgacaacagcctggaccccagcagcccgcaggtgcaggagcacatcctggaggtggagcgtcgcttccacctggtgctccttcaagagtacttcgacgagtcgctggtgctgctgaaggacctgctgtgctgggagctggaggacgtgctctacttcaagctcaacgcccgccgcgactcgcccgtgccgcggctctcgggggagctgtatgggcgcgccaccgcctggaacatgctggactcccacctctaccgccacttcaacgccagcttctggcgcaaggtggaggccttcgggcgggagcgcatggcccgcgaggtggccgccctgcgccatgccaacgagcgcatgcggaccatctgcatcgacgggggccacgccgtggacgccgccgccatccaggacgaggccatgcagccctggcagccgctgggcaccaagtccatcctgggctacaacctcaagaagagcatcgggcagcggcacgcgcagctctgccggcgcatgctcacgcccgagatccagtacctgatggacctcggcgccaacctgtgggtcaccaagctctggaagttcattcgcgatttcctgcggtggtgacgtcccaccgcccagcggcttgcctgcctgctcgctccctgcagaggggctgagcaggacgccgctggtgctggccgcccccagccccctcctggtgccacctcagaccccggggtgagggggggctccctggggggaggcagccagccaagactgggcccatgaacacagagagggcctaaccgagatcagtatttaactaattataccagtttttattaaacccctttccctccccgataaagaatgttctatttctgcctccccttaaaggggagacctcagaagtaaaggaatttgatgttgtgtttttgtt

SEQ ID NO: 221580 - DNA, 1000 bp, Homo Sapiens
atctaagaaaaaaatgttttttaaatcagcttagcccaaaggggttgtgaatggggaggtataaaaagcaaagattattttttggctactaagccaagaacttacagggattttttttttcagtcccagaacctacagataccctgctacttgcttcacgtggatgctcagtgcccagcagccatcttaatacattaaaccagtttaaaaaataccttccatgtggagaaaaacatgtctttttctcgcctcaactttatccacatgaaatgtgtgcccatggctgggcgcagtggctcacctgtaatcccaacactttgggaggctgaagcaggcagattgcttgaggccaggagttcgagaacagtctggccaacatggcgaaacctcatctctactaaaattacaaaaattagccgggcatggtggcacatgcctgtaatcccagctacgtcaggaggctgaggcacaggaattgcttgaacccaagaggcagaggatgcaatgagccaagatcacaccactgcactccagccttggcgacagagggagactctgtctcaaaaaaaaaaaaaaaaggtgtgcccaggcccctagccattgccatgtgcccagccagagagccaaattagagggctggcttccctatcacacagaataaatgctagtgctagccaatgatccctttgcttttaatgtatagaaaatactgttgttccttttgtcatttccagtgacatctgttttctaagcagctcttttctagggaggaaaccaaaggggctaggttaagaccctaatagaaatgttttttctaatctctggtgagtctggaagtgtcacattcacagtccacccttgggagtggcttggtggagctggggacaaggttttgtttactacatagtgcacatgataaatggccttaaactgtgattctttctggtaggataagttataataaactgaccctaaagaatgcaaaaaaaaaaaaaaaaaa

SEQ ID NO: 221581 - DNA, 1000 bp, Homo Sapiens
ctaattacaaatgtagtctgtgtttttagaacaagatgtcatttaaacttaaggaagattgctttggaaggagcaaatgtaatttataaacgtgatgttggaaaagtattaatgaagcttagaaaacctagaattacagctacaatttggtcctcaggaaaaattatttgcactggagcaacaagtgaagaagaagctaaatttggtgccagacgcttagcccgtagtctgcagaaactaggttttcaggtaatatttacagattttaaggttgtaaacgttctggcagtgtgtaacatgccatttgaaatccgtttgccagaattcacaaagaacaatagacctcatgccagttacgaacctgaacttcatcctgctgtgtgctatcggataaaatctctaagagctacattacagattttttcaacaggaagtatcacagtaacagggcccaatgtaaaggctgttgctactgctgtggaacagatttacccatttgtgtttgaaagcaggaaagaaattttataattcaccacttaattggttagaatctctaactgagcaccttttaaacctgctgcacattggactcaaaaggaaaactggaccaacaataattgaggaaatagactcttttattcattcacggctacagtgtaagctccagtccctttggattttattccaaaccttgctgtaatataaaaggaagtttacaagacatgatattgctgcttttacaaaaggacattctatttattttcgcagtaattctcatgtccccataagcagagctgtcacagtgtgcactaccttagattgttttattgtcgtcattgttatttttttccattttgagctaatgtgttttatttgtgaatagtcttttacatttttgtatgctgaatatgggcaccaaagaacctgtaaaagttatctttttcaattgaatgtgcacaaataaaagtttggaaaagataaaaaaaaaaaaaaaaaaaaa

SEQ ID NO: 221582 - DNA, 1000 bp, Homo Sapiens
agacgtccaccacaggcatcgtcatcggcatccacatcggggtcacttgcatcatcttctgtgtcctcttcctcctgttcggccaaaggggcagggtcctcctgtgtaaagatgtggaaaaccagctgtcccctccacagggtccccggagccagagggaccctggcattctggccctaaatggggcgagacggggacagcggggccagctgggccgagacgagaaacgtgtggatatgaaggagctggagcagctgttccccccggccagcgcagcagggcagccggaccccagacccacacaggatcctgcagcccccgctccgtgtgaggagacccagctctccttgctgccacttcaggggtgcggcctgatggaggggaagacgacggaggcgaagaccacagaggccacggctccctgcgccggcctggcggctgccccaccacccccagatggaggccctggcctcctcagtgaaggccaggcttccaggcctgcagcggcccgggttacccagccagctcactcggaacagtagccagtgtctggcaggctccagagggtggacggagcggggcccattctcaggtcaaaagcaagatttctactgtcatgtgggatttggatggtcctgggggctccccagtatttctatcctgactgcctcttgggttgtcaaaacccaaggcagccttgacagggaccccccggccctaacacccatcaggagttggagcagttcctgcaggagcctgttccttccctgggctgacgcccccttgcctctgcctggtacccacatgacttggaactgaactaacatttttctttaaaaagcaaaacttaaaaaaaaaaaaaaagaggagagagatagaggaaggtgaattagactccaaaagatgaccctgctgtagctgggccctgacactgtcaccctccaccgactttgttttctcaggatggatttttgctgttttggctctcagcacctacctc

SEQ ID NO: 221583 - DNA, 1000 bp, Homo Sapiens; identical to SEQ ID NO: 116295

SEQ ID NO: 221584 - DNA, 1000 bp, Homo Sapiens
atgctaagccagttcttaagacttctctgtcctctgctttgctgttatccttaaggcatatactttgtctttctgcagaaaattctacctggctacaattactttgaacattaatgttgaaaaagaaaacaaccaaagaaaattggtacttacccttctacaaaagaagtgtgactagatatcaatcagtaattaacatatcaaggagctcttctagctaaatgaccatccagtagagatttcccacattcccatgaatatcaagaatagttgtcagaatatgtatgtacctgagcatatgtacacagacaagggggatgttgtggaatatggcaatagcattgttcttctcccctttcaaattgcctttcttgaccttatgccattccatatatatctgagttgtgcctcatttatttattggcaatacctagtgatacggatttagctaacaaaagatatgaagaactattatattgaggcctgtcctctacataccacacttaaaagatggtgaactgtgagtactacttaggttgacagcaacaaagcataagacaagccccaggtaaacgtctaaactgtttactcacattgtcctactccagccccttcaattatttcccatctccacaaatagtcgggggaaaaaattaaaattttcctttatgattcttactgttcttcgcagctcatcttttcctgcttagaattaaccattgctaatttaaaggagcagctagctgcttttctgtcagtctgaagcgtagtagtggaagaggtagtaagcaccagctgcctctttgctgctttgttttcctcctgattctcttaaatttgggttgcaaagctatcccgccccccaccctgccccatgaaacttgagcattcaaatgaagattcagcagtgtctgttcttcatttctatagccaaagctgttagttaaaatcccaaatctatagcatttaaagataccaaatagaaacaccttccagcttt

SEQ ID NO: 221585 - DNA, 1000 bp, Homo Sapiens; identical to SEQ ID NO: 116302

SEQ ID NO: 221586 - DNA, 1000 bp, Homo Sapiens; identical to SEQ ID NO: 116306

SEQ ID NO: 221587 - DNA, 1000 bp, Homo Sapiens
atttctcaacatttttttaaaagtcttagttaaaatgtaaatctgatatacagtagtgtttctcaaagtatagttcatgaactccttgcatcataattacctagatgcctcttaaaaatgaagatttcagagacccattctaaacaagggcattcactctctggaagtagcatggccttgtgaacttaaatttggttttgttttttcttttttgctgttagaataatttcagacccaataaggaatttcgattattaaagttgagaaatttcacaaaactgcctggcacacaagcacacacatacatagacacattttaagtgataatctcttgatattagaagttgcatttgttaaatacatgctgtattttttatgagttgacttaatagtttatgtatattgactttgctttgtaggaagtaaatcaccagatatcttattgtttcatttaggaaagtagtgatatagatgaagagccaacttgatgaatgtgctattcataagctagaaactacagtttttccaaactaataaactgatgaattctaaataagttcagagatatagtcatatttaaagttgtcctacagtttgcagataatttttatattactattcttcacattaacttctgcttatttttaatggtactatatgtaggccttattaaaattaagattgtatggttaagtaaagttaacaagaaagcctgatttatctttaattctgtgctaggtacttttgattctacatgaacaatacccttttcagttcccttcattctaatgtcctcaactgttaccaaataccctgttgactcccaaacctaagattttagcctcaacttcttttctgaacttcaaatcttaatttccaagttatacttgttctaggtccatctaaatggtctacagagaacttcagttgaatcatagctggaaacagaatttatttcctctatttgcttcattctgtccttccactatattccctattt

SEQ ID NO: 221588 - DNA, 1000 bp, Homo Sapiens
tcagcctcccgagtagctgggactacaggcacgtgtgaccatgccgggctaattttttatatttttagtagagagaggtttcaccgtgttagccaggatggtctcgatgatctgacctcgtgatctgcccgcctcggcctcccaaagtgctgggattacaggcctgagccaccgcgtccggcctccataaatgacttttaaaggggttgtatgtttagtgtgaacaaagacagtacaaagcatataaaatacaaggtgaaagccccccccccgccacattagctgcgcccctgaagtgtctccagcagaagagatggatgaatggaaggacacacagatggacagagagcaggaaagactgttagctctgctaacagtcaggactattccttctggactctgtgcctttgcctgcacagctagtgttgatggcttgtttgttgttttcaccagagtgagctccttctggacatactgcctggcagcctgccttcctagggagctggcgccaaggcctctccctgatggcacacaaggagcctccttcctgtagcagcgcccagttttcatgtggatggattgtagttcatttgaccctccccatccgcgggccatccggcttgtgtccagcttttagctcttgccaatggtgctgcagtggccattcttgtagttatagctttgcgtactcaggaaggcccttctcccgactgcggcccccagcctggtccactaaatgcagcctgtggtcgggcagacagcattggggtccattaggaagaccaggtttgctgggcataagcttcacaggacgggagaacctgcccatggtggactgtcgttctccacagctcccttcccttgccccttcgggcctccaggatatgtttgcgggggtgggtgtggtgtccagctgttaccagcttctgagctagagctgtactgcctcacgtacacccccacctctgtaaatggtccttgattaaatcgtcctcatatt

SEQ ID NO: 221589 - DNA, 1000 bp, Homo Sapiens
catctcctgggaggtggtggaggccacatgcgcctgcctgcttgctcagggagaagaggccgagaaagaacactgctccaagtgcctggcagagcagatgatcctggaggaatttggaaggtgcttatcacagattctccacactgagtttaaatctaagggattgaaaatggagtagagtataaagtgtgaatgcatgttgattttgtcttagtctagaaatctctagtttagaaaggatgtttaggggaacatgaggctggctctgcagcaacaaccaggctcccctgcatccctgggcccagggagtttactcagagctctctgaagatgtggcaacccatgcccccttttctgaggaggtgcatggcctgagcattgtttgtctggcccagaggagagagcttgggttcccatagtcctgggagagtgtctgcagggcggcggagggcagagcaggccctgcggagagctcactctggtcgactcttcctctcagagaatgttgctctggaggctgctctgcatgaaaaccctaatggtttcttgtttgtttttcaaattatttagaaataagttctccggatgggctgttgtgataccacttaaaatctctagagaactactgaacacctaaagattttctgtagcgtagatatttccccagaggcacgcgaactgtcagtctttcctaaggcccccgggagacgcaggcaatggggcctcgcaggccaggcttgcaccagcatgtcttgagttagaggacttaaaattatccagtttcttctgtgtttctacttgaattgtggaaaagctctattatccaattaacttctccataattattgttgtaatattattattgtttgtaaaacatggttcacataactagcttgtggaaaccagcaggtaaaatgaattcttaagttgacgcttttggttctgttgtaaagcaaagatgaataaaaatttccaatgtcttcaaaaaaaaaaaaaaaaa

SEQ ID NO: 221590 - DNA, 1000 bp, Homo Sapiens
ctgcttggatccatacaaaactatcggttcaagttgatgtgacaagggaagggagcaccagatgacacataaatctgtctgattctatgcctgtatttccaacaaacttactgtcagagaatatgacctaaatccattttctaaactgttttcatgtgttgcaaattattctagtcaactgctgttttatgtcatactctgtgtaatctctgattaaatttaatatactgcatatcctggtgtctagtttgcatacttcctggattttctttctatgtagaactgttcatttccaccaagggtatctgctgcctctgaaaatatttttttctagctataacaactctattttttactacataattaaattttaatgtaaaattcatagcatcctgattattgaatgttatatcatcaatacttttgtgtattctgtggattctatatttcatattgagatcagcattcaaaatagttctatttctatctgcaaatagtttcaaatgagtttaaaaaaataacatctgaaaagaaatgctaatgtaatcatttatcttatctagcaagaagattctaaaacattctttaacatacatctaagtcagtttcacatatttgtagctagaatatcctatactggttatagttgatatgtaacagttggtgattttagatttctttgattgtgaaacagggagctatgagagatgtgtccatgtgaaatttacagttactgcctaggagttaatgatcgttctgggtcagcttgaatgtccccattctataaattcaacacttattttctgaattcataaaaataaccaaaaaatgtgagctataatgtttccctcaagaacaaacagaaacgagatttgccaaaaactaaaattcaacaaatgatgttgagtgggagattggctttgcctttagcgtgtaaatggaagcactgccattagactgaatttaactactaagaataaataaagaagaaaataacctt

SEQ ID NO: 221591 - DNA, 1000 bp, Homo Sapiens
tctttcagctatcagtaggctaatgtcaaaattgtttaaaaattcttgaaagaattttcctgagacaaattttaacttcttgtctatagttgtcagtattattctactatactgtacatgaaagtagcagtgtgaagtacaataattcatattcttcatatccttcttacacgactaagttgaattagtaaagttagattaaataaaacttaaatctcactctaggagttcagtggagaggttagagccagccacacttgaacctaataccctgcccttgacatctggaaacctctacatatttatataacgtgatacatttggataaacaacattgagattatgatgaaaacctacatattccatgtttggaagacccttggaagaggaaaattggattcccttaaacaaaagtgtttaagattgtaattaaaatgatagttgattttcaaaagcattaattttttttcattgtttttaactttgctttcatgaccatcctgccatccttgactttgaactaatgataaagtaatgatctcaaactatgacagaaaagtaatgtaaaatccatccaatctattatttctctaattatgcaattagcctcatagttattatccagaggacccaactgaactgaactaatccttctggcagattcaaatcgtttatttcacacgctgttctaatggcacttatcattagaatcttaccttgtgcagtcatcagaaattccagcgtactataatgaaaacatccttgttttgaaaacctaaaagacaggctctgtatatatatatacttaagaatatgctgacttcacttattagtcttagggatttattttcaattaatattaattttctacaaataattttagtgtcatttccatttggggatattgtcatatcagcacatattttctgtttggaaacacactgttgtttagttaagttttaaataggtgtattacccaagaagtaaagatggaaacgtt

SEQ ID NO: 221592 - DNA, 1000 bp, Homo Sapiens
caggcctcagcctgggcgcactggtcatcgtgctggccagcgccctcctgctgctggtgctggtcctgctcgtggcactccgggcgcggttctggaagcagtctcggggcaaggggctgctgcacggcccccaggacgaccttcgagacaatgtcctcaactacgatgagcaaggaggcggggaggaggaccaggacgcctacgacatcagccagctgcgtcacccgacagcgctgagcctgcctctgggaccgccgccacttcgcagagatgccccgcagggccgcctgcacccccagccaccccgagtgctgcccaccagccccctggacatcgccgacttcatcaatgatggcttggaggctgcagatagtgaccccagtgtgccgccttacgacacagccctcatctatgactacgagggtgacggctcggtggcggggacgctgagctccatcctgtccagccagggcgatgaggaccaggactacgactacctcagagactgggggccccgcttcgcccggctggcagacatgtatgggcacccgtgcgggttggagtacggggccagatgggaccaccaggccagggagggtctttctcctggggcactgctacccagacacagaggccggacagcctgaccctggggcgcaactggacatgccactccccggcctcgtggcagtgatggcccctgcagaggcagcctgaggtcaccgggcccgacccccctgggcctggggcagcctccttcctgtaggcgagggcccaagtctgggggcagaacctgagtgtggatggggcggccaggaagaggccccttcctgccggggtgggaagagtttctctccatcggccccatgcgggtcacctccctagtcccacctttgcctcctaccagtgaacctcatctttgtatgaaagacagcaacctcctgggtaaatctgaatgaaaaacgtgctagtctctttcatgcaaaaaaaaaaaaaaaaa

SEQ ID NO: 221593 - DNA, 1000 bp, Homo Sapiens
ttcgtccgggcccctcctgggcctccccggccaggcacgtggcaccgtcgccttgacaccgccatctcttttctttaaggcttcaggcagcgcgcacaggctctggcagccgtctcaggcaggactgggcaccaagcttgcagccgaaggccttgccccaaactaccagcgtttctgcaagcagcttgaagggctgaccttgcagccgggtgagccaagggcactttgctgccaccgctgcattcccagagatcaagcagcccggtgccgtggccagtgaactcagaggtgctggtggacgggctaggactttggggttaggccatggggctctttctctgaaggccactttcctgacgtactctctgtacataactcagcgtccgtgactgcagtaacagccagccctacccagagtatttctgagccatgaggggcccaccagattggttctgaattggattcatgcccagcgcattagcatagtaactcctttcagattttttggagggacgtttggaagtggcttactctcttctgccctctctcctacctccaccttctcagatgagccccatctgagcacatccagctgctccttacccagcatctggagtacaggacatagctctctcctgctaccagtctgtgccttagaggtcgttaggcctgccaaacggcgaccagctcccctggagcgagggcaggccccttccctctctttccccagacacctacttgagactcaccaatttctggcctgttcaggagcctcagataagtatttgtacttgagaccacctcacacaatctgtatgggcccaaccctgatctcaaacctccttccctctgcccaaagctgtccttcctatggcaggaggggtgggggtcccaggacgtgcctcatacatgacttgagcttgtcagtccactgagtttccttctacgagatcaacgcgaggggcctgtatcttgaattaaagcctactcgcttcctttc

SEQ ID NO: 221594 - DNA, 1000 bp, Homo Sapiens; identical to SEQ ID NO: 116312

SEQ ID NO: 221595 - DNA, 1000 bp, Homo Sapiens
ttgaagccagagcagcgccaggatgtcacgggagctggccccactgctgcttctcctcctctccatccacagcgccctggccatgaggatctgctccttcaacgtcaggtcctttggggaaagcaagcaggaagacaagaatgccatggatgtcattgtgaaggtcatcaaacgctgtgacatcatactcgtgatggaaatcaaggacagcaacaacaggatctgccccatactgatggagaagctgaacagaaattcaaggagaggcataacgtacaactatgtgattagctctcggcttggaagaaacacatataaagaacaatatgcctttctctacaaggaaaagctggtgtctgtgaagaggagttatcactaccatgactatcaggatggagacgcagatgtgttttccagggagccctttgtggtctggttccaatctccccacactgctgtcaaagacttcgtgattatccccctgcacaccaccccagagacatccgttaaggagatcgatgagttggttgaggtctacacggacgtgaaacaccgctggaaggcggagaatttcattttcatgggtgacttcaatgccggctgcagctacgtccccaagaaggcctggaagaacatccgcttgaggactgaccccaggtttgtttggctgatcggggaccaagaggacaccacggtgaagaagagcaccaactgtgcatatgacaggattgtgcttagaggacaagaaatcgtcagttctgttgttcccaagtcaaacagtgtttttgacttccagaaagcttacaagctgactgaagaggaggccctggatgtcagcgaccactttccagttgaatttaaactacagtcttcaagggccttcaccaacagcaaaaaatctgtcactctaaggaagaaaacaaagagcaaacgctcctagacccaagggtctcatcttattaaccatttcttgcctctaaataaaatgtctctaacagat

SEQ ID NO: 221596 - DNA, 1000 bp, Homo Sapiens
gatttaaaaaggattgatctgacatcaaatttaatatctgagattgatgaagatgcattccgaaaactgcctcaacttcgagagcttgtcctgcgtgacaacaaaataaggcagctcccagaattgccaaccactttgacatttattgatattagcaacaatagacttggaaggaaagggataaagcaagaagcatttaaagacatgtatgatctccatcatctgtacctcactgataacaacttggaccacatccctctgccactcccagaaaatctacgagcccttcacctccagaataacaacattctggaaatgcacgaagatacgttctgcaatgttaaaaatttgacttatattcgtaaggcactagaggacattcgattggatggaaaccctattaatctcagcaaaactcctcaagcatacatgtgtctacctcgtctgcctgttgggagccttgtctaatttcagataatggttagcattacgatggctactataaataaaccattcttactgctctcttccaaaacaaaactcagcatgatactttgagattgtgttctgagagatgatatgactacataaaatacaattaaaaatgttataatgaaaatgtagtaatttaagaaaacaccagatgagttaggaataaacctataacatttacaaaaagagcaaaactaagtgatagaaaatatttcacacatgttcttatagatcatgtatcacttgcaagttttaggagttcatatcctatatcatttcaaattaagtacataataaagtaaaattttgaaatgaacactttaggtatttttgccaagatttagatgtttttaattaaacttttctcttcctttttttttcactaaagcatgtttattcccctaatccattaaagagcatgaaaaaaagaataaatgtatttgaaaattaaaaaaaaaaaaaaaaaaaaaaaaaaaaaacaaaaaaaaaaaaaaaaaaaaaaaaaaaa

SEQ ID NO: 221597 - DNA, 1000 bp, Homo Sapiens
taaatcagtggtctaatccagattttattttttaatacatttcttttggtgttaatatgggttactatgtgatcttatcatttgctagtgattattacttattaggtaagaacaatgtgtaaaatatgtctattactcaaaagaacaattgcaaaatgagtcaacttatctttatataaccaggaaagaaatatattgccagaagctacagaattttgccagatgatagggatttctaaaatgagccactttgtctatcatgcagccttttcagagcttgtaatgagaaaacattacagaggagaaggtcatttggatgtttgttacttggaatcctagaaaacaaaaactaaaatttaaaaataagaagtgagtaagctattttccatttgcgatttggtatggagaagagaggaaatagaattattaaaaaaatacaaattgggtaaaagtgatggtggaaaaaatataaagaaggcaaatgtacatattaagcaattctactaagaattggaaaaatcaagtttcaaaaagatggtaatagttgggcatgatactagaaaatttcacccagtttattcagagctcaactagtacttttaggacttctttttttatatacatgagactcactttgacatacttaaaaaaaaaacagtttatggaaagtacagtttaagaggagaatttgattagactaagtggatatctttatagaaatattaatgatttcagaattttcagttacaagtgtatataccgtggctattgtttatggattcatatgtaaggtagggtcttttttgcatatagactccagtattagttactttcattctaaaattatatttatgcttctatggggaagaaaatttttaattcacttggttgtattaaaattatacttacggtttgagaaaacatgctatgaaaatcatgattatagcaaattaaatatgctcaaaatttaaatctaaaataaaagcccagaaactgaaaa

SEQ ID NO: 221598 - DNA, 1000 bp, Homo Sapiens
tccttagcaaggattttgtaagaagtttcttaaacattgtctgttaacatcactcttgtctggcaaaagaaaaaaaatagactttttcaactcagctttttgagacctgaaaaaattattatgtaaattttgcaatgttaaagatgcacagaatatgtatgtatagtttttaccacagtggatgtataataccttggcatcttgtgtgatgttttacacacatgagggctggtgttcattaatactgttttctaatttttccatagttaatctataattaattacttcactatacaaacaaattaagatgttcagataattgaataagtacctttgtgtccttgttcatttatatcgctggccagcattataagcaggtgtatacttttagcttgtagttccatgtactgtaaatatttttcacataaagggaacaaatgtctagttttatttgtataggaaatttccctgaccctaaataatacattttgaaatgaaacaagcttacaaagatataatctattttattatggtttcccttgtatctatttgtggtgaatgtgttttttaaatggaactatctccaaatttttctaagactactatgaacagttttcttttaaaattttgagattaagaatgccaggaatattgtcatcctttgagctgctgactgccaataacattcttcgatctctgggatttatgctcatgaactaaatttaagcttaagccataaaatagattagattgttttttaaaaatggatagctcattaagaagtgcagcaggttaagaattttttcctaaagactgtatatttgaggggtttcagaattttgcattgcagtcatagaagagatttatttcctttttagaggggaaatgaggtaaataagtaaaaaagtatgcttgttaattttattcaagaatgccagtagaaaattcataacgtgtatctttaagaaaaatgagcatacatcttaaatcttttcaatta

SEQ ID NO: 221599 - DNA, 1000 bp, Homo Sapiens
gctgttggctactttatcaaaaaacccttcaatagcatccttaagatttaaaaaaaaaaaaaaaaaaaaggaaaaaaaagtgatggaagccgtaagtgcttctttgtcatcgacgtgcaatctttctaacattccatctccatctcaccgcttcttgtttgacaccttcacaagtcagcattaatctttcttttaaaacttgtttcatttatgatcatgtagagagccactaggaggcctgcagttatttttgaatgtgaaaatgcatttgcgttcatcttgtctattttttctcttcatgttgtaacaaaaaggaaaaaagaaaaaaaaatcccatcccttttgtacatatgcctgtaaattgttttaaatacttgagcctttttctcggtggggggtggggaggggggtgagaagacaagatgaagaaaagccttacatttcagtttcttcatcggttggattggatgcttacagggtttttcttgtaacatttataagtgctgcttacatcactgaacaacaacaaaaaaataataatggagtagctgttgcccttctccggttgtgtgtacagtatgtgtggaataaaaaagggaaactgttttcacaagctgttctttgtttcataattggattcatcaatcccgtagctacccatattgcactgagcttgccagtggtgactgccaggaacgtcctatgatccactttgttggttgttgttgcagaagactgaactgttttggaatatttaacaattacagaaacagtcaagtgttttccaatgtggttgtccggtttctatggccttgctgtgtactttccctctttttgacagtaaacttctgcctatggcttacagtttgacatttaatttattagcgctgctctgcacccctcccttgggagggagacttcatgtggtttattgcgagttttttgtttacttttcaggtttgtactacaaggtttaataataaaaacaaagttttttgga

SEQ ID NO: 221600 - DNA, 1000 bp, Homo Sapiens
ttcctggtgggagctgaagcactgggcttccacaggcccctggcctccttgccctagcacactgggactggccccactctcccagctggactcctgcatgctcctccccttgggctctcagatgaaggcaaagctttgatccgacatctgagctctagcctaagaaggagagttgagatttcctcctccctctggctgggatatggagctttggaggttcagagaagagaaccctcacctctgatctggcctctacgagaggtcctcatctccatctggcccaacaattcccagattctgaagcttggaatgcaaacacaggcttcatgggctgtggcctctgcagcgacctgccatccccaggccttgcctgaggggtcaggctgcctctcccaacacacactcagatagcacaaattctaccatccccttccctggctgctggaaatggaccccgcaaccctgtcctctgctgggcccccagcaaactctagcaatagcagctgctgccgtgtcattatgcaaagcctctgaccagtttgctgcagcatttacatctgccctaatcagaggggccacctctaactcctcctcctcctctcttctcctctggtttgcgtccttcctgggttgggctggagtctggactggctgagataagagcctggcaaccagcaagagctgggctgtatttggagatcatgggctgattccatgttcttgggcaacagtccagaagcatcaggggctccggcctgggatgtttctgaactttgggagttataggagacaggaggaacttctcctcctcctcctcccctacaattccttttcacatattcctttcttctccctcttgggtgaccttccaaaactctgctctcaggctgaaatctggcatcatctcaggttccctgtccccagcactgtccccatggagctggtggctgacaaagatgtagtttccatcagtcaataaaacctgagaggagagatgagg

SEQ ID NO: 221601 - DNA, 1000 bp, Homo Sapiens
gatattcaagaacgacccctaccatccagaccatttcaactgcgccaactgcgggaaggagctgactgccgatgcacgggagctgaaaggggagctatactgcctcccatgccatgataaaatgggggtccccatctgtggtgcttgccgacggcccatcgaagggcgcgtggtgaacgctatgggcaagcagtggcatgtggagcattttgtttgtgccaagtgtgagaaaccctttcttggacatcgccattatgagaggaaaggcctggcatattgtgaaactcactataaccagctatttggtgatgtttgcttccactgcaatcgtgttatagaaggtgatgtggtctctgctcttaataaggcctggtgcgtgaactgctttgcctgttctacctgcaacactaaattaacactcaagaataagtttgtggagtttgacatgaagccagtctgtaagaagtgctatgagaaatttccattggagctgaagaaaagacttaagaaactagctgagaccttaggaaggaaataagttcctttattttttcttttctatgcaagataagagattaccaacattacttgtcttgatctacccatatttaaagctatatctcaaagcagttgagagaagaggacctatatgaatggttttatgtcatttttttaattaaaaaagaaaaattcatataatcgtgtttaaaacacaaatgaagtcagtatttgcctttgttaacccttatccatttgttgacatgtagactgtttacaaaaaaaaaacacatggttaaatgttaaattttaattaaggcccccaaaaattaaatataactttttaaaatgaaaggagtcaccttttacatgactcaggtgaaaaaacagtataaacattaatttactttgtgttcaaaagaaaattccaactgctgttggggaaggacacagaaaagaaaaataaccacccaaaaaaaaaaaaaaaaaaaaaaaaaaaaaa

SEQ ID NO: 221602 - DNA, 1000 bp, Homo Sapiens; identical to SEQ ID NO: 116319

SEQ ID NO: 221603 - DNA, 531 bp, Homo Sapiens
ggcccttcagtatgcgcggacggaagatggcgtccgccacccgtctcatccagcggctgcggaactgggcgtccgggcatgacctgcaggggaagctgcagctacgctaccaggagatctccaagcgaactcagcctcctcccaagctccctgtgggtcctagccacaagctctccaacaattactattgcactcgcgatggccgccgggaatctgtgcccccttccatcatcatgtcgtcgcagaaggcgctggtgtcaggcaagccagcagagagctctgctgtagctgccactgagaagaaggcggtgactccagctcctcccataaagaggtgggagctgtcctcggaccagccttacctgtgacactgcaccctcacggccacccgactactttgcctccttggatttcctccagggagaatgtgacctaatttatgacaaatacgtagagctcaggtatcacttctagttttactttaaaaaataaaaaaatagagacagagtctcaaaaaaaaaaaaaaaaaaa

SEQ ID NO: 221604 - DNA, 1000 bp, Homo Sapiens
atgcaaattgttatggatacatttcagaatctaagaaatcaggcaagtgcttaaaaggccaacggtccaagggattacatctgcagtttaaaaagtaaatatatattctatcgtattcataaacaatatctatcaaatgggttacctccaaatatgaaaatctataacaacctatggttgaaggaatgctcagtttcatttgccaataaattggtttctcataacttgcatcaagtttaattttaagtaaagctttttatatgtagatattttgttgaatttgtaaatacacttaaaatgtagatgctatatgcttataggtgttacatacaaataaacatgcaatgtttatgttgtactgtataagaggtaagctaattaatgcagtgaatgggattggaaagcatctacttaaatatctattgggttcccccctccccccaccttttttgctgtgaaactgaaatagtgaacttttctacgtattgacagcagatttttcgatgaaatcttcagagctttgcctatggggcacagtaggcctagtaacctggcatgtttgatatatgtaggtaaagcataatttaaagtaatcccaggtaaagatggccctaaatactttcatgtctctatattcatttttcacagatccacctgtctcttgaaaatataaaaagacaaaacaggtttgccttggcatcagagagcacaaagattaaaagttactttaaatttgccaatattttgggagaacaataaaactacattttttcctcttccatactggtagatgcgaaatttatctgtgcatgaaagggtcacttctgtaatagtgcaacagatttggtattaaaaattaaatgtggttttaaaagttcctctctcttttgtaatttatgttcccaattgagtgtgaatgtccaagtaatggtgtatgtaatggtacaggcaaatgtgactggatttccctcaaaaaagtaactattaaacaagaaaaaaa

SEQ ID NO: 221605 - DNA, 1000 bp, Homo Sapiens
tgaaagtgaagatcacgatgatcctgacaatgctcatgagagcccagaacaagaaggagcagaagggcactttgaccttcattattatgaaaatcaagaatagcaagaaactatataggtatacacttacgacttcacaaaacctatacttaatatagtaaatctaagtaaacatgtattactcaaagtaatatatttagaattatgtattagtataagatcagaattgaatttaagttgttggtgacatctgcatcatttcataggattagaacttactcaaaataatgtaaatctttaaaaatataaattagaatgacaagtgggaatcataaattaaacgttaatggtttcttatgctctttttaaatatagaaatatcatgttaaagaaagtgagtgtatcatttctattaacagtaatttttctaaaaatgaggaaggaagtagcattagcagtaaagacccacaggccacgaccctcctgatcactctgaggacaatatttaaatgacaggaaggtatattaatgtaacaagcattcatttaaggaatagaccattttctctgacctcttcttcaggaaagctttcacactggtatttgtgatctcaccattatgacatccatccccctagctcaccacatagcacatagaatgatatttttgatttgtaagaggccatccaggtactaaggacccaaggcatacagattcacaaaattaactaatctttttgcctcagaataccaaaacaacaaaattataaagctgttatttggacaactaaaaaacaccaaactatctcattgcaatttgtattttagcagatttcagcaactatcctaaacaatgttattgtgttccattttaactgggataaatgtttttgtaaaaatacaaccatagaaaggcctctttgttacaaaatgatttgcaaagaaataactgctttgtttgcaagattaaattagtgttggcaaaataaagttctaaagat

SEQ ID NO: 221606 - DNA, 1000 bp, Homo Sapiens
aaagctacttggacggaagtggtgcacatcaatcgggagagatggagggccaaggtacccaaagaggagaaggccaagaaggaagcagaggaaaaggctcgcctggccgcagaggagcagcaaaaggaaatggaagccaaaagccaggctgaagaaggcgcatctggcaaagctgagaaaaagacgtctggagaaactaagaatcaagtcaatggaacacgggcaaacaaaagtgacaaccctcgtgggaaaaattccaaagccgagaagtcatcaggagaacagcaacagaatggtgacttcaaagatggtaaaaataagacagacaagaaggatcactctaacatcggaaatgattcaaagaaaacagatgattcacaagagtaaaaaagacctcatagacaataaaagaggctgccagtgtcttgcatcattctagctgagcttcttcattctccttcttctccttcttccacaaagacccatatctggagaaggtgtacaactttcaaacacaagccccccaccccctgacccttggccttccctcacaccatctccttccaggggatgaatctttgggggttggtttgaggtcttagaactctgggggatattcccctgagcaaaacaaacaacgtgagatttttactcaaacagaaacaaaacatgaaggggcatcctcaaaatcctttgctaatgacctggctttcaaggcatctgtctggcctgatgagaatggacatcctggatatgctgggagaggcctgaaaaaagccacacacacagtaattgccattttatgactgtcaatgccgttactttaaatgttgtcatttttgcactggctactgatgatacagccatgctgacattcatcaccgcaaagatgatgattccagtctctggttcctttcctgagtcaggaacatttgttttctccaatttcctttcagacttaaaattgttcttatgctttttttcccacttctgtaataca

SEQ ID NO: 221607 - DNA, 1000 bp, Homo Sapiens
atatctacgtgtcctccgggcattgccctctccatggctctggtcaccctgaccctctgccctgcccaccgcaggtcccccggggtcccggaagccccttctggctgcacctgccatgtttacagagggcccctgggctgcgcggccccagcctgggcaccctgatttttaagccatagacctggggtcagggcaggaaggaacttcactctgctgcttccgagaacctcggccgtgacattcggggccgggcgggacccgccccacagactccaacttcccctccaaaccccgaagtgaaacccgccaccgggttacccccacaagggggccgctgcgagaagttcacccacccccgaaaaaataattaaactcgcaggccaggcacggtggctcatgcctgtaatcccagcactttgggaggccaagacgggcggatcttttgaggtcgggagttggaggccagcctggccaaaatggcaaaaccccgcatctactaaaatacaaaaattagccgggcgtggtggcggccgcctgtaatcccagctacttgggaggctgaggcgtgagaatctcttgaacccaggagatggaggttgcagtgagcagagatcgtgccactgcactccagcctgggtaacagagggagactcctccgtctcaaaaaaataaataaataaacttgtgagctggccccaacccctcctaggaatcacagctccccgtactggtgccgccgcagtggccaagttgcgacactgcccacggcccctccctctgatgcagattcagggcttctcttcgatcatgttgggttttgattctgtttttccttgactgcaaaaccctctttcctctcctcttttgggacaagagccctggttttctacgctgcccttggccaccacactgcctgccccacgagctgggaggcaggttttgtacggtacgttgttattgatatgatataaaacatcaaacgtcgaaaaaaaaaaaaaaa

SEQ ID NO: 221608 - DNA, 1000 bp, Homo Sapiens
caatgcctccaagccctcggagcgtgggctggtcaggcaagaggaggctgaggatcctgcctgcatccccatcttctgggtcagcaagtgggtggactattcggacaagtacggccttgggtatcagctctgtgataacagcgtgggggtgctcttcaatgactcaacacgcctcatcctctacaatgatggtgacagcctgcagtacatagagcgtgacggcactgagtcctacctcaccgtgagttcccatcccaactccttgatgaagaagatcaccctccttaaatatttccgcaattacatgagcgagcacttgctgaaggcaggtgccaacatcacgccgcgcgaaggtgatgagctcgcccggctgccctacctacggacctggttccgcacccgcagcgccatcatcctgcacctcagcaacggcagcgtgcagatcaacttcttccaggatcacaccaagctcatcttgtgcccactgatggcagccgtgacctacatcgacgagaagcgggacttccgcacataccgcctgagtctcctggaggagtacggctgctgcaaggagctggccagccggctccgctacgcccgcactatggtggacaagctgctgagctcacgctcggccagcaaccgtctcaaggcctcctaatagctgccctcccctccggactggtgccctcctcactcccacctgcatctggggcccatactggttggctcccgcggtgccatgtctgcagtgtgccccccagccccggtggctgggcagagctgcatcatccttgcaggtgggggttgctgtgtaagttatttttgtacatgttcgggtgtgggttctacagccttgtccccctccccctcaaccccaccatatgaattgtacagaatatttctattgaattcggaactgtcctttccttggctttatgcacattaaacagatgtgaatattcaaaaaaaaaaaaaaaaaaaaaaaaaaaaaaaaaaa

SEQ ID NO: 221609 - DNA, 1000 bp, Homo Sapiens; identical to SEQ ID NO: 116326

SEQ ID NO: 221610 - DNA, 1000 bp, Homo Sapiens
gcttgggttgtatttttgcagccagttaactttgcatcaggtctacacagtccttgcagcctttgatttctccagttgtagagatttgaaatggggtgcccgggttgctctcgtttttccttcaagctacctagcatgcattttacacacattggaggagtcgtatgcactgtttttctgttgctgatggaggcaagcaggccttctaattagtctaagttaaacggatgggattcacttaagaaaagcaagaagaaaagcacacgaacaggtgtcttaatgcatttggatagtttctttgcggggtgtgtgtgtgtgtgtgtgtgtgtgtgtgtgtgtgtgtgtcttggtgaaggtgaggggctgtattttcaccaagccttttcataatcaagtttgctttgcaaaccttatggccttgcaccccgcagaacagtcccttcctaatagcagggatgctctgtcatggtttttctgtaaattatcgtgtgttgggaagttctgttgaggcttagtttgatcttccatggtggacacgtctgttctgtatgtaaaaggcattacaattgtgttttagcagatgagacttgaagcctttccacagtccttgtgctctgagatggctgttgagctctgctcaactgtcgtagctgaattctttctttgcgctgaacactgggcagcctcaccatgttgccaacgtgcttctggggcccctgtcactgccgctggatgccgcgcacacaggcagagtgccttggcaggtttgtgcaccccttggcgagccagaactgggaaccccgcggggtgaccccttctcatggggggtcggggaggggagtgcctatttttaatcctgtctgtttgttgcacaatggaaatcactgtgatttgtacatatgccctaggaaaattttactgctgtctaatttatgtaataatactgttgattccaggtttatttaataaaactttgtatcttttcagaaaaaaaaaaaaa

SEQ ID NO: 221611 - DNA, 1000 bp, Homo Sapiens
ttcttccaacatgtgatgtgttgctctccattcttttaaatctcgcactacatctgatatcaggaaatatctgtgaaggacttggtgattacctgaaagcccttctcaagaccgagtgtacaccactttcccacactgtgaactaatgacaagtgacttatttgctcataagtaaatgtcttcatgttgatgtgtccgtgaaagttgtgatctgttgtaatatcagttacagtggcagtattgacaataagaaacagtttaacagaaaaatgaaatttaagcacaaaaaatttaagagattttatgtttaaaatggcatttagcacagtatttaacattcttggtcacaaagctatttaagtggactgtatttcggctatgtctcatgttttatatgattaaattatcattgtttgtcctttatgtattctcttctacaatacaacacattgaaactgtatttacttgttatgttgtaatattttgctgctgaatttggggctacttatattctgcagaaaattaattgaaatacctattcaagaagatagttgtaaagatattgtatctcctttaatatactccttaaaaatgtatgttggtttagcgttgttttgtggataagaaaaatgcttgaccctgaaatattttctactttaaattgtggatgaagaccctatctcccacaaataagttcccatttccttgtctaaagatctttttttaagtgttctgtggctgatttactaacagtaactgccattttttgtctgtgataacagagtgatttgtaaaacagtggttgttttttcattgtgttttcttcgtggattgttttttctgcgggtcatattcataccttctgatgaagttgtacaacaccagcaacattataatggccctgtagctctgaatgctatttgtgtaactgaaaggttgcactctagggtgaaccaagctataaaagcccatgcttaaataaaaattatgtccaaaagcc

SEQ ID NO: 221612 - DNA, 1000 bp, Homo Sapiens
gtatactacctcaaaactcattatgttgtcagagccctagagctggctagtgtaacactgactatgagtaggtgggcccaccacttgagttgaggtgatttcatggtgtctttccaggctcttgatagggtgtcactgcatgcaagccatgaatctgttttgagaatcctctccattttcccaaataaaaacctatcccaacagtgactatatcactcagcattggatctaaatataaaagtggtgctttcagtgtttttggcagatagtgttccataacctttccatcagaagggattttagacaccttagaggtccgtgctacatcttcacagttcctccgaataaccttaggtggtagtgttacttgcctttgacacctgtgcatatgttttaatgactagatccaaactgtgttgttcttaaatcaaaaattggataatttttaatatttatgtattaatcacacagtgtgctctctgaagttctcttaagccttcagtttatactcttaattttctttctgagctggggaactgactttgcactttggttacacagaacattggtttccaatttagtttaactgaaatttgctgctgatatgttgagtttgttctttaaaaaatatctcatatatctcgtctttcctccttagaagaacagacctaactagcgaatgtatgaatgaaaatgcatctatttcagagccgacatgaagagtttagtttttttactttataaactgtgaatatgagtatgccagctgcattagatgtaactaatcatatttaaatatatttcactttgactttagaccttttgaagtctgtataaacttgttttgaaatacagtctccacttacgaatgtcataacaaaatacttttttgcatgataaaaaattactttgattacaaaaggcatattctttcatggtttctgcaatgagaggaagtgtaatgattattttaatatttctattaaaactgtatattttt

SEQ ID NO: 221613 - DNA, 1000 bp, Homo Sapiens
tggcttcctctttgcatggactctgtgggttacattgctctatcaacatatctatgcagagggtgtcttctttggtacaacagccaatatctcatgtctcctttgagtgtggtttactgcattaaggccagatgcttaattgagctctagggtggctggttagtattaatacattggtgtgctaacagggcatataggatgtggcttttgtccagctgatagtagttagaggcttacaacttaggagcagcaccaactgaaggtgctaattgcttggatctccttcattaggatagttggagagggattggagtaccactttcttccactgttaccaggtacttaatgccctaaagatacaactaggagtaacagggccaaagttatttctgttagacgtcaaggaatggtatcacagtctattgacctcagcgatttgtgcttgtttgtgctagaagaacatcccaaataggagaacctctcacaagctggggcaggtcaccttatctttgtaagatgaggatatcatctagatcagaaatctgactagattggattctgaggagaagaacctactacaaggcaaggagccgttttttggctttgaaaagtcttgctgtcttgggtctacattttagggaagagcaggtacatggatccaggcttctgccaaaaaaaaaaagagaagaagatgacgagtatgaccagtcgtactatcttactgagccacagtgatgcatgcttttcggggaaaacttcattcacaagtattccagacaccaggcttcaggcatggccatgagcaagaccagcaaataacagctttttcccttgcagccctgaccccaatgtctgctgtttccaacactggtgatttctaactacggcccacagcagatgctgttgaataacaccatggcttcatcagaggatgtggggttgtagtacctctgggtgatgaagttgttttagcaaatccatttttaaaaaaaaaaaaaaa

SEQ ID NO: 221614 - DNA, 1000 bp, Homo Sapiens
ttccctttgggcttcggcttggggagatggatcaagctcagagactggcagtgagagcccagaaggacctgtataaaatgaatctggagctttacattttctgcctctgccttcctcccagctcagcaaggaagtatttgggcaccctaccctttacctggggtctaaccaaaaatggatgggatgaggatgagaggctggagataattgttttatgggatttgggtgtgggactagggtacaatgaaggccaagagcatctcagacatagagttaaaactcaaacctcttatgtgcactttaaagatagactttaggggctggcacaaatctgatcagagacacatatccatacacaggtgaaacacatacagactcaacagcaatcatgcagttccagagacacatgaacctgacacaatctctcttatccttgaggccacagcttggaggagcctagaggcctcaggggaaagtcccaatcctgagggaccctcccaaacatttccatggtgctccagtccactgatcttgggtctggggtgatccaaataccaccccagctccagctgtcttctaccactagaagacccaagagaagcagaagtcgctcgcactggtcagtcggaaggcaagatcagatcctggaggactttcctggcctgcccgccagccctgctcttgttgtggagaaggaagcagatgtgatcacatcaccccgtcattgggcaccgctgactccagcatggaggacaccagggagcagggcctgggcctgtttccccagctgtgatcttgcccagaacctctcttggcttcataaacagctgtgaaccctcccctgagggattaacagcaatgatgggcagtcgtggagttgggggggttgggggtgggattgtgtcctctaaggggacgggttcatctgagtaaacataaaccccaacttgtgccattctttataaaatgattttaaaggcaaaaaaaaaaaaaaaaaaaa

SEQ ID NO: 221615 - DNA, 1000 bp, Homo Sapiens; identical to SEQ ID NO: 116330

SEQ ID NO: 221616 - DNA, 1000 bp, Homo Sapiens; identical to SEQ ID NO: 116331

SEQ ID NO: 221617 - DNA, 1000 bp, Homo Sapiens
ccgtcctttcccgccgtggatgatggtggcagccgctgttcccgccctcctcgtcctcatcctgatcttcatggagacacagatcacggcgcttatcgtcagccagaaggcgcggaggctgctcaagggctccggtttccacctggacctgctcctcattggctccctgggggggctctgtgggctgtttgggttgccctggctcacggctgccacggtccgctccgtcacccatgtcaatgcgttgacagtgatgcgtactgccatcgcgcctggtgacaagccccagatccaggaggtgcgggagcagcgggtcactggtgtgctcatcgccagcctcgtgggcctgtccatcgtcatgggggctgtgctgcgtcggatcccattggctgtgctctttgggatcttcctgtacatgggggtcacgtccctgtctggtatccagctgtcccagcgtctgttgctcatcctcatgccggcaaaacaccatcctgagcagccctatgtgaccaaggtgaagacgtggcggatgcatctgttcacctgcatccagctgggctgcatcgcactgctctgggtggtcaagtccacggcggcctcactcgcctttcccttcctgctgctgctcacggtgcctctgaggcattgccttctgccccggctcttccaggacagggagctgcaggcgctggactcggaagatgctgaaccaaacttcgatgaggatggccaggatgagtacaatgagctgcacatgccagtgtgaccctgaagacagtgcccctcagagaccccaagaccttagggattgacacctgggcctcaggcagagcccagccctgggctggggggctcctcaggacctagagatgtgcctggaaccactcctgatgccatggctagagtggcccccctgacttctgcccggggtgttgacctcgcctcacctttcacagaccagaccggcacaggctttgagctcattataaccacactcctg

SEQ ID NO: 221618 - DNA, 1000 bp, Homo Sapiens; identical to SEQ ID NO: 116334

SEQ ID NO: 221619 - DNA, 1000 bp, Homo Sapiens; identical to SEQ ID NO: 116340

SEQ ID NO: 221620 - DNA, 1000 bp, Homo Sapiens
gggctaggaaatccagggtggtggtgataggtataagtggtgtgtgtatgcgtgtgtgtgtgtgtgaaaatgtgtgtgtgcttatgtatgaggtacaacctgttctgctttcctcttcctgaattttattttttgggaaaagaaaagtcaagggtagggtgggccttcagggagtgagggattatctttttttttttttctttctttctttcttttttttttttgagacagaatctcgctctgtcgcccaggctggagtgcaatggcacaatctcggctcactgcatcctccgcctcccgggttcaagtgattctcatgcctcagcctcctgagtagctgggattacaggctcctgccaccacgcccggctaatttttgttttgttttgtttggagacagagtctcgctattgtcaccagggctggaatgatttcagctcactgcaaccttcgccacctgggttccagcaattctcctgcctcagcctcccgagtagctgagattataggcacctaccaccacgcccggctaatttttgtatttttagtagagacggggtttcaccatgttggccaggctggtctcgaactcctgaccttaggtgatccactcgccttcatctcccaaagtgctgggattacaggcgtgagccaccgtgcctggccacgcccaactaatttttgtatttttagtagagacagggtttcaccatgttggccaggctgctcttgaactcctgacctcaggtaatcgacctgcctcggcctcccaaagtgctgggattacaggtgtgagccaccacgcccggtacatattttttaaattgaattctactatttatgtgatccttttggagtcagacagatgtggttgcatcctaactccatgtctctgagcattagatttctcatttgccaataataatacctcccttagaagtttgttgtgaggattaaataatgtaaataaagaactagcataacactcaaaaaaaaaaaa

SEQ ID NO: 221621 - DNA, 1000 bp, Homo Sapiens
agtgagttcctttttccttcctctttatccctcctgttttactttatacctctctattccttgctcaaattattgcaaaagcctctatagaaagtcctctgtgatctgactcctgcagactcttccagatttttctgcccaaggcctttactgagctcaggactccagctaaatcaaaatacgcatgttctcacccagagtgacaaaatcctgcagataggtttaagacctagtggctcagagcagtagctactgggaagttaaaaggaaggggcttagaaaatgaatgggaccaaaggcatcacttctgatggagatgaagccatcttgaaagtgagtggtgtcctttggaggcatggtggatgaaaggcgcaaaggaagcaagaggttaaagataatggcccattagatacaacagcaagcccaagattccgaagaagacagacaactccccctagtaccacctagacattactttttaaagacattttacattattgtccagcagaaaaaggctgtcttggaccatgaaacagtaaactgtaactaaacacttcaacatgaatttgaaaataaataattgtggatataaaagaacaccagagatcagaaattcaaaaactcagaataaaaatgaaaaagctacaagcatatatgagaagagaactgactgaacttgggaaataatttgaacaaaaagataaatcttcacagatatgaatactaaattatatcttaatgaaaatagatatggtcacaagtacattaaggcacgtagaaggtaggagtaagaaaagctaagagaagcaaaacaaacaaagcaatattaaaggaagagccaaaaagacccagaaataaaatgacagataaagaagattgtcaaagaaaagatgatacaggtaagattggaactcatgaagacaaaagataagacagtggcatagagttaatatttaaaattcaaatattaaaactcaaataaaccccaaagaacttttgg

SEQ ID NO: 221622 - DNA, 1000 bp, Homo Sapiens
gtacctgcagcgtgggggacgtgcttctacaagaacagtcctgagtccacgttctgtttagctttaggaagaaacatctagaagttgtacatattcagagttttccattggcagtgccagtttctagccaatagacttgtctgatcataacattgtaagcctgtagcttgcccagctgctgcctgggcccccattctgctccctcgaggttgctggacaagctgctgcactgtctcagttctgcttgaatacctccatcgatggggaactcacttcctttggaaaaattcttatgtcaagctgaaattctctaattttttctcatcacttccccaggagcagccagaagacaggcagtagttttaatttcaggaacaggtgatccactctgtaaaacagcaggtaaatttcactcaaccccatgtgggaattgatctatatctctacttccagggaccatttgcccttcccaaatccctccaggccagaactgactggagcaggcatggcccaccaggcttcaggagtaggggaagcctggagccccactccagccctgggacaacttgagaattccccctgaggccagttctgtcatggatgctgtcctgagaataacttgctgtcccggtgtcacctgcttccatctcccagcccaccagccctctgcccacctcacatgcctccccatggattggggcctcccaggccccccaccttatgtcaacctgcacttcttgttcaaaaatcaggaaaagaaaagatttgaagaccccaagtcttgtcaataacttgctgtgtggaagcagcgggggaagacctagaaccctttccccagcacttggttttccaacatgatatttatgagtaatttattttgatatgtacatctcttattttcttacattatttatgcccccaaattatatttatgtatgtaagtgaggtttgttttgtatattaaaatggagtttgtttgtaaaaaaaaaaaaaaaaaaaa

SEQ ID NO: 221623 - DNA, 1000 bp, Homo Sapiens
ccaacttaccctggagtgctgcccacaaccatgactggcgtcatgggtttagaaccctcctcttataagacctctgtgtaccggcagcagcaacctgcggtgccccaaggacagcgccttcgccaacagctccagcagagtcagggcatgttgggacagtcatctgtccatcagatgactcccagctcttcctacggtttgcagacttcccagggctatactccttatgtttctcatgtgggattgcagcaacacacaggccctgcaggtaccatggtgccccccagctactccagccagccttaccagagcacccacccttctaccaatcctactcttgtagatcctacccgccacctgcaacagcggcccagtggctatgtgcaccagcaggcccccacctatggacatggactgacctccactcaaaggttttcacaccagacactgcagcagacacccatgataagtaccatgactccaatgagtgcccagggcgtccaggcaggcgtccgttcaacagccatcctacctgagcagcagcagcagcagcaacagcagcaacagcaacagcagcagcagcagcaacagcaacagcagcagcagcagcagcagtaccacatccggcagcagcagcagcagcagatcctgcggcagcagcagcaacagcaacagcagcagcagcagcagcagcaacagcaacagcagcagcagcaacagcaacaacagcaacaccagcagcaacagcagcaacaggcggctcctccccaaccccagccccagtcccagccccagttccagcgccaggggcttcagcagacccagcagcagcaacagacagcagctttggtccggcaacttcaacaacagctctctaatacccagccacagcccagtaccaacatatttggacgctactgagccacctggaggaactgcttgtgcactggatgtggccccaccctttcctcttaattcccaatcccattcctgggctagc

SEQ ID NO: 221624 - DNA, 1000 bp, Homo Sapiens
gattttgtcatattagatttaatttataatttgaaaaatcatctagtgtgtgacctacaggcttagaaatggtatagtcaaagacattttatccacatttctaatagtggacttgattaagtagataagatcagcatctgtttatggtattaggagaaatagccaaagttgaggattttatgtatgttttcctgtttacctggaaaatagcaattaattggattttttggtaaagattgccttctgtataatgtttggattatataaaattgcaaaaatgataacagcccgctttactgtactaagcctgttactctcatgacgtgtgagcagaatgccttattttgtaatcttgtttaacttgttgctactgggacttgatttactgtggcactagttaagtaagttaaaaaaaagttaaaccctctcattattaaagaggaaaggcgatggtgatgtctgtagtacaatataaaccataattgtgatttaccttaagtaggtataactcttatgggatatacagtatagtttttgtgaatctttacatgatagcattatctttttataattttttttcctaagataaacaaatgcatagttttcttctatgggtgatagaaacagctttttgaagtaatgaaaacctcaaaagatcatgttgattcttaatttttgccttttgcataagcctctttataacatgtatctttaaaacaattaagtctttaggaatgtgtaaccagaactatgttagtattgcttataaaactttagttaggttcaatatatacatatatacatctctatataggtatatagatttgcattttgtcttgtaaaattttatttgaataaattcttcctgtaggtaatgggaaacaaaattaatagttcatatgtcactcatagcatttctatatttgaaagtagcccaatataaaacttttgattctaaaattaaaccagcagcctattacaagcaaaaaaaaaaaaaaaa

SEQ ID NO: 221625 - DNA, 1000 bp, Homo Sapiens
tcaggattctagaacttctaaaattaaagtttggggaaatcagtagctctgatgagatcaccatgaagagtgaattcccgcttctgcgccaacattctgtttccagcatcaggcagttgatgccattcttcatgactctaaatggtgcatttaagacccagagacagctgcctgctgatagcccaggaactccattcttggactttcctgtcacagatagcccaaggatcttaaaacaactggaagaatgcatcgaatatgattttctggaacatccagaatgttaaccatgtgagagagaatatgtttaatccatgtattggtactttactgaaaaccaggttatattctaaagaagaaagaaggcaggatagtgcttttgaacaagcctatttccattttgaaagtagatttcaggctaggtgcggtggctcacacctgtaatctcagcactttgggaggccaaggcaggcagatcacttgaggtcaggagttcgagaccagcctgaccaacatggtgagaccctgtctctactaaaaatacaaaaattagctgggtgtggtggcggcgcctgtaatcccagctacttgggaggctaaggcatgagaattgcttgaacccaggaggtggaggctgcagtgagccgagatcacgacactgcactccagctgtgtgacagaatgagaccatctccaaaaaaaaaaaaaagtagatttcagataatttactgttcagcaacaggacacacctccctaaatgccttgtaatatatttgaatctgattctgcatttcttcctcaatttatgtaatgaaaataaaattaatatatcatctaacagtagcacaaaatttgtaatatgaagtaaagtatgaagataatgaagaagttgttttctttgttgaagcagttatatgggtctttctcagtatatttctcttttctctaaaagtttaaacttattaaaagaatgttatttttaacctttcaaaaaaaaaaa

SEQ ID NO: 221626 - DNA, 1000 bp, Homo Sapiens; identical to SEQ ID NO: 116351

SEQ ID NO: 221627 - DNA, 1000 bp, Homo Sapiens
aacacagatgggaagaattactgtggcctaccaggtgaatattggcttggaaatgataaaattagccagcttaccaggatgggacccacagaacttttgatagaaatggaggactggaaaggagacaaagtaaaggctcactatggaggattcactgtacagaatgaagccaacaaataccagatctcagtgaacaaatacagaggaacagccggtaatgccctcatggatggagcatctcagctgatgggagaaaacaggaccatgaccattcacaacggcatgttcttcagcacgtatgacagagacaatgacggctggttaacatcagatcccagaaaacagtgttctaaagaagacggtggtggatggtggtataatagatgtcatgcagccaatccaaacggcagatactactggggtggacagtacacctgggacatggcaaagcatggcacagatgatggtgtagtatggatgaattggaaggggtcatggtactcaatgaggaagatgagtatgaagatcaggcccttcttcccacagcaatagtccccaatacgtagatttttgctcttctgtatgtgacaacatttttgtacattatgttattggaattttctttcatacattatattcctctaaaactctcaagcagacgtgagtgtgactttttgaaaaaagtataggataaattacattaaaatagcacatgattttcttttgttttcttcatttctcttgctcaccaagaagtaacaaaagtatagttttgacagagttggtgttcataatttcagttctagttgattgcgagaattttcaaataaggaagaggggtcttttatccttgtcgtaggaaaaccatgacggaaaggaaaaactgatgtttaaaagtccacttttaaaactatatttatttatgtaggatctgtcaaagaaaacttccaaaaagatttattaattaaaccagactctgttgcaataaaaaaaaaaaaaa

SEQ ID NO: 221628 - DNA, 1000 bp, Homo Sapiens; identical to SEQ ID NO: 116356

SEQ ID NO: 221629 - DNA, 1000 bp, Homo Sapiens
tggatcccgagaaggcacagcagatgcgcttccaggtgcatacccaccttcaagtgattgaggagagggtgaatcagagcctgggcctgcttgaccagaacccccacctggctcaggagctgcggccccaaatccaggaactcctccactctgaacacctgggtcccagtgaattggaagcccctgcccctgggggcagcagcgaggacaagggtgggctgcagcctccagattccaaggatgacacccccatgacccttccaaaagggtccacagaacaagatgctgcatcccctgagaaagagaagatgaacccgctggaacagtatgagcgaaaggtgaatgcgtctgttccaaggggtttccctttccactcatcggagattcagagggatgagctggcaccagctgggacaggggtgtcccgtgaggctgtgtcgggtctgctgatcatgggagcgggcggaggctccctcatcgtcctctccatgctgctcctgcgcaggaagaagccctacggggctatcagccatggcgtggtggaggtggaccccatgctgaccctggaggagcagcagctccgcgaactgcagcggcacggctatgagaaccccacttaccgcttcctggaggaacgaccctgacccggcccccttcaccccttcagccgagcccagacctcccctcttcctggagccccagaaccccaactcccagcctagggcagcagggagtcttgaagtgatcatttcacacccttttgtgagacggctggaaattcttatttcccctttccaattccaaaattccatccctaagaattcccagatagtcccagcagcctccccacgtggcacctcctcaccttaatttattttttaagtttatttatggctctttaaggtgaccgccaccttggtcctagtgtctattccctggaattcaccctctcatgtttccctactaacatcccaataaagtcctcttccctaccaggcca

SEQ ID NO: 221630 - DNA, 1000 bp, Homo Sapiens
cagatggcccgggagcggcgtggccaccaagtggaggggggctgctgtgcactggttgtgatctacctgctaggcaaggtgtacgtggccaatgcaggcgatagcagggccatcattgtccggaatggtgaaatcattccaatgtcccgggagtttaccccggagactgagcgccagcgtcttcagctgcttggcttcctgaaaccagagctgctaggcagtgaattcacccaccttgagttcccccgcagagttctgcccaaggagctggggcagaggatgttgtaccgggaccagaacatgaccggctgggcctacaaaaagatcgagctggaggatctcaggtttcctctggtctgtggggagggcaaaaaggctcgggtgatggccaccattggggtgacccgaggcttgggagaccacagccttaaggtctgcagttccaccctgcccatcaagccctttctctcctgcttccctgaggtacgagtgtatgacctgacacaatatgagcactgcccagatgatgtgctagtcctgggaacagatggcctgtgggatgtcactactgactgtgaggtagctgccactgtggacagggtgctgtcggcctatgagcctaatgaccacagcaggtatacagctctggcccaagctctggtcctgggggcccggggtaccccccgagaccgtggctggcgtctccccaacaacaagctgggttccggggatgacatctctgtcttcgtcatccccctgggagggccaggcagttactcctgaggggctgaacaccatccctcccactagcctctccatacttactcctctcacagcccaaattctgaagttgtctccctgacccttctttagtggcaacttaactgaagaagggatgtccgctatatccaaaattacagctattggcaaataaacgagatggataaaggtgaaaaaaaaaaaaaaaaaaaaaaaaaaaaaaaaaaaaaaaaaaaaaaaa

SEQ ID NO: 221631 - DNA, 1000 bp, Homo Sapiens
gcagccccacgcccgatagcaccgcctcgctgccgccgccgcctgcgcccggcctggccagcccgcgcctgagccccagcccgctgcccgtcgcactgggctccgggccgggacctgggccggggccacagccgctcaagggcgcactgtgggccggtgtggcgggcggtgggggcggcgggcctggcgcgggagcggccgaactacttaaggcttggcagccggcggagtccggccccgggcccttctccggggttctgtcctcctttcaccggaagcccggccccgccctgaagaccaatctcttctagctgccggcctctggaggctccgagcctgcccccagagacgtccctgcccctccaggacctgacagcccctcccatcctggccacccgcctggaagtccccatccgtctccactccctactgtctcacccctcggtgtgtcctccccaactttggagaccaagtcagggccactctcgtcctcacccaccctctaccagcagagcggagttctttataccgggacctcctccaggagaaccccggagctccttctagcttggccttctttggatgcggtatcacatgaggcctgtccctaacagtgccctcaaagtgaaggtcctcaaggaggatcggcacagcccccttccctggctctgcagcggctgggtcaccccttacgctggtgatcaggaaagcccgctgccccacccctcgggcccacccgtacagaggctggtggtcgccgggataattaatgaccaccgccaattcatccctcacgtgtctcctctcttccctagcccgtctggcacagagggtggacctgttagaggagtggaggggctgcctggggaatgggacagagggattctctttccctaatttttttggttgtcctttttctttgaaaaacttgtaatttattgaagttttactcaatccaaataaaacttaatttattgaagacaaaaaaaaaaaaaaaaaa

SEQ ID NO: 221632 - DNA, 1000 bp, Homo Sapiens; identical to SEQ ID NO: 116360

SEQ ID NO: 221633 - DNA, 1000 bp, Homo Sapiens; identical to SEQ ID NO: 116363

SEQ ID NO: 221634 - DNA, 1000 bp, Homo Sapiens
tggaggagagaagcattgtaccctgggatcatttggttggttccaatcacaagcttagttatcaggttgcatgccttgtctcctgcaaaagacagaatgtttcacaattcccaggtaaactctggaccattccaagtgtcctagccttctgatgacattaattacctagttgtgtcgaggagtataggatggactctcctgagaaggggaggttggtggctttgtcttttctttttgctggatcctgaactggtctagacctcctgcccccaccccccagcccccatcagatgtggctggcctttcatttgaaggcttcagacttaaagcattaagcagctagtgccctctgcagggcctggtttccccagggaagggcagcaaggaacatgggaccagaagcctgtcctcagtaatgtgactatagtgagctttagcaaaagtttttctatataatgacatcttacttatcttttaccctttcctcagttttcccctgcctttaactaataaagaattgggagacagaaattttaaagtcctccttattcaagattttgaaattcttagcctgggagtgctggagagaacctgatgctttctccagaatgaagagtcccaatttgtatatcagtgttaagaagaaaacaaaacaaacacataggtgagattttcgtggactattttaaaaatgtgtcattaatataaaaaatttatattagcagtatttaatcattctcacctgtaaagaataagaaaaacagaaggtaaatattcttacagagaatagcagagctttaagattcattttcattttaagtccattttattttgccagtgtattaatgtttagaagtctgttttactaatgttatttattaattttttttcatttccatacacagttagttaactaaagagctttttcaagcacccatgtctgtaaaaaaatatttttaaataaagtttcttttgttgtagcagaaaaaaaaaaaaaaaa

SEQ ID NO: 221635 - DNA, 1000 bp, Homo Sapiens; identical to SEQ ID NO: 116365

SEQ ID NO: 221636 - DNA, 1000 bp, Homo Sapiens
gtattccatttttttcattgtgttctctattgctgctctctcactcccccatgaggtacagcagaaaggagaactatccaaaactaatttcctctgacatgtaagacgaatgatttaggtacgtcaaagcagtagtcaaggaggaaagggatagtccaaagacttaactggttcatattggactgataatctctttaaatggctttatgctagtttgacctcatttgtaaaatatttatgagaaagttctcatttaaaatgagatcgttgtttacagtgtatgtactaagcagtaagctatcttcaaatgtctaaggtagtaactttccatagggcctccttagatccctaagatggctttttctccttggtatttctgggtctttctgacatcagcagagaactggaaagacatagccaactgctgttcatgttactcatgactcctttctctaaaactgccttccacaattcactagaccagaagtggacgcaacttaagctgggataatcacattatcatctgaaaatctggagttgaacagcaaaagaagacaacatttctcaaatgcacatctcatggcagctaagccacatggctgggatttaaagcctttagagccagcccatggctttagctacctcactatgctgcttcacaaaccttgctcctgtgtaaaactatattctcagtgtagggcagagaggtctaacaccaacataaggtactagcagtgtttcccgtattgacaggaatacttaactcaataattcttttcttttccatttagtaacagttgtgatgactatgtttctattctaagtaattcctgtattctacagcagatactttgtcagcaatactaagggaagaaacaaagttgaaccgtttctttaataaaaaaaaaaaaaaaaaaaaaaaaaaaaaaaaaaaaaaaaaaaaaaaaaaaaaaaaaaaaaaaaaaaaaaaaaaaaaaaaaaaaaaaaaaaaaaaaaaaaa

SEQ ID NO: 221637 - DNA, 836 bp, Homo Sapiens
ccggtgagtcgccggcgctgcagagggaggcggcactggtctcgacgtggggcggccagcgatgaagccgcccagttcaatacaaacaagtgagtttgactcatcagatgaagagcctattgaagatgaacagactccaattcatatatcatggctatctttgtcacgagtgaattgttctcagtttctcggtttatgtgctcttccaggttgtaaatttaaagatgttagaagaaatgtccaaaaagatacagaagaactaaagagctgtggtatacaagacatatttgttttctgcaccagaggggaactgtcaaaatatagagtcccaaaccttctggatctctaccagcaatgtggaattatcacccatcatcatccaatcgcagatggagggactcctgacatagccagctgctgtgaaataatggaagagcttacaacctgccttaaaaattaccgaaaaaccttaatacactgctatggaggacttgggagatcttgtcttgtagctgcttgtctcctactatacctgtctgacacaatatcaccagagcaagccatagacagcctgcgagacctaagaggatccggggcaatacagaccatcaagcaatacaattatcttcatgagtttcgggacaaattagctgcacatctatcatcaagagattcacaatcaagatctgtatcaagataaaggaattcaaatagcatatatatgaccatgtctgaaatgtcagttctctagcataatttgtattgaaatgaaaccaccagtgttatcaacttgaatgtaaatgtacatgtgcagatattcctaaagttttattgac

SEQ ID NO: 221638 - DNA, 1000 bp, Homo Sapiens
actgctacttgctctgctctaccatgtttaaagaaatatttggatgttaaattaactcactatggtttttcacctgggaaggaaacaaattacgtactagagggcattgactggttaaaaacttgtgtatcccgggaaggacctgcggtacaggagtcagccatgtctgtgctgtgtggaaccacctgatgacatggttaacgaggaagacgatgtgttgaccggctgccgtttgaggactttggtcacccagactagacaccttctgtgctcatgtttggaaagctgaaagggaaggacagctgtgccctcctgggagctcatgtgtccctggcgctgtgctagctttcctttacagctgtttacagacaaggcaggcctgaggcagatggccactgctcttgtgatgtttgctcagaggaatatgaacattttatttttgaaaagggatgatgtggttttttgccaggtgtttataattaatcctttaatattatggttattaacctcttaaacatgaatgaattcttgattgttttaacacagtacctaagactaatgctttctgtggacaccactgagctctgcctcaactccaccctctgcgaccggaggactatgcccctagtaactgctgtcggtgtggacgctgtgctggttctgttttctaaaggagcagaaggacaggtctctgagacaggatcgttgtccctacaggaggaacagtggccttgcttcttagacggtcttcactgtgtgttttaaaacaacaacaacaacaacaacaacaacataaaactcttttgacctgtaacttaaagatcataaacttcaggcaataatattttctgtgtaagcttttaaaattatttttggggatcatagcttgttttattttgtgctataaaattaacagtattaaatgacttatattcttagaataaaaaaaaaaaaaaaaaaaaaaaaaaaaaaaaaaaaaaaaaaaaaaaaaaaaaaaaaa

SEQ ID NO: 221639 - DNA, 838 bp, Homo Sapiens
tgctgtttgtggaaaataaagcattctataggcggagctagtgaacgcctcttttaaaacacgagtctccacacttccctgttcactttggttccagcatcctgtccagcaaagaagcaatcagccaaaatgatacctggaggcttatctgaggccaaacccgccactccagaaatccaggagattgttgataaggttaaaccacagcttgaagaaaaaacaaatgagacttacggaaaattggaagctgtgcagtataaaactcaagttgttgctggaacaaattactacattaaggtacgagcaggtgataataaatatatgcacttgaaagtattcaaaagtcttcccggacaaaatgaggacttggtacttactggataccaggttgacaaaaacaaggatgacgagctgacgggcttttagcagcatgtacccaaagtgttctgattccttcaactggctactgagtcatgatccttgctgataaatataaccatcaataaagaagcattcttttccaaagaaattatttcttcaattatttctcatttattgtattaagcagaaattaccttttctttctcaaaatcagtgttattgctttagagtataaactccatataaattgatggcaattggaaatcttataaaaactagtcaagcctaatgcaactggctaaaggatagtaccaccctcacccccaccataggcaggctggatcgtggactatcaattcaccagcctccttgttccctgtggctgctgataacccaacattccatctctaccctcatacttcaaaattaaatcaagtattttacaaaaaaaaaaaaa

SEQ ID NO: 221640 - DNA, 1000 bp, Homo Sapiens
tttctgtcacatcagctccactttcagtgaaagcatcacttgggattaatatggggatgcagcattatgatgtgggtcaaggaattaagttagggaatggcacagcccaaagaaggaaaaggcagggagcgagggagaagactatattgtacacaccttatatttacgtatgagacgtttatagccgaaatgatcttttcaagttaaattttatgccttttatttcttaaacaaatgtatgattacatcaaggcttcaaaaatactcacatggctatgttttagccagtgatgctaaaggttgtattgcatatatacatatatatatatatatatatatatatatatatatatatatatatatattttaatttgatagtattgtgcatagagccacgtatgtttttgtgtatttgttaatggtttgaatataaacactatatggcagtgtctttccaccttgggtcccagggaagttttgtggaggagctcaggacactaatacaccaggtagaacacaaggtcatttgctaactagcttggaaactggatgaggtcatagcagtgcttgattgcgtggaattgtgctgagttggtgttgacatgtgctttggggcttttacaccagttcctttcaatggtttgcaaggaagccacagctggtggtatctgagttgacttgacagaacactgtcttgaagacaatggcttactccaggagacccacaggtatgaccttctaggaagctccagttcgatgggcccaattcttacaaacatgtggttaatgccatggacagaagaaggcagcaggtggcagaatggggtgcatgaaggtttctgaaaattaacactgcttgtgtttttaactcaatattttccatgaaaatgcaacaacatgtataatatttttaattaaataaaaatctgtggtggtcgttttaaaaaaaaaaaaaaaaaaaaaaaaaaaaaaaaaaaaaaaaaaaaaaaaaaaaaaaaaa

SEQ ID NO: 221641 - DNA, 1000 bp, Homo Sapiens
acctgacgggcaccaacggcagcaacagcatcagcatgtcggtggagatcaacggcatcatgtacacaggagttctgtttgctcagccgccggcccccacgccaacctctgctcccaacaaaggaggcggcggcggcggcggcagcagcagcaacgcaggcggccggggaggaaacaccggaaccagcggcggccaggctgggccagcggggctgtccacaccctccacatctacctcaaataactcgttgccttaaccgcatcactccccacccgccacccaccctggagcccgccggcctgggcagggggtccaggtgggccacacaggggccaggatggcggaagatacgggtggggagggaagatatccagaaaggagccacagctgacgccaaaaagaaaagaaaaaagatatatatatatatatatatatatatacgtatatatataaagaagaatttaataaaacaggggaaaaccaaggaacacttgaatttctcaggttttggacattcagagagatgaattgtgagaacagcaaagaaatccatcagaaaaacagaaagaggcagacgtttcccagggcgttcaggcagccctgatggaccgaaggctctggtgtctggtttggccccacagcagtgtgggccgatcctgtttacctcatacatccctgcactgtgtgttttcatttttgtctgctttagttctcttttattttctattcaccacacactcaccactcccagcttctcgtgtccagtgaaacccctgaaccaagatcactgaatttttgtttttttcttgttgctttgggaaatttttttttctctgtagggtttttaagaggtttcgggggttttgttgtgtaaatattctattttattcttggggggatcaaaccttaggaaaaggatatctatatatctatatagctatatatttgtgttccttcagggaaactggtcttgaaaaagcaagaaaaaaaagcaaaaaa

SEQ ID NO: 221642 - DNA, 1000 bp, Homo Sapiens
tagcatattctcttatgaaatagcatgagaaaacacagggcatttctaggacagtaaaacgttaaagtactggattaagaaaacaacaacaggctgggcgcagtggctcacacctgtaatcccagcactttgggaggctgaggcgggtggatcacctgaggtcaggagtttgtgaccagcctggccaacatagtgaaatcctgtttctactaaaaatacaaaaattagctggatgcgatagcacgtgcctgtagtcccagctactcgggaggctgaggctggagagttgctcaaacccgggaggcggagattgcagtgagccaagatcgcaccgctgcactccagcctgggtgacagagcgaccctctgtctcaaaaaataataataataataaataaaacaacaacaaaatgcatcagagagccaaaacattcagtattgcattttcacataggtgatgaaatgactttggaactttatctgtgttatagttatgagttgctttgggagacttggagctctctgtagctattgttcataacactttgctccataaccctgatgtccgcagtatctaagtatctcagccttcatccattaactctactagggagcccacagccaccatttccactaggaggtatcaatatttgtggtatgacataaggctcccttgaaataacaagacttttgagcaatctgaattaaaaatacatcaaaaaagtaatagcgctcatttgctaaatgcaaaaaataatcacctttgataccaatgtgcaccaatatgcctaactagctagccagctggagataatttaccagggaatgtttcaaagccctaaccttgaagtttggaaacaggtggtcttctatgctgcagagaaactatgcattaggtctcttttcaattagaaacctttactatttccaatgtatgtttgttaaaaataataataataaaaccaaaagcctttgtggaaacccaaaaaaaaaaaaaaaa

SEQ ID NO: 221643 - DNA, 1000 bp, Homo Sapiens
ttgtcttccattccattgttttgaaactcagtatgctgcccctgtcttgctgtcatgaaatcagcaagagaggatgacacatcaaataataactcggattccagcccacattggattcatcagcatttggaccaatagcccacagctgagaatgtggaatacctaaggatagcaccgcttttgttctcgcaaaaacgtatctcctaatttgaggctcagatgaaatgcatcaggtcctttggggcatagatcagaagactacaaaaatgaagctgctctgaaatctcctttagccatcaccccaaccccccaaaattagtttgtgttacttatggaagatagttttctccttttacttcacttcaaaagctttttactcaaagagtatatgttccctccaggtcagctgcccccaaaccccctccttacgctttgtcacacaaaaagtgtctctgccttgagtcatctattcaagcacttacagctctggccacaacagggcattttacaggtgcgaatgacagtagcattatgagtagtgtggaattcaggtagtaaatatgaaactagggtttgaaattgataatgctttcacaacatttgcagatgttttagaaggaaaaaagttccttcctaaaataatttctctacaattggaagattggaagattcagctagttaggagcccaccttttttcctaatctgtgtgtgccctgtaacctgactggttaacagcagtcctttgtaaacagtgttttaaactctcctagtcaatatccaccccatccaatttatcaaggaagaaatggttcagaaaatattttcagcctacagttatgttcagtcacacacacatacaaaatgttccttttgcttttaaagtaatttttgactcccagatcagtcagagcccctacagcattgttaagaaagtatttgatttttgtctcaatgaaaataaaactatattcatttccactctaaaaaaaaaaaaaaaaa

SEQ ID NO: 221644 - DNA, 1000 bp, Homo Sapiens
ctgtgctgcaaggtgtctgactttggcctgactcgcctcctggatgactttgatggcacatacgaaacccagggaggaaagatccctatccgttggacagcccctgaagccattgcccatcggatcttcaccacagccagcgatgtgtggagctttgggattgtgatgtgggaggtgctgagctttggggacaagccttatggggagatgagcaatcaggaggttatgaagagcattgaggatgggtaccggttgccccctcctgtggactgccctgcccctctgtatgagctcatgaagaactgctgggcatatgaccgtgcccgccggccacacttccagaagcttcaggcacatctggagcaactgcttgccaacccccactccctgcggaccattgccaactttgaccccaggatgactcttcgcctgcccagcctgagtggctcagatgggatcccatatcgaaccgtctctgagtggctcgagtccatacgcatgaaacgctacatcctgcacttccactcggctgggctggacaccatggagtgtgtgctggagctgaccgctgaggacctgacgcagatgggaatcacactgcccgggcaccagaagcgcattctttgcagtattcagggattcaaggactgatccctcctctcaccccatgcccaatcagggtgcaaggagcaaggacggggccaaggtcgctcatggtcactccctgcgccccttcccacaacctgccagactaggctatcggtgctgcttctgcccactttcaggagaaccctgctctgcaccccagaaaacctctttgttttaaaagggaggtgggggtagaagtaaaaggatgatcatgggagggagctgaggggttaatatatatacatacatacacatatatatatttttgtaaataaacaggaactgattttctgcctccatcccacccatgagggctgcaggcactacaaaagagctgactactgagaaaaaa

SEQ ID NO: 221645 - DNA, 1000 bp, Homo Sapiens
cagtttctttccccagcagtttctgtcctagcaagtaagaatggccaactcaactttcataatttaaaaatctccattaaagttataactagtaattatgttttcaacactttttggtttttttcattttgttttgctctgaccgattcctttatatttgctcccctatttttggctttaatttctaattgcaaagatgtttacatcaaagcttcttcacagaatttaagcaagaaatattttaatatagtgaaatggccactactttaagtatacaatctttaaaataagaaagggaggctaatatttttcatgctatcaaattatcttcaccctcatcctttacatttttcaacatttttttttctccataaatgacactacttgataggccgttggttgtctgaagagtagaagggaaactaagagacagttctctgtggttcaggaaaactactgatactttcaggggtggcccaatgagggaatccattgaactggaagaaacacactggattgggtatgtctacctggcagatactcagaaatgtagtttgcacttaagctgtaattttatttgttctttttctgaactccattttggattttgaatcaagcaatatggaagcaaccagcaaattaactaatttaagtacatttttaaaaaaagagctaagataaagactgtggaaatgccaaaccaagcaaattaggaaccttgcaacggtatccagggactatgatgagaggccagcacattatcttcatatgtcacctttgctacgcaaggaaatttgttcagttcgtatacttcgtaagaaggaatgcgagtaaggattggcttgaattccatggaatttctagtatgagactatttatatgaagtagaaggtaactctttgcacataaattggtataataaaaagaaaaacacaaacattcaaagcttagggataggtccttgggtcaaaagttgtaaataaatgtgaaacatcttctc

SEQ ID NO: 221646 - DNA, 1000 bp, Homo Sapiens; identical to SEQ ID NO: 116378

SEQ ID NO: 221647 - DNA, 1000 bp, Homo Sapiens
gctggtgatgcccaactacccattcatcaacattcggtcaagtggtaagatacaaactcttttggtagggaattaattttgaattgaaaagaatttttaaaaatccaaatctaagacatggcatgtttaggaagattttagaaacactaaaataatgtgatcctttggattgcctcaatgttcttactcaagtcatctcacttataaggagagttataggctattcagtatcaagatagatttctttggtttatttggttggttcccttttctgcatattgtttgtaatctcctagatactattacgctatcttgtttgggaatgatgtttcataggtttgtgatgatctttacgttcaggactcagttttaacacccagcccagtggttctttcatagatgggaacctgtttctacaaacacttccgattttctgtgaaactaccaagctctcccttatcaagtgaatatcatcaaaaccacagcatccttgatcagagaagggggaggttcacatgtttgcagtgaaaagcagtgtctttgatctgcaacagcaaatcctcagagaaaaagattctggggttacttgaccttctctcctgttaagtgcagtagggcttcccctcttgactttcctggttatagctttccatcacagctccccacattctctcttgatgttgaaagcagtctctcaaaagactttgttgttgtgtggttttttgtttgtgatttttttccttatgcaaatcatactcctgcccaagaaaatacagtagttccccttatctgagcagtatatgttctaagacccctagtagattcgcaaaccacagatagtaccaaactccattcatatatatgatgttttttcttcccttaaccccactcatatgtatctgtgataacgtttaatttataaattaggcacagtaagagattaatgacaataataaaatagaaaaattataaaaaaaaaaaaaaaaaaaaaaaaaaaaaa

SEQ ID NO: 221648 - DNA, 1000 bp, Homo Sapiens
aacattcctcaacttatagatcatcactatacaacaaaacaggtcatcactaagaaatcaggtgtagttctgctgaatcctattcctaaggacaagaaatggattctcagtcatgaagatgtcatattgggagaattactgggcaagggaaattttggtgaagtatataagggcacattaaaggataaaacttctgttgctgttaaaacatgtaaagaagatcttcctcaggaattgaaaataaaatttttacaagaagccaaaattctcaagcaatatgatcatcccaatattgtcaaacttataggagtttgcacacaaagacagcctgtctacatcattatggaactggtttcaggaggtgatttcctcacctttctgagaaggaagaaggatgaactaaaactcaaacagttagtgaaattttcattagacgctgctgctggtatgttgtatctcgagagtaaaaactgtatacacagggaccttgctgcaagaaactgcctggtaggtgaaaataatgttctgaaaatcagtgactttggaatgtctcgtcaagaggatggtggagtgtattcatcttctggcttaaagcagattcccattaaatggacagcaccggaagctcttaattatgggagatacagttcagagagtgacgtgtggagctttggcatccttctctgggagaccttcagcttaggggtttgtccgtaccctggaatgacaaatcagcaagcaagagagcaagtagaaagaggataccggatgtcagctccccagcactgtccagaggatatttccaaaatcatgatgaagtgttgggattataaacctgaaaatcgccctaagttcagtgaacttcagaaagagctcactatcatcaagagaaaactcacatagtgacaggatggcgccaaactcagccttcaggactctgtcctccagcagagtaacattattgttctcattaacaatgaatttataccacattaccttc

SEQ ID NO: 221649 - DNA, 1000 bp, Homo Sapiens; identical to SEQ ID NO: 116379

SEQ ID NO: 221650 - DNA, 1000 bp, Homo Sapiens
gcacaagcaggctcctggagaccaggtaacaggaatccttccatcagtggaactgctatttaacctggatcgcattactaccgttgaacacttactcaagtcagtcttgctgtacaatatcaacaactcagtttctttttcctctgctgtcaaatgtgtgtgcaatctaatgataaaggagccaaagtcttctagcaggactctcggcagagctccatactcatttacctttaactcacagtttgaatttggaaagaaacacaaatggattcagattgatgtgaccagcctccttcaacctttagtggcctccaacaagagaagtattcacatgtctataaattttacttgcatgaaagaccagctggagcatccttcagcacagaatggtttgtttaacatgactctggtgtccccctcactgatcttatatttgaatgacacaagtgctcaggcttatcacagctggtattcccttcactataaaaggaggccttcccagggtcctgaccaggagagaagtctgtctgcctatcctgtgggagaagaggctgctgaggatgggagatcttcccatcaccgtcaccgcagaggtcaggaaactgtcagttctgaattgaagaagcccttgggcccagcttccttcaatctgagtgaatacttcagacaatttcttcttccccaaaatgagtgtgagctccatgactttagacttagctttagtcagctgaagtgggacaactggattgtggctccgcacaggtacaaccctcgatactgtaaaggggactgtccaagggcagttggacatcggtatggctctccagttcacaccatggtacagaacatcatctatgagaagctggactcctcagtgccaagaccgtcatgtgtacctgccaaatacagccccttgagtgttttgaccattgagcccgatggctcaattgcctataaagagtacgaagatatgatagctacaaagtgcacctgtcgttaa

SEQ ID NO: 221651 - DNA, 1000 bp, Homo Sapiens
aagacaaaggcaaagtcaaatggggaccagaataaatcttagaccccacagtccttcccatttccagccctaatctacagacaggaatgcccttcaggtttcttccctcccccctcttgacctaccccagatatttgtgtggaagaggaggaatcaccatttacaaggtggacaaatgctaatatttttatctagaaagaagagtgagtgttaacttttatttttttccttctggggggtctgttgactcctttcttttgggtgctgcctataaatcttggaggaatcatttctcctcctcaaaaactgattcagaaactgacttggggaaggaatttaatactttgaagtcatgagatgcaccatcgaggctacccccaagaagaagcagaagagaagttggtaatgagaggggattagaggtcctcccttcagtagggctgtgaaaacctcatcactggaggtaaaagcacaagcaatgcctgtggacaagatgtcattcattcactcagcaaatgttcatggatcaccggctaccaaggtaccaggcaccatgctaggtattggggaagagagactgaagtcacaacccctgactgctcctcaaaagctaacggttgcacctccaagtggctgggtctgttcttactcttggagggaattctgagaagacagcacagaattgtaaaccttcccttttgacccttttggattttatcaggtgtaaacaaaaagctgaacagttacttcaaagatatgtgtgtatattcagttttttattgttaagctgatattttaaagatttctgagctagcaggcatgtgggaaggaaggctctgtcttcaactctttgaccctccatgtgtaccatagaggggggaaaggtggtattttcactttgatgaggttggtaaatgtttttagatcttctggtaagcattatgtttgttaatacatatttattagagtgatgttttaagttaataaagtattaagagta

SEQ ID NO: 221652 - DNA, 1000 bp, Homo Sapiens
tggcccagcagtcctggtggagcagcagactgattcagcaatggagccaactggcccaacccaagagcgctacaaggatggggtggtgaccatcggctgtgtgggtttccctaatgtgggaaagtcctcgctgatcaatgggctggtggggcggaaagtcgtgagtgtctccagaaccccgggccatacccgatactttcagacctactttcttaccccctctgtgaagctctgtgactgcccaggcctcatcttcccatctcttctgcctaggcagttgcaggttctggcagggatctaccctatcgcccagatccaggagccctacactgctgtgggctacctggcctcccgaattcccgtgcaggccctgctccacctgcgccacccagaggctgaggacccctcagcggaacacccctggtgtgcctgggacatctgtgaagcctgggcagagaaacgtggttacaagacagccaaggcggctcggaatgatgtgtacagagcagccaacagtctcttgcggctggcagtggacggccgcctcagcctgtgttttcatcccccaggctacagtgaacagaaaggcacctgggagtcccatccagagaccacggagctggtggttttgcagggcagggtggggccagcaggtgacgaggaggaggaggaagaggaagagctgagcagctcctgtgaggaggagggagaggaggaccgggatgcggatgaggagggagaaggggatgaggagaccccaacctcggctccagggtccagcctggctggccgaaacccttatgccctgctgggtgaggatgagtgctgagttcctcgcccagcgccatcttccctcccagtatctttgcttttggactgacctgggggtatctcccctctgccaccccaattgtgaataaagattgtttgctttgtagccccttccccagatgaactgaggtgagagcggctgttccaggctaaaaaaaaaaaaaaaaaa

SEQ ID NO: 221653 - DNA, 1000 bp, Homo Sapiens
tccagggcttctttccaaacccccagctccacaccccccagacccagctggttctggagttctaggacattgggtgtttcaaggttctgttcagatccctatgggggcccagctggctccacggttccagaatgttcaggtggtcagtgttctactcagaaatgtctcacagcccagctgggttgcaattccagaatgctgggagttttacagtgccattccaagtcccagatgtccctcttcccccaaacttgaccttgaccatgtcactttacgtttgaatttctgagctaaagagtcagagagattagtcacatagttgcctaaataggagagagaaagattatatatgcacatatacaaagacagtgtctatttatgattgatttatttatttataaatttacttatgggtggtaaggggcaaaaaagaggcccacaccttgatatccaggccataccagggtatcccttgtcccttcacccccatttctgacctcagttcctggaggggggaaagggtgaaagagaaaccacgtattttgttattattttggattattttttatcgaagagatcatagaaaccagagccttctccccaggcctgccctcctcgggtttggaaggggaacacaccagcctctggttttttatttttttaagaagccatcacctgagcaaccaaaaattcctctgcgctggggtccgactgccctctggtggccatttggggaaaactgcagcccggccaggcagctgggaccagaatgcaaccccagctccactccagcctggcgtccagggccacagccatggcctgggggccaagcctcaccctgcggtgccctaaaggagggggggcacgagccaacaccccacccctctgccaaccggggtatggcccccagtgcattccctgttcccgtctccaacccaactcaataaaaaatgattttgtcataaaaaaaaaaaaaaaaaaaaaaaaaaaaaaaaaaaaa

SEQ ID NO: 221654 - DNA, 1000 bp, Homo Sapiens
cgccacgccctgtgcaacttgctctgtggcaaaaggctcaagggcccgccccccagcttcgaagggaaaaccaacgagagctcgctgagtgccaagtcagagctgtgagcggggggcgccgtccaggccgagcgcagactgtttaggactcagcagacccagcaagaggcatctgccctttccccagccacctccccagcaagcaacctgaaatctcagcagatgcccaccatttctctagatcgcctagtctcaacccataaaaaggaagaactgacaaaggggatccatcggccacccctctgcaggggcttgtgatggctacaatggctcctagacactcaacgacttcatctgtggcagggagagaggaggccggaagaacaacccctgaacaatggaggcctttctttcccgctaggctcccagcctccttcccgctacagaatcgctcatcggcgaggctcagcagaaagaccctgaaggcaggctgcaaatgacccagaagagggacctgggagtcctggtggggacggggagggagtctcaatactcctttgcagcgcaaggtactctgagtcccctctgtagtgcctctgccagacacacactgcctgagttgaagagacacaggccacacatttcaggctggttgccagcggacgtcagcactcacggcctgcggggactcagcacagctctggattctggatctctcctgctgtaaccccacgcacaagcctgcaacccccagagctctttgacaggctcccaggcctcccagtcctggacaagcatgtgcagtcacgggagctcagctcaggccagggctgggctgtgcacctgcctcccactgacccagacccacttcctccagagaggcctctctccgcctgagctatttcccttgctagtgtgcagatatttccctaacatgtccttttttgtatttgtttgtacggaccataaatataactgtagctttaagactaaaaaaaaa

SEQ ID NO: 221655 - DNA, 1000 bp, Homo Sapiens
tatccttctgctttcactggagagtaacactgctctcatttgctgtttccatgaggcttgtgtatcttttgcaagtgtctcaacagcaatcaacgtttttgctatcactttggacagatatgacatctctgtaaaacctgcaaaccgaattctgacaatgggcagagctgtaatgttaatgatatccatttggattttttcttttttctctttcctgattccttttattgaggtaaattttttcagtcttcaaagtggaaatacctgggaaaacaagacacttttatgtgtcagtacaaatgaatactacactgaactgggaatgtattatcacctgttagtacagatcccaatattctttttcactgttgtagtaatgttaatcacatacaccaaaatacttcaggctcttaatattcgaataggcacaagattttcaacagggcagaagaagaaagcaagaaagaaaaagacaatttctctaaccacacaacatgaggctacagacatgtcacaaagcagtggtgggagaaatgtagtctttggtgtaagaacttcagtttctgtaataattgccctccggcgagctgtgaaacgacaccgtgaacgacgagaaagacaaaagagagtcttcaggatgtctttattgattatttctacatttcttctctgctggacaccaatttctgttttaaataccaccattttatgtttaggcccaagtgaccttttagtaaaattaagattgtgttttttagtcatggcttatggaacaactatatttcaccctctattatatgcattcactagacaaaaatttcaaaaggtcttgaaaagtaaaatgaaaaagcgagttgtttctatagtagaagctgatcccctgcctaataatgctgtaatacacaactcttggatagatcccaaaagaaacaaaaaaattacctttgaagatagtgaaataagagaaaaacgtttagtgcctcaggttgtcacagactag

SEQ ID NO: 221656 - DNA, 1000 bp, Homo Sapiens
tacatgagcatcagcctggtcacggccatcgccgtggaccgctatgtggccgtgcggcacccgctgcgtgcccgcgggctgcggtcccccaggcaggctgcggccgtgtgcgcggtcctctgggtgctggtcatcggctccctggtggctcgctggctcctggggattcaggagggcggcttctgcttcaggagcacccggcacaatttcaactccatggcgttcccgctgctgggattctacctgcccctggccgtggtggtcttctgctccctgaaggtggtgactgccctggcccagaggccacccaccgacgtggggcaggcagaggccacccgcaaggctgcccgcatggtctgggccaacctcctggtgttcgtggtctgcttcctgcccctgcacgtggggctgacagtgcgcctcgcagtgggctggaacgcctgtgccctcctggagacgatccgtcgcgccctgtacataaccagcaagctctcagatgccaactgctgcctggacgccatctgctactactacatggccaaggagttccaggaggcgtctgcactggccgtggctcccagtgctaaggcccacaaaagccaggactctctgtgcgtgaccctcgcctaagaggcgtgctgtgggcgctgtgggccaggtctcgggggctccgggaggtgctgcctgccaggggaagctggaaccagtagcaaggagcccgggatcagccctgaactcactgtgtattctcttggagccttgggtgggcagggacggcccaggtacctgctctcttgggaagagagagggacagggacaagggcaagaggactgaggccagagcaaggccaatgtcagagacccccgggatggggcctcacacttgccacccccagaaccagctcacctggccagagtgggttcctgctggccagggtgcagccttgatgacacctgccgctgcccctcggggctggaataaaactccccacccagagtc

SEQ ID NO: 221657 - DNA, 993 bp, Homo Sapiens
atgctgccggactggaagagctccttgatcctcatggcttacatcatcatcttcctcactggcctccctgccaacctcctggccctgcgggcctttgtggggcggatccgccagccccagcctgcacctgtgcacatcctcctgctgagcctgacgctggccgacctcctcctgctgctgctgctgcccttcaagatcatcgaggctgcgtcgaacttccgctggtacctgcccaaggtcgtctgcgccctcacgagttttggcttctacagcagcatctactgcagcacgtggctcctggcgggcatcagcatcgagcgctacctgggagtggctttccccgtgcagtacaagctctcccgccggcctctgtatggagtgattgcagctctggtggcctgggttatgtcctttggtcactgcaccatcgtgatcatcgttcaatacttgaacacgactgagcaggtcagaagtggcaatgaaattacctgctacgagaacttcaccgataaccagttggacgtggtgctgcccgtgcggctggagctgtgcctggtgctcttcttcatccccatggcagtcaccatcttctgctactggcgttttgtgtggatcatgctctcccagccccttgtgggggcccagaggcggcgccgagccgtggggctggctgtggtgacgctgctcaatttcctggtgtgcttcggaccttacaacgtgtcccacctggtggggtatcaccagagaaaaagcccctggtggcggtcaatagccgtggtgttcagttcactcaacgccagtctggaccccctgctcttctatttctcttcttcagtggtgcgcagggcatttgggagagggctgcaggtgctgcggaatcagggctcctccctgttgggacgcagaggcaaagacacagcagaggggacaaatgaggacaggggtgtgggtcaaggagaagggatgccaagttcggacttcactacagagtag

SEQ ID NO: 221658 - DNA, 1000 bp, Homo Sapiens
tcaggaacatgaacttcaagcgcttagaagccgggatgttggaccctcccttcgttccagacccccgcgctgtgtactgtaaggacgtgctggacatcgagcagttctccactgtgaagggcgtcaatctggaccacacagacgacgacttctactccaagttctccacgggctctgtgtccatcccatggcaaaacgagatgatagaaacagaatgctttaaggagctgaacgtgtttggacctaatggtaccctcccgccagatctgaacagaaaccaccctccggaaccgcccaagaaagggctgctccagagactcttcaagcggcagcatcagaacaattccaagagttcgcccagctccaagaccagttttaaccaccacataaactcaaaccatgtcagctcgaactccaccggaagcagctagtttcggctctggcctccaagtccacagtggaaccagcccagacccttctccttagaagtggaagtagtggagcccctgctctggtggggctgccaggggagaccccgggagccggggaaggaggccgtccatcccgtcgacgtagaacctcgaggtttctcaaagaaatttccactcaggtctgttttccgaggcggccccggccggggtggattggatttgtctttggtgaacattgcaatagaaatccaattggatacgacaacttgcacgtattttaatagcgtcataactagaactgaattttgtctttatgatttttaaagaaaagttttgtaaatttctctactgtctcagtttacattttgtatatttgtatttaaatgaaagtgagactttgagggtgtatattttctgtgcagccactgttaagccatgtgttccaaggcattttagcggggagggggttatcaaaaaaaaaaaaatgtgactcaagacttccagagcctcaaatgagaaaatgtctttattaaatgtagaaagtgatccataaaaaaaaaaaaaaaaaa

SEQ ID NO: 221659 - DNA, 1000 bp, Homo Sapiens; identical to SEQ ID NO: 116387

SEQ ID NO: 221660 - DNA, 1000 bp, Homo Sapiens; identical to SEQ ID NO: 116389

SEQ ID NO: 221661 - DNA, 777 bp, Homo Sapiens
catgctgttctgacagtttgagattacttattgtcttttctgggaagacaaaaacatgtcggagactgctccacttgctcctaccattcctgcacccgcagaaaaaacacctgtgaagaaaaaggcgaagaaggcaggcgcaactgctgggaaacgcaaagcatccggacccccagtatctgagcttatcaccaaggcagtggcagcttctaaggagcgcagcggcgtttctctggccgcgcttaagaaagcgcttgcggctgctggctacgatgtagaaaaaaacaacagccgtatcaagcttggcctcaagagcttggtgagcaaaggtactctggtgcagaccaaaggtaccggtgcttctggctccttcaaactcaacaagaaagcggcttccggggaaggcaaacccaaggccaaaaaggctggcgcagccaagcctaggaagcctgctggggcagccaagaagcccaagaaggtggctggcgccgctaccccgaagaaaagcatcaaaaagactcctaagaaggtaaagaagccagcaaccgctgctgggaccaagaaagtggccaagagtgcgaaaaaggtgaaaacacctcagccaaaaaaagctgccaagagtccagctaaggccaaagcccctaagcccaaggcggccaagcctaagtcggggaagccgaaggttacaaaggcaaagaaggcagctccgaagaaaaagtgaaactggcgggacgttcccctttgaaaattttaaacggctcttttcagagccaccca

SEQ ID NO: 221662 - DNA, 785 bp, Homo Sapiens; identical to SEQ ID NO: 29597

SEQ ID NO: 221663 - DNA, 816 bp, Homo Sapiens
caacaaaaaagagcctcaggatccagcacacattatcacaaacttagtgtccatccatcactgctgaccctctccggacctgactccacccctgagggacacaggtcagccttgaccaatgacttttaagtaccatggagaacagggggccagaacttcggcagtaaagaataaaaggccagacagagaggcagcagcacatatctgcttccgacacagctgcaatcactagcaagctctcaggcctggcatcatggtgcattttactgctgaggagaaggctgccgtcactagcctgtggagcaagatgaatgtggaagaggctggaggtgaagccttgggcagactcctcgttgtttacccctggacccagagattttttgacagctttggaaacctgtcgtctccctctgccatcctgggcaaccccaaggtcaaggcccatggcaagaaggtgctgacttcctttggagatgctattaaaaacatggacaacctcaagcccgcctttgctaagctgagtgagctgcactgtgacaagctgcatgtggatcctgagaacttcaagctcctgggtaacgtgatggtgattattctggctactcactttggcaaggagttcacccctgaagtgcaggctgcctggcagaagctggtgtctgctgtcgccattgccctggcccataagtaccactgagttctcttccagtttgcaggtgttcctgtgaccctgacaccctccttctgcacatggggactgggcttggccttgagagaaagccttctgtttaataaagtacattttcttcagtaatc

SEQ ID NO: 221664 - DNA, 1000 bp, Homo Sapiens; identical to SEQ ID NO: 116393

SEQ ID NO: 221665 - DNA, 1000 bp, Homo Sapiens
gctgcccattaggcagactctcccggaggacaatgaggagcccccagctctgccccctaggactctggaaggcctccaggtggaggaagagccagtgtacgaagcagagcctgagcctgagcccgagcctgagcccgagcctgagaatgactatgaggacgttgaggagatggacaggcatgagcaggaggatgaaccagagggggactatgaggaggtgctcgagcctgaagattcttctttttcttctgctctggctggatcatcaggctgcccggctggggctggggctggggctgtggctctggggatctcagctgtggctctatatgattaccaaggagagggaagtgatgagctttcctttgatccggacgacgtaatcactgacattgagatggtggacgagggctggtggcggggacgttgccatggccactttggactcttccctgcaaattatgtcaagcttctggagtgactagagctcactgtctactgcaactgtgatttcccatgtccaaagtggctctgcctccaccccctccctattcctgatgcaaatgtctaaccagatgagtttctggacagacttccctctcctgcttcattaagggcttggggcagagacagcatggggaaggaggtccccttccccaagagtcctctctatcctggatgagctcatgaacatttctcttgtgttcctgactccttcccaatgaacacctctctgccaccccaagctctgctctcctcctctgtgagctctgggcttcccagtttgtttacccgggaaagtacgtctagattgtgtggtttgcctcattgtgctatttgcccactttccttccctgaagaaatatctgtgaaccttctttctgttcagtcctaaaattcgaaataaagtgagactatggttcacctgtaaaaaaaaaaaaaaaaaaaaaaaaaaaaaaaaaaaaaaaaaaaaaaaaaaaaaaaaaaaaaaaaaaaaaaa

SEQ ID NO: 221666 - DNA, 1000 bp, Homo Sapiens
tcgtaatagctcagattagaatggctaccccattctctagacaaaatcaaattgtcctattgtgactcttctaaaaatgaagatgaagagctatttaatgacacaccttggattaaaacgggaatcacatcttaaagctaaaaatgaacctgcaagccttctaaatgagtcactgagcatcactagtgacaagtctcgggtgagcgtaaatgggtcatgacaagatgggacagcaacaaaatcatggcttaggatcgacaagaagttaaaaaacagctgcatctgttacttaagtttgtaagacagtgccctgagacctctagagaaaagatgtttgtttacataagagaaagaggccagacatggtgtctcacacgtttaatcccagcactttgggaggcaggggcgggtggatcacctgaggtcaggagttcaagactagcctggccaacatggtgaaaccccgtctctactaaaaatacaaaaattagccgggcatggtggcaggcgcctataatcccagctactggggaggctgaggcaggagaatcacttgaacccgggggacagaggttgtagtgagccaagatcgcaccactgcactccagcctgggtcacagagtgagactccatctcaaaaaaaaaaaagagagagagagagaaagaaatagaagagaagagccatcttggcagggttattttatatctgagcaaggagtttaaatgagactagtttagattgtctgctgatgcagccgtccatagcagtacccctaaaatcccaccagaatacgggtccctctaacccagtggctggaagaaccactgtctagagcaacttttcttggaactgtcccagctaccaagtcagacaccaaggtttatgccaccaggtaacacgggaatcacaggtacatgtcgctccggtcagattagttggctttggcccctcgaccctgtgcaggagctagttctcagcttgcagctggaagttccctct

SEQ ID NO: 221667 - DNA, 1000 bp, Homo Sapiens
aagtgttcctcctgctcccagcagttcatgcagaagaaggacttgcagagccacatgatcaaacttcatggagcccccaagccccatgcatgccccacctgtgccaagtgcttcctgtctcggacagagctgcagctgcatgaagctttcaagcaccgtggtgagaagctgtttgtgtgtgaggagtgtgggcaccgggcctcgagccggaatggcctgcagatgcacatcaaggccaagcacaggaatgagaggccacacgtatgtgagttctgcagccacgccttcacccaaaaggccaatctcaacatgcacctgcgcacacacacgggtgagaagcccttccagtgccacctctgtggcaagaccttccgaacccaagccagcctggacaagcacaaccgcacccacaccggggaaaggcccttcagttgcgagttctgtgaacagcgcttcactgagaaggggcccctcctgaggcacgtggccagccgccatcaggagggccggccccacttctgccagatatgcggcaagaccttcaaagccgtggagcaactgcgtgtgcacgtcagacggcacaagggggtgaggaagtttgagtgcaccgagtgtggctacaagtttacccgacaggcccacctgcggaggcacatggagatccacgaccgggtagagaactacaacccgcggcagcgcaagctccgcaacctgatcatcgaggacgagaagatggtggtggtggcgctgcagccgcctgcagagctggaggtgggctcggcggaggtcattgtggagtccctggcccagggcggcctggcctcccagctccccggccagagactgtgtgcagaggagagcttcaccggcccaggtgtcctggagccctccctcatcatcacagctgctgtccccgaggactgtgacacatagcccattctggccaccagagcccacttggccccacccctcaataaaccgtgtggctttggactctcgt

SEQ ID NO: 221668 - DNA, 1000 bp, Homo Sapiens
actaatgatgcttttatagctgcttggattctctgagaaatgatggggagtgagtgatcactggtattaactttatacacttggatttcatttgtaactttaggatgtaaaggtatattgtgaaccctagctgtgtcagaatctccatccctgaaatttctcattagtggtactggggtgggatcttggatggtgacattgaaactacactaaatcccctcactatgaatgggttgttaaaggcaatggtttgtgtcaaaactggtttaggattacttagattgtgttcctgaagaaaagagtccaggtaaatggtatgatcaataaaggacaggctggtgctaacataaaatccaatattgtaatcctagcactttgggaggccaaggcgggtggatcacaaggtcaagagatagagaccatctttgccaacatggtgaaactccatctctactgaaaatacaaaaattagctgggcgtggtagtgcaagctgaaggctgaggcaggagaatcactcgaacccgggaggcagaggttgcagtgagccgagatcacaccactgtactccagcccggcactccagcctggcgacaagagtgagactccacctcaaaaaaaaaaaaaagaatccaatactgcccaaggataggtattttatagatgggcaactggctgaaaggttaattctctagggctagtagaactggatcccaacaccaaactcttaattagacctaggcctcagctgcactgcccgaaaagcatttgggcagaccctgagcagaatactggtctcaggccaagcccaatacagccattaaagatgacctacagtgctgtgtaccctggggcaatagggttaaatggtagttagcaactagggctagtcttcccttacctcaaaggctctcactaccgtggaccacctagtctgtaactctttctgaggagctgttactgaatattaaaaagatagacttcaaaaaaaaaaaaaaaaaa

SEQ ID NO: 221669 - DNA, 1000 bp, Homo Sapiens; identical to SEQ ID NO: 116396

SEQ ID NO: 221670 - DNA, 1000 bp, Homo Sapiens
tgggcctctcctacgatggcctgctgggtgacaatcagatcatgcccaaggcaggcctcctgataatcgtcctggccataatcgcaagagagggcgactgtgcccctgaggagaaaatctgggaggagctgagtgtgttagaggtgtttgaggggagggaagacagtatcttgggggatcccaagaagctgctcacccaacatttcgtgcaggaaaactacctggagtaccggcaggtccccggcagtgatcctgcatgttatgaattcctgtggggtccaagggccctcgttgaaaccagctatgtgaaagtcctgcaccatatggtaaagatcagtggaggacctcacatttcctacccacccctgcatgagtgggttttgagagagggggaagagtgagtctgagcacgagttgcagccagggccagtgggagggggtctgggccagtgcaccttccggggccgcatcccttagtttccactgcctcctgtgacgtgaggcccattcttcactctttgaagcgagcagtcagcattcttagtagtgggtttctgttctgttggatgactttgagattattctttgtttcctgttggagttgttcaaatgttccttttaacggatggttgaatgagcgtcagcatccaggtttatgaatgacagtagtcacacatagtgctgtttatatagtttaggagtaagagtcttgttttttactcaaattgggaaatccattccattttgtgaattgtgacataataatagcagtggtaaaagtatttgcttaaaattgtgagcgaattagcaataacatacatgagataactcaagaaatcaaaagatagttgattcttgccttgtacctcaatctattctgtaaaattaaacaaatatgcaaaccaggatttccttgacttctttgagaatgcaagcgaaattaaatctgaataaataattcttcctcttcaaaaaaaaaaaaaaaaaaaaaaaaaaaaaa

SEQ ID NO: 221671 - DNA, 1000 bp, Homo Sapiens
gcctctcgtgcgatagcatgctgggtgatggtcatagcatgcccaaggccgccctcctgatcattgtcctgggtgtgatcctaaccaaagacaactgcgcccctgaagaggttatctgggaagcgttgagtgtgatgggggtgtatgttgggaaggagcacatgttctacggggagcccaggaagctgctcacccaagattgggtgcaggaaaactacctggagtaccggcaggtgcccggcagtgatcctgcgcactacgagttcctgtggggttccaaggcccacgctgaaaccagctatgagaaggtcataaattatttggtcatgctcaatgcaagagagcccatctgctacccatccctttatgaagaggttttgggagaggagcaagagggagtctgagcaccagccgcagccggggccaaagtttgtggggtcagggccccatccagcagctgccctgccccatgtgacatgaggcccattcttcgctctgtgtttgaagagagcaatcagtgttctcagtggcagtgggtggaagtgagcacactgtatgtcatctctgggttccttgtctattgggtgatttggagatttatccttgctcccttttggaattgttcaaatgttcttttaatggtcagtttaatgaacttcaccatcgaagttaatgaatgacagtagtcacacatattgctgtttatgttatttaggagtaagattcttgcttttgagtcacatggggaaatccctgttattttgtgaattgggacaagataacatagcagaggaattaataatttttttgaaacttgaacttagcagcaaaatagagctcataaagaaatagtgaaatgaaaatgtagttaattcttgccttatacctctttctctctcctgtaaaattaaaacatatacatgtatacctggatttgcttggcttctttgagcatgtaagagaaataaaaattgaaagaataaaaaaaaaaaaaaaaaaa

SEQ ID NO: 221672 - DNA, 1000 bp, Homo Sapiens
tctgcattccttccggggggagcctgtcctcagaggggacaacctgtgacaccctgagtccaaacccttgtgcctcccagttcttccaagtgtctaactagtcttcgctgcagcgtcagccaaagctggcccctgaaccactgtgtgcccatttcctagggaaggggaaggagaataaacagaatatttattacaaatgttagaatatatttcttatactaggaatctcatttgcatttgcatagactatacacatggggtggaaaggccaggcctgcccccatctcgttggtgtggctctgcgtatactacacactcattctcctgctcctcttttcccttagtcagtgtcctttcatcctgattcagctctgccttgcatcaccctcagcctaagggagtgggaaggaaatggggtgttttcttgctgacctgaggctatagggtcacttgccatttcctaccttctctgggggatttgagggtagaggcaggggaagatctgttgttgcagttgcttctgcccccttgatccaaatgaccatcatctctgatggagatgggttgggtacctggccttcatggcaccttcactgctagggatgctcaaggggcaggcctggggcccttccctcctgtctcttctcggtctttcctctctgagcagcctcctacctcccctgcctgagccctcactccacagccctcccaggtacctagcagaggctgtcagtccttggctcacctggaacagggctggggctgggttggaacaggtgtgtgcccccaccacagctctatgactctgttctccctccctgccattgtggactcttgtatttgagggacctcaagagagtgaggaccctaccatccactgtccatattcagtcccagccccagtgcgcttcctctgttccctccctcagccatccaattcttgagttttctcactgattggttttctttctttttccttggattaaatgtgaaagcaaag

SEQ ID NO: 221673 - DNA, 1000 bp, Homo Sapiens
tgttgggggagcgcaggcagcgagcccccaactgaggccccagctcccagccctgggcggccgtatcatcaggtgctcctgtgcatctcggccagcacgggagccagtgccgcgcaggaatgtggggtcccctgtgttccctcgccagaggagcacttggcaaggtcagtgaggggccagtagacccccggagaagcagtaccgacaatgacgaagataccagatcccttcccaacccctttgcaccggtcccactaaggggcagggtcgagagaggaggggggatagggggagcagacccctgagatctgggcataggcaccgcattctgatctggacaaagtcgggacagcaccatcccagccccgaagccagggccatgccagcaggccccaccatggaaatcaaaacaccgcaccagccagcagaatggacattctgacatcgccagccgacgccctgaatcttggtgcagcaccaaccgcgtgcctgtgtggcgggactggagggcacagttgaggaaggagggtggttaagaaatacagtggggccctctcgctgtcccttgcccagggcacttgcattccagcctcgctgcatttgctctctcgattcccctttcctcctcactgcctcccaagcccaccctactccaaaataatgtgtcacttgatttggaactattcaagcagtaaaagtaaatgaatcccacctttactaaaacactttctctgaaccccccttgcccctcactgatcttgcttttccctggtctcatgcagttgtggtcaatattgtggtaatcgctaattgtactgattgtttaagtgtgcattagttgtgtctccccagctagattgtaagctcctggaggacagggaccacctctacaaaaaataaaaaaagtacctcccctgtctcgcacagtgtcccaggaccctgcggtgcagtagaggcgcaccaaaaaaaaaaaaaaaaaaaaaaaaaaaaaaaaaaaaaa

SEQ ID NO: 221674 - DNA, 1000 bp, Homo Sapiens
aactatgaaggaagattggaagcagtttcaaggaaacagggagctcaattcaaagaataccggcctgaaactggttcttgggtgtttaaggtctcccatttttctaagtatggccttcaggattctgatgaagaggaggaggagcatccgtctaaaactagtacaaagaagttgaagactgctcctttgcctcctgcaagccagactacgcccttgcagatggctcttaatggcaaacctgcacctccacctcaggtagagaaaaaaggacagtgaatttgaatggaatccgtgataccgaagttgaaagcaagtcattcagctaatacaaagctgttttatgacccttggaactttgaagagtacaaacattggcaatcacgttgaaacaagtgcaagggagggcgtgaggtcttgcaggcatctgtctttttactggagagatttaaagaattctcttgctgtttggattattcctctacagattgtcatttttaaaccctttgttctctctcatttggacttgctgaattctctgctcagtgattaacttaagatttgctcatgtgggttcatgcacagtaaattctgcctttattgactacctgatgtgcagtttaatctttttctttacctccatggttttttaaaagttaaattagctttctgaaagggtttttaatctccatttttttaaagttgtttgcttatacttcgggtaaccttgatatttgtattttaatagtacataatctttatgaaaaatagtttgggaatgtaaatgaattattatttggcttggggagattagggcctacattgtttatcgcaattacttgtatcattgatacgggatttctttgtaaagcatcctctacctctcagctgctgaaagctagacctttggtattttccatgctataattcttatggctgctgaaatgtgtggtttttatgatttattaaataatctcttaggaggcatttctgaaaaaaaaaa

SEQ ID NO: 221675 - DNA, 1000 bp, Homo Sapiens
ctacaactttttaaaaatgtctattaatattccatcgtatagatgtgatataatttgcttgatggttgtcttcttaaaaagaaagatagcaaatactttttttaaattacaaaagtgatagatgttcattgtagaaaatgtaataaacactgttaagacttaaaagccatataattccaccaaccaaaattaatcccttttgtcatatttctagtcatttttatagcctttttttctatgtatttataataattatcatttgcgtttttttcctttttttaactttaaaaatgtatattctagggtcaggggaaatgtaatctggaattaaatattagccttaaaattcacaattttgattttcctggcttttcaggaattgactaactgtaaaagagtcttgaaagtatttagtcaacaaacagggtgcattttttttttttttgactaagaaagctcgttgtagtagaaagggtggaatgtattgaaaattattagaagcagggaagtattgttagtctagcttatttcctttcagtcttttttcaatatttttataaacattgagtacttactgaatttagttctgtgctcttccttatttagtgttgtatcataaaatactttgatgtttcaaacattctaaataaataattttcagtggcttcataatatttcatcatttggatatataataatttatttaaccagtctctttatttttatttatttattttgtttgttttctttgagatggagtctcgctctgtcacccaggctggagtacaatagcgtgatctcggctcactgcaacctccacctcctgggttcaagcagttctcccgcctcagcctcctgagtagctgggcacggtgttgtacctctagtcccagctacttgggaggcttagtcaggaggatctcttgagcctgggaggtcaaggctgcagtgaaccatgattgcactccaacctgggcgacagagaccctgtctcaaaaaa

SEQ ID NO: 221676 - DNA, 1000 bp, Homo Sapiens
agagactatcttctggagttgagtacaagcacagaaacatctttacggtggcatcatctcattttttaggaagacatgataatactgcccatcatattcatgtgtaactactgttctttcttctgctttcttcaccataataaactttggacaaccaagcaagctctaaccgcaatgccagatggccttgtccgagggcctagtgtttgcacggcagtgggaactgggcctttcctacaggacaactggcaagtttgctgggaagtcaaataatacattccacctggcagctgaaggcagccagtcagtctgtcccagaaagggcccttttcagcacccaaagctgggctggctgggatgcctctggctggtgaagttctcacataggctgatttaaatccagcaaaggtctatagaaaaaggcttgcgtgttcgttgagtaatcattgtttcattttcatttttacgagagtttgaaaatagacacactgttaacacttctgccagttttttctgatctttccagccccaccccctttctctttctctctctctctcaaagaaaaaaaaaatgggagtgcaaaaaaaacaaagccaaaaaatatatgaaggatagctgttcttctgtgttctctcattatggactttgtgaagtagaaacataattttttttcctccaaaggtgaaaaaacaatgcattcttgctttaaaaaaaaaaaagaaggctaaaaaattacctctttttaaattatgtgcaaaataattctggctaactgtaaaatgtattcaattttaggattttttttttttgtattgtgatgctttatttgtacatttttttcctttctggatgtaattttaatctcttgccattcattagtgttatttcattgtaaacgttattgtgccaaatgtactgtattcaaaaggatgtgaatgtgtattgtttcagaacctaataaatacaatgacgttaagtcttaaaaaaaaaaaaaaaaaa

SEQ ID NO: 221677 - DNA, 1000 bp, Homo Sapiens
cagcccccctcctatttcagcctcctgcacccaaggcagtgcctgagaagcccatcatagacaagaagtagcaaactgtacattccttcttcctccccctgctccagaaggtgccggtactgaagatgctccagtaattggtgacccaaccctaggaagtagggagaaatgaaggaagggcataggaaaattttcccagtaaatcccctgatggtcacattaaggtaaaggttttggctggtcagtgtgccaagacctctccagcttctcattcatgatgacctctcaaagttgggaaacaagctgatttcttgccaagaggtctcccaggagatatttgggaaatgtgaagttcgtatctttaaggagcatttttggtcagcatggttgatgaactaatgatgagagagttaaggaatgttgctagaacatagggcttgctggtacctatgtgactaagaaagggacatgatgtaagggaaaaggcctcaaattcttgtgaatgtggacattctcgttaatattcttttgggctaatagtgacatagtgtgcagaggtgtaccagggatcatgggggatttcctagcactagtatgcttctagttttagataactccctcctttattccctggccccttgtattttccttatcttcctctttcaagacccctacccattttgcctatccgtaggctggggcttgtgtctttgtcattgtctggttcttaagagtcccagctccaggtggcgtcctccctgcctctccgtcttgtaatgagttgtagtatttactcttaacataggatcatttggaacaggagttctgaggaggagagagtgagggttttgctattgactgacttgaacgatggcttctcctcaagctgtaggctccagagcttcctaacctagtaaaatgtcaagaacagacgggagatattagtgtctttccctctatcattaaaggtgttttaaccaaaaaaaaaaaaaaaaaaaaa

SEQ ID NO: 221678 - DNA, 1000 bp, Homo Sapiens
tcaaataattctacaagtaaaaggaaatctgagtctgccacttgcaacttagtcagagacataaacaaagtgggaattggccttgttgctgccgcttcatctccgcttcttgtgaaagatgtcatttgtgaggatgataagggaaaaatcatggaagaagtaatgagaacttatttaaaacaacaggaaaaactaaacttgattttgcaaaagaagcaacaacttcagatggaagtaaaaatgttgagtagttcaaaatctatgaaggaactcactgaagaacagcagaatttacagaaagagcttgaatctttgcagaatgaacatgctcaaagaatggaagaattttatgttgaacagaaagacttagagaaaaaattggagcagataatgaagcaaaaatgtacctgtgactcaaatttagaaaaagacaaagaggctgaatatgcaggacagttggcagaactgaggcagagattggaccatgctgaggccgataggcaagaactccaagatgaactcagacaggaacgggaagcaagacagaagttagagatgatgataaaagagctaaagctgcaaattctgaaatcatcaaagactgctaaagaatagaaactgttaaagagattcatctgtgtattactgacaaggttttttttgtttgttgcttgctttggtaatcgaattctgaagaatttatctgcatgacgataactaggcattctatccatttgtagatcagagaaagtgaagagattatatattagtacttaaatttttacattttccaaatgaatgaaaatgtatgtttctttgtacttttttaaaaaaatcagcttagtaacaatactatatggtttcaactagtaggtaatctgcttatatttctaatgcaaacttaacaattgtgtactttttaaaagctgcaatatgtgatggaaaaaaaaaaaaaaaaaaaaaaaaaaaaaaaaaaaaaaaaaagaaaaaaaaaaaaaaa

SEQ ID NO: 221679 - DNA, 1000 bp, Homo Sapiens
gaggtgtttcaggaatactacgggcttcctccaccccctggagccattggaccctttctacggctcaaccctggagacattgtggagctcacgaaggctgaggctgaacagaactggtgggagggcagaaatacatctactaatgaaattggctggtttccttgtaacagggtgaagccctatgtccatggccctcctcaggacctgtctgttcatctctggtacgcaggccccatggagcgggcaggggcagagagcatcctggccaaccgctcggacgggactttcttggtgcggcagagggtgaaggatgcagcagaatttgccatcagcattaaatataacgtcgaggtcaagcacattaaaatcatgacagcagaaggactgtaccggatcacagagaaaaaggctttccgggggcttacggagctggtggagttttaccagcagaactctctaaaggattgcttcaagtctctggacaccaccttgcagttccccttcaaggagcctgaaaagagaaccatcagcaggccagcagtgggaagcacaaagtattttggcacagccaaagcccgctatgacttctgcgcccgagaccgatcagagctgtcgctcaaggagggtgacatcatcaagatccttaacaagaagggacagcaaggctggtggcgaggggagatctatggccgggttggctggttccctgccaactacgtggaggaagattattctgaatactgctgagccctggtgccttggcagagagacgagaaactccaggctctgagcccggcgtgggcaggcagcggagccaggggctgtgacagctcccggcgggtggagactttgggatggactggaggagcgcagcgtccagctggcggtgctcccgggatgtgccctgacatggttaatttataacaccccgatttcctcttgggtcccctcaagcagacggggctcaagggggttacatttaataaaaggatgaagatgg

SEQ ID NO: 221680 - DNA, 1000 bp, Homo Sapiens
gcacaggcaaagatttcatgacgaagacgccaaaaacaattgcaacagaagcaaaaattcacaaatgggatctaattaaactaaagagctgcacagcaaaagaaactatcaagagagtaaacagacagcttacagaatgggagaaaattgttgcaaactatgcatctgagaaaggtctgaaatccagcatctatacgtaatttaaacaaatttagaagaaaaaaccaccccattaaaaagtgggcaaaggacatgaacagacacttttcaaaagaagacatctgtggccaacaatcctatggaaaaaagcccagcatcactgatcattagagaaatgcaaatcgaaacaacaacgagataccatctcacaccagtccaaatggctattataaaaatgtcagaaaataacagatgctggtgaggttgtggagaaaaagatatgcttatacactgttggtggaaatgtaaattaaattagttcagccattgtggaagacagtgtggggataaagacagagataccattcaacccagcaatctcattactgggtatatacccaaaggaatagaaatcattgttataaagacacatgcacgcgtatgttcgttgcagcactgcccatcagtgacagactggattaaaaaaatgtggtacatacacaccagggaatactatacagccataaaaaggaacaagactgactgggcgtggtggctcatgcctgtgatcctagcactttgcgaggccgaggtgggtggattgcccgcgctcaggaggtcaagaccagcctgggcaacacggtgaaaccccatctctattaaaatacaaaaaattagctgggcatggtggtgcgtgcctgtagtgccagctactcaggaggccgaggcaggagaattgctggaacccaggaggtggaggttgcagtgagctgagatcgcgccattgcactcccgcctgggcgactccatctctaaaaaaaaaaaaaaaaaaaaaaaaaaa

SEQ ID NO: 221681 - DNA, 1000 bp, Homo Sapiens
gctgacagggtcaagccaccctgcccaccaccctcccacttcccctcccctttcctctccagcattaggattcaagggaaatctgcatgaagccaattttgagggtagacgtgtggggaaaataaatcattatacagtaagacctggggcttgaggggtggggaatggggagggaagggcatagcctgctcctccatgagtctgacatctcggaaactgagcagctgccggacgcctgggtcaggaatccaagaccccacctcttaaggactggttcctcagaaagcaccctcagggaaaaaggtgaaaacattacatccgtggattctcctgccacaaccgcattggaagaaaaggctgccgcaacatctcagcgaggagtgaaggacccatgtcccaggaaccgcgctgcgccacctgcactcacccccctcacattctcttaagcacccggtggccctccgaggcctggcggaatggtggtgcccacggggttgggcaagggctcaccaggacctcaacgggcaaagttgtgcacactaaaatatcaaatcaaggtgcttggttttaaagtaaatgtttttctaaagaaagctgtgctcttctgttgacccagacgaatagggcacagccctgtaactgcacgtgccttctgtcattgggaatgaaataaattattacgagaaagggacttgtcctaactggtttgaggccttacagttttgtatctacatttttcccctcctggggtttgcggggacagggacagaactacaggagtcatgggaaagaaaattctggcttcactactgctcactgctcactttctgatcactctgatactttttttttttttttttttttgcaacctgataccttgaaaagcttctatgtgtctctccttttgttgcctggcagctgtctaggatgatcactgattactatttactaagtagccacatgcaaataaaagttgtttggtaaaaaggaaaaaaaaaaa

SEQ ID NO: 221682 - DNA, 1000 bp, Homo Sapiens
acccatctgcaaaatcccggaaggagccaaggagggggacacaggcagtaccagtggcaccagcagcccaccagccccctgccgccctgtaccttgtatctccctttccccagggcctgtgcttgaacctgaggcactgcacacccccacactcatgaccacaccctccctaactcctttcacccccagcctggtcttcacctaccccagcactcctgagccttgtgcctcagctcatcgcaagagtagcagcagcagcggagacccatcctctgacccccttggctctccaaccctcctcgctttgtgaggcgcctgagccctactccctgcagatgccaccctagccaatgtctcctccccttcccccaccggtccagctggcctggacagtatcccacatccaactccagcaacttcttctccatccctctaatgagactgaccatattgtgcttcacagtagagccagcttggggccaccaaagctgcccactgtttctcttgagctggcctctctagcacaatttgcactaaatcagagacaaaatatttcccatttgtgccagaggaatcctggcagcccagagactttgtagatccttagaggtcctctggagccctaaccccttccagatcactgccacactctccatcaccctcttcctgtgatccacccaaccctatctcctgacagaaggtgccactttacccacctagaacactaactcaccagccccactgccagcagcagcaggtgattggaccaggccattctgccgccccctcctgaaccgcacagctcaggaggcgcccttggcttctgtgatgagctgatctgcggatctcagctttgagaagccttcagctccagggaatccaagcctccacagcgagggcagctgctatttattttcctaaagagagtatttttatacaaacctaccaaaatggaataaaaggcttgaagctgtgaaaaaaaaaaaaaaaaaaaaaaaaa

SEQ ID NO: 221683 - DNA, 1000 bp, Homo Sapiens
agccagttttgaacatgagaactcctgatacagcaaagaaaaccaagagtcagacacatcgagggtcttcgccaggacccagaccggtagagggaacccctgccagcagaacccaagaccccagcagccccggcacgactccccctcaggccagacaggccccagccccaacagtcatcagggaccctccctccatcactcctgctgtcaaaagccccttgccggggccttcggaggagaagaccctgcagcccagtagtcaaaacacaaaagcccacccatcccggagggtcactctgaacacactgcaagcctggagcaagacaacaccccggagaataaacttaacacccttaaagacggacactccaccaagttctgtaccaaccagtgtgatttccaccccttctacagaagaaattcagtcagagacgcctggagacgctcagggcagtcccccagagctaaagcggcccagactcgatgaaaacaaaggaggcacggaaagtctggacccttgatgggacctcggcttctgctcgaagcctaccaggctcccggtgtgtgcagggagacggtaaagctggaggtgcctgagaccagggcttccatggagcgggacacactgtaaatggatttctataacagaagtgacatgtgtactgatttttctccagaaatatggatgctgttgtattcagtatccatttttaacttgggacatgaacgttttaacgtagtaaatcctctttttgatgagtttctgaaactggagcggttcaacgttatccagtgtgaaaatcagtgagtcctccctggcatcctcgtgaaagtgcacacacttcatggagggactccttttcaataagaattaggaagatgagaaagtaatttgagattttactctgtcgaattttagagtatttgaagtgattgttagatttcacttctaaggagttgattgattaaactttggaaggtaaaaaaaaaaaaaaaaaaa

SEQ ID NO: 221684 - DNA, 1000 bp, Homo Sapiens; identical to SEQ ID NO: 116404

SEQ ID NO: 221685 - DNA, 1000 bp, Homo Sapiens; identical to SEQ ID NO: 116406

SEQ ID NO: 221686 - DNA, 1000 bp, Homo Sapiens; identical to SEQ ID NO: 116407

SEQ ID NO: 221687 - DNA, 1000 bp, Homo Sapiens
aacttatataaaatagacttactgcagttacttttgacccatgtgcaaggattgtacacgctgatgagaatcatgcactttttctcctctgttaaaaaaaatgataaggctctgaaatggaatatattggttagaatttggctttgggagaagagatgctgccatttaaccccttggtactgaaaatgagaaaatccccaactatgcatgccaaggggttaatgaaacaaatagctgttgacgtttgctcatttaagaatttgaaacgttatgatgacctggcaacaaaaagtaatgaagaaaattgagacctgagtgaagataagaaatgatctttacgtggcaaaatgaacacatcttgagtatttaggaaatgggcagtgaaggctaagaacctggtgtgtttcttgggatcatggtacatttatcactgaattaagccatcagggaaaaaacaacaaaaaaagagaacacctccagcttttctttttctgtatatactcatgtcccccagattccaacatttctcactgaaagggggcatgtatgcaaacctcatctttctccttcattaatgatgatcttcagattaaaccctttggtgctaggagctgacaatttccaaagcagcctgtgaagtcctaggggctgggggccactcttgcggcaagcagaaggccatcctactccgcggagtgatcatggaaatgtattttagttaaactctgacagctcccaaacggaagactacagcatgacgtagtattatgattgcattgtatgaaagagcaagtgactttctaagtaggatgaatcatattcatatgcagatgtcttagcctcttgacgctggaagtgtggatttatagctatgaaaccactgctggcagtgggtgggccactgggactgacgggggttaaagggcattttactaaggcagctaagacatattcagacatcaacgttatccttctttttcatatttctacctgagtgaag

SEQ ID NO: 221688 - DNA, 1000 bp, Homo Sapiens
tcttggtcacgaccgtgctcaacctcgagccgctggacgaggatctcttcagaggaaggcattactgggtaccggccaagaggctgtttggtggtcagatcgtgggccaggccctggtggctgcagccaagtctgtgagtgaagacgtccacgtgcactccctgcactgctactttgttcgggcaggggacccgaagctgccagtactgtaccaagtggagcggacacgaacagggtcgagcttctcggtgcgctctgtgaaggccgtgcaacatgggaagcccatcttcatctgccaggcctccttccagcaggcccagcccagccccatgcagcaccagttctccatgcccactgtgccaccaccagaagagctgcttgactgtgagaccctcattgaccagtatttaagggaccctaacctccaaaagaggtacccattggcgctcaaccgaattgctgctcaggaggtccccattgagatcaagccagtaaacccatcccccctgagccagctgcagagaatggagcccaaacagatgttctgggtgcgagcccggggctatattggcgagggcgacatgaagatgcactgctgcgtggccgcctatatctccgactatgccttcttgggcactgcactgctgcctcaccagtggcagcacaaggtgcacttcatggtctcactggaccattccatgtggttccacgcccccttccgagctgaccactggatgctctatgaatgcgagagcccctgggccggtggctctcgggggctggtccatgggcggctgtggcgtcaggatggagtcctagctgtgacctgtgcccaggagggcgtgatccgagtgaagccccaggtctcagagagcaagctgtagccagaggtaccagcttcgcctggggcttcaagaacctcccatctatccccattcctgagacaggagttacagtcccttttggccctcacatccaataaagagactgataccactgg

SEQ ID NO: 221689 - DNA, 1000 bp, Homo Sapiens; identical to SEQ ID NO: 116411

SEQ ID NO: 221690 - DNA, 1000 bp, Homo Sapiens; identical to SEQ ID NO: 116412

SEQ ID NO: 221691 - DNA, 1000 bp, Homo Sapiens; identical to SEQ ID NO: 116414

SEQ ID NO: 221692 - DNA, 1000 bp, Homo Sapiens
ggtgttgtcagcccatgcttatccctctctctacctgtgacaaaatggaaagctggtgatttttcaagctacgtgtacatatttgaaaattttgtaaatggttttcctaaacattaatgacagaagtatttatacttcattttgtgactttgtaaataaagcgacggcttttgtttcagtagagttgtgtttactatgcattgttttgtgtttattatacaatgttacaaatatgcagaccgtgttgtttgctccagtgataccttgttaagctaggtggctgagtcgcttatggttttaatgcaatgagcaatgtggatatgaccaagagttgttgtgcaagttgacaaatgccaaatagaaaaccacttggccatttatttctatgttcactaaaaatcctattgccttgtgtgattcttaatctcttttgcgaacctttcagtctccgctagctctttcctaatgagctttacagcagaagctgttttatcgttaagtgccccacagagacactttaccaggaggctgggagagttctccagatttgggagaggcgcagagacagtgtgtgagccgagccctgtctcagcaatccacctggaggagctagagtatcctcctccctttaccattcagaccgagagaaaaagcccagcttgtgtgcaccctcgtggggttaaggcgagctgttcctggtttaaagcctttcagtatttgttttgatgtaaggctctgtggtttgggggggaacatctgtaaacattattagttgatttggggtttgtctttgatggtttctatctgcaattatcgtcatgtatatttaagtgtctgttatagaaaacccacacccactgtcctgtaaacttttctcagtgtccagactttctgtaatcacattttaattgccacctcgtatttcacctctacatttgaaatctggcgtctgtttcaagccagtgtgttttttcttcgttctgtaataaacagccaggag

SEQ ID NO: 221693 - DNA, 1000 bp, Homo Sapiens
gagcatcaaacaaatattttacttaaattttattttatcttatttttaggtgcttttaatctcaaaattctgaaaagcgaatagcagtgttttcagaaacaaatgtgaaagcagtcaaattaagtagatactatttagaaatgtaaaatactctccagatctaccattaatagaaaataaactaaaccttatattttatttttgccaaaatattttattataaaatatgaccaaaatatttaaaatgcacaatgcttttaacttaaatgtgctaaccctgtttctgtctgttttgtgctgtaccttttctgattcagaattatagaaaacttgataaatacttgattttaaccaatgagactacaggcagatgggactaagtgtttatgggacaattatgtactatttaacttaaatatattttgtttaataggaaatatataataatagcattttatgtaataaaatatgggcaacgattatcttggaaattaaagagtcaaagcaaagaaatgaagggctggtaaaatgaattttgtaatatcctcaggatacttttatcttaaaagtatgttgttaaagattttgtaaattgtatttcaacaattttaaatgtgttgagcaagttgcagtgcaaacactgtcattatgtagagagtttatatgcacataataacctgtacctataaatcgtgcaataaccatatgcgactattttgccatggagaaatctgacagcattgcaaacaatagtattgtttgatgtagttaaccttaagttatttttcagtaatttcttcacaaatcaagattcaaacagctttaaacacttccaatgagataaaatatttactattatgcttattagaacaaaaggtgtttaaggatgaactaaatattttaattgagcatttatatggataatcatacattatgtaagcccatatgtatttacatccagagtcataatattttaaataaacaatcatgcagaaacttt

SEQ ID NO: 221694 - DNA, 1000 bp, Homo Sapiens
ctctaataataagtcagtgttaaaattttagtaggtccgctagcagtactaatcatgtgaggaaatgatgagaaatattaaattgggaaaactccatcaataaatgttgcaatgcatgatactatctgtgccagaggtaatgttagtaaatccatggtgttattttctgagagacagaattcaagtgggtattctggggccatccaatttctctttacttgaaatttggctaataacaaactagtcaggttttcgaaccttgaccgacatgaactgtacacagaattgttccagtactatggagtgctcacaaaggatacttttacaggttaagacaaagggttgactggcctatttatctgatcaagaacatgtcagcaatgtctctttgtgctctaaaattctattatactacaataatatattgtaaagatcctatagctctttttttttgagatggagtttcgcttttgttgcccaggctggagtgcaatggcgcgatcttggctcaccataacctccgcctcccaggttcaagcaattctcctgccttagcctcctgagtagctgggattacaggcgtgcgccactatgcctgactaattttgtagttttagtagagacggggtttctccatgttggtcaggctggtctcaaactcctgacctcaggtgatctgcccgcctcagcctcccaaagtgctggaattacaggcgtgagccaccacgcctggctggatcctatatcttaggtaagacatataacgcagtctaattacatttcacttcaaggctcaatgctattctaactaatgacaagtattttctactaaaccagaaattggtagaaggatttaaataagtaaaagctactatgtactgccttagtgctgatgcctgtgtactgccttaaatgtacctatggcaatttagctctcttgggttcccaaatccctctcacaagaatgtgcagaagaaatcataaaggatcagagattctg

SEQ ID NO: 221695 - DNA, 1000 bp, Homo Sapiens; identical to SEQ ID NO: 116424

SEQ ID NO: 221696 - DNA, 1000 bp, Homo Sapiens
tagaactcttcttgaattctacagcaggagcaagcggtggtgcttatggtagccaaatgatgggaggcatgggcttgtcaaaccagtccagctacgggggcccagccagccagcagctgagtgggggttacggaggcggctacggtggccagagcagcatgagtggatacgaccaagttttacaggaaaactccagtgattttcaatcaaacattgcataggtaaccaaggagcagtgaacagcagctactacagtagtggaagccgtgcatctatgggcgtgaacggaatgggagggttgtctagcatgtccagtatgagtggtggatggggaatgtaattgatcgatcctgatcactgactcttggtcaacctttttttttttttttttttctttaagaaaacttcagtttaacagtttctgcaatacaagcttgtgatttatgcttactctaagtggaaatcaggattgttatgaagacttaaggcccagtatttttgaatacaatactcatctaggatgtaacagtgaagctgagtaaactataactgttaaacttaagttccagcttttctcaagttagttataggatgtacttaagcagtaagcgtatttaggtaaaagcagttgaattatgttaaatgttgccctttgccacgttaaattgaacactgttttggatgcatgttgaaagacatgcttttattttttttgtaaaacaatataggagctgtgtctactattaaaagtgaaacattttggcatgtttgttaattctagtttcatttaataacctgtaaggcacgtaagtttaagctttttttttttttaagttaatgggaaaaatttgagacgcaataccaatacttaggattttggtcttggtgtttgtatgaaattctgaggccttgatttaaatctttcattgtattgtgatttccttttaggtatattgcgctaagtgaaacttgtcaaataaatcctccttttaaaaactgc

SEQ ID NO: 221697 - DNA, 1000 bp, Homo Sapiens
aattaattcatcccttaatttaagtcattttcatgtgtgtgagtttgctggttgtaaatactttgtcctaagagatttatctttatacagattttctagaaatgtttaggttactaaaacagggtgggcaaactctctaaactggtacaattttataggtgaaagaaaaaattccctcatttaaacccaatcagatgcctcagagggtagccttgatttgttcttacagttaagaagccctgcagagcacaaacttcagaaacccggcttcctgtgctaagtctttcccaatctctacccctttcttctcgggccaccctctgtttaaaatttgtgctgggttattcagaacctaaaagtattattcaaaccaatttcttccttccacagttatcttagctggatataatgtattttcagctcaattgttaatgtgatggatggcacaatgaatgtatattttgtgttattcgtgaatagtcttttgcatgtcgcacaatgtttgatgtccccaaagtaccacactgagttctatcagttatcctttgtgagcctatgatattccccatttcctgtacaatcatgaacagctctgagatcctggagtgatatgatccagagcagagtttacgggtcttaggatgtctgtaataaataaatatactcaagtttcaggtatgcttaagcatccgtgtatttggctgggctacaatttgttaattcctatgaagttggcacatttcatgaggggaaagggagaagggtggtaaatattttcaaagagatgggccttttcttgaataaaagttaataacagctcctttattataatcaaagctcataatggaaaaaaagactgatgaagaaatttatgaagcagatttatttttgaaacaaacatggatacttcctgggtcaagtgctaaccttttcacctccaactggatgttgacgtatatataaacagaactcccttcaaaagccaaaaaaaaaaaaaaaa

SEQ ID NO: 221698 - DNA, 1000 bp, Homo Sapiens
tccatcctgcgggagagtgaacctgcccccgcctccgtcacagccctcacggacgccaggggccacacggacaccgagggccggcctccctcccccccgcccacctccacccctgaaaagtgcctcagcgtagcctgcctggacaagaatgagctcagtgaccacttggatgctatggactccaacctggataacctgcagaccatgctgagcagccacggcttcagcgtggacaccagtgccctgctggacctgttcagcccctcggtgaccgtgcccgacatgagcctgcctgaccttgacagcagcctggccagtatccaagagctcctgtctccccaggagccccccaggcctcccgaggcagagaacagcagcccggattcagggaagcagctggtgcactacacagcgcagccgctgttcctgctggaccccggctccgtggacaccgggagcaacgacctgccggtgctgtttgagctgggagagggctcctacttctccgaaggggacggcttcgccgaggaccccaccatctccctgctgacaggctcggagcctcccaaagccaaggaccccactgtctcctagaggccccggaggagctgggccagccgcccacccccacccccagtgcagggctggtcttggggaggcagggcagcctcgcggtcttgggcactggtgggtcggccgccatagccccagtaggacaaacgggctcgggtctgggcagcacctctggtcaggagggtcaccctggcctgccagtctgccttcccccaaccccgtgtcctgtggtttggttggggcttcacagccacacctggactgaccctgcaggttgttcatagtcagaattgtattttggatttttacacaactgtcccgttccccgctccacagagatacacagatatatacacacagtggatggacggacaagacaggcagagatctataaacagacaggctctaaaaaaaaaaaaaaaaaaaa

SEQ ID NO: 221699 - DNA, 1000 bp, Homo Sapiens; identical to SEQ ID NO: 116430

SEQ ID NO: 221700 - DNA, 1000 bp, Homo Sapiens
aaatatttcatgattcacaactaggacctcatatcttcctcatcagtagatggtacgatgcatccatttcagtttgtttactttatccaatcctcaggatttcattgactgaactgcacgttctatattgtgccaagcgaaaaaaaaaaatgcactgtgacaccagaataatgagtctgcataaacttcatcttcaaccttaaggacttagctggccacagtgagctgatgtgcccaccaccgtgtcatgagagaatgggtttactctcaatgcattttcaagatacatttcatctgctgctgaaactgtgtacgacaaagcatcattgtaaattatttcatacaaaactgttcacgttgggtggagagagtattaaatatttaacataggttttgatttatatgtgtaattttttaaatgaaaatgtaacttttcttacagcacatcttttttttggatgtgggatggaggtatacaatgttctgttgtaaagagtggagcaaatgcttaaaacaaggcttaaaagagtagaatagggtatgatccttgttttaagattgtaattcagaaaacataatataagaatcatagtgccatagatggttctcaattgtatagttatatttgctgatactatctcttgtcatataaacctgatgttgagctgagttccttataagaattaatcttaattttgtattttttcctgtaagacaataggccatgttaattaaactgaagaaggatatatttggctgggtgttttcaaatgtcagcttaaaattggtaattgaatggaagcaaaattataagaagaggaaattaaagtcttccattgcatgtattgtaaacagaaggagatgggtgattccttcaattcaaaagctctctttggaatgaacaatgtgggcgtttgtaaattctggaaatgtctttctattcataataaactagatactgttgatcttttaaaaaaaaaaaaaaaaaaaaaaaaaaaaa

SEQ ID NO: 221701 - DNA, 1000 bp, Homo Sapiens
attcgacactggcttctactgaaaatgaaacggattgcagagggaataaatacaaagatggaaagccagtaaagaagtcagtatagaaccactagcgaatagtgttgctctggcacagaccactgtggttgatggcatggccctccaacttggaataggattttccttttcctattctgtatccttaccttggtcatgttaatgactttggagttattcagttaatgaccctttaattctcacaaccaaccagtcatgttgcttgaagccatttatagacgagcttcaaagcaactttaaaagattcttctgtagaagtatgagttcttcctttaattatcattccaactttcagctgtagtcttcttgaacacttcatgaggagggacattccctgatataagagaggatggtgttgcaattggctctttctaaatcatgtgacgttttgactggcttgagattcagatgcataatttttaattataattattgtgaagtggagagcctcaagataaaactctgtcattcagaagatgattttactcagcttatccaaaattatctctgtttactttttagaattttgtacattatcttttgggatccttaattagagatgatttctggaacattcagtctagaaagaaaacattggaattgactgatctctgtggtttggtttagaaaattcccctgtgcatggtattacctttttcaagctcagattcatctaatcctcaactgtacatgtgtacattcttcacctcctggtgccctatcccgcaaaatgggcttcctgcctggtttttctcttctcacattttttaaatggtcccctgtgtttgtagagaactcccttatacagagttttggttctagttttatttcgtagattttgcattttgtaccttttgagactatgtatttatatttggatcagatgcatatttattaatgtacagtcactgctagtgttcaaaataaaaatgttacaaat

SEQ ID NO: 221702 - DNA, 1000 bp, Homo Sapiens
ggaggaagggcttatacttggatccagaaaatatcaacatagccaaagaaaaacaatcaagacatacctccaggagctgtgtaacagcaaccggaaagagaaacaatggtgtgttcctatgtgggatataaagagccggggctcagggggctccacacctgcacctccttctcacctgctcctctacctgctccaccctcaatccaccagaaccatgggctgctgtggctgctccggaggctgtggctccagctgtggaggctgtgactccagctgtgggagctgtggctctggctgcaggggctgtggccccagctgctgtgcacccgtctgctgctgcaagcccgtgtgctgctgtgttccagcctgttcctgctctagctgtggcaagcggggctgtggctcctgtgggggctccaagggaggctgtggttcttgtggctgctcccagtgcagttgctgcaagccctgctgttgctcttcaggctgtgggtcatcctgctgccagtgcagctgctgcaagccctactgctcccagtgcagctgctgtaagccctgttgctcctcctcgggtcgtgggtcatcctgctgccaatccagctgctgcaagccctgctgctcatcctcaggctgtgggtcatcctgctgccagtccagctgctgcaagccctgctgctcccagtccagatgctgtgtccctgtgtgctaccagtgcaagatctgaggctctagtgggaaacctcaggtagctcccgaagatctgtgctttccaacaagtgactacccttgaagcacatccccttctggatctgaaaagagcccttggctcagggcgtctttttccagcccctgaggaaaaggaatgaaccactccctgcccattccctataagaatatcccaagacccaggcaattttgcccctctttcccacatgcccccatatgtctgagccaaactgcactgggggctgccctcatgccaagcaagagcctggaattc

SEQ ID NO: 221703 - DNA, 1000 bp, Homo Sapiens
ccctttcctctcattgtccctgttccctttttgcctgtggatctgtttggccagggtccctggggtcaggaatatttgcaagactcagccagctccttcccagcccagcctcttggggctgggactttctcaccctgcggcaggcacaacagatgctgggacccagtctctgcccaggtcacagcacaagtgcacatcagcactatggggcctatgtcctgcccagagacctctgctccttcctgctcacatccacagtcagggcacggcgcccctcaagaactccagagtcacctgtctcatcggctcccagcaagtgcctctttgtctatgatgtcccccttctctgaggcctggacccacccatctttgtccctggggcctgctcccagccactgaggcccgctctggccaggggagaaggagctgccgtgcgtcttccctgtgccccgtctccctgcttggttctcccctcccttccctggccggctgccatggccaggagctaagtgcctttttgtgtgcaaccacttaccctttctctgaaaaacctgttctcaggaaggatctgataaactcatttactctcaggtgtaagagactgatgagaccttagaagcgaattcctctctggaggccttgctttctagcagaggtcacctgaagtgtgtgaggaggatcatcattttcctcatcccccctcttctcacattaaggtggtggcttgccactcagcagtcctagcttggtgactgggaactgccacatacagggccaggcctaccctccttccccacaagccccctccaacccccacccccatgctctggacctcatggctcctatgagcttggagcatggtgaaccatcagagaatctagaaccaaccaagctaggaacatcagcctggtgccctgttaaccccttaaagctgtggtttacaacttttcaaaaatttaaatcattagaaaaaaaaaaaaaaaaaaaaaaaaaaaaaaaa

SEQ ID NO: 221704 - DNA, 1000 bp, Homo Sapiens; identical to SEQ ID NO: 116437

SEQ ID NO: 221705 - DNA, 1000 bp, Homo Sapiens
ctgatcagagttcctcctacttacaacccagggtgtgaacatgttctccattttcaagctggaagaagtgagcagtgttggagtgaggacctgtaaggcaggcccattcagagctatggtgcttgctggtgcctgccaccttcaagttctggacctgggcatgacatcctttcttttaatgatgccatggcaacttagagattgcatttttattaaagcatttcctaccagcaaagcaaatgttgggaaagtatttactttttcggtttcaaagtgatagaaaagtgtggcttgggcattgaaagaggtaaaattctctagatttattagtcctaattcaatcctacttttcgaacaccaaaaatgatgcgcatcaatgtattttatcttattttctcaatctcctctctctttcctccacccataataagagaatgttcctactcacacttcagctgggtcacatccatccctccattcatccttccatccatctttccatccattacctccatccatccttccaacatatatttattgagtacctactgtgtgccaggggctggtgggacagtggtgacatagtctctgccctcatagagttgattgtctagtgaggaagacaagcatttttaaaaaataaatttaaacttacaaactttgtttgtcacaagtggtgtttattgcaataaccgcttggtttgcaacctctttgctcaacagaacatatgttgcaagaccctcccatgggggcacttgagttttggcaaggctgacagagctctgggttgtgcacatttctttgcattccagctgtcactctgtgcctttctacaactgattgcaacagactgttgagttatgataacaccagtgggaattgctggaggaaccagaggcacttccaccttggctgggaagactatggtgctgccttgcttctgtatttccttggattttcctgaaagtgtttttaaataaagaacaattgttagatgcc

SEQ ID NO: 221706 - DNA, 1000 bp, Homo Sapiens
gaatttctggtcagtatgatgcagcctctgagcagatattgaccagtaagagggtaaataaagtgggggcaacccctggatatgaatgttaccccctaagtctccaatattgcaggtttccctgtataacgtaaacacacttgccctcatgcctcccagaatatgaggtctaattaagaagtcccatcaggtttattttgtaaccaaagtcttttttagaggtcagacttcctaatcaaaggcctgggcctgcagtcctttcatcttaatgcaacttcctttgaaatcaaagaatattttgtctgagagctttaaggatctggtaatagacttcaaaatgttaagtgaaattttttttcctctatttatcaatgatatatttcacttttaaaggaaattttggaggaaaatatagctgctttttgcctaaaaaaccttgtgggtggaaatattcctctgagaatggcttttataggtattttgcctggtaatgtattcattcatgattgcccatattcttgaatgtttcttcattccaatggggtcaggtcaatattatgaaaataatttttatatttatatttgtaactaagaatttatttctccctttactacacgatgtaaattcacgtcaaattcgatgatctgaggatttaaattcacaaaacctgccactacattctggtttacattagttacttcatgctggctggggttagtgaccatttgcatactcttttaaatcaaggaggctgtagtagaggcagttttaagattcttgaaggcaaaatttgaaaaacagtgaatacttctaattgtttccttttagtgccagaactaagacattgtgaagcacttgttagtaaacttaaccttgaaatgtcagactggaaggagtttttatgtctttgtgcatacttctgggtattacagaaacagtctgtaaataacattttaagatgcaaatttaattctgttcacagctgatttatactgattt

SEQ ID NO: 221707 - DNA, 1000 bp, Homo Sapiens
tttcaaagaatctatttacactactatgaatattccactgaagagtcaatgatgtaaatgataaccaccaaatctcaaaaatatactcaccaaaaagtaaaaaagtaaaaaaaaaaaaaaaagaaagaaagaaaagaaagagagagaagtcaacttttcatcttaatatattctagtagtatttattttttccttgtcttggaagtatctcataggtctttaaatgagtaaaacatttttatgccagaaggtgatataatggatgttagtgttttttatttgattttacagtagttttagtcagataatgaggacagagacttcaacttgattctttaccaccattcagcatattttttaattgtcttcattgtatttgcttaatagtggtccagacaagttcaaaacttgttctcagtgaggcattaatatggtgcaaccatgaatatttcaggccaagttattcacttgacagataactagaatgaaacttttctcatgaggctgttgtttggttagcatagccttatttcaaaccttaaaaagttacctgactgaagctactatgacttggtaaggattcttcctctcttgctttcttcctcccttcctttcttcctcttccttcctcctcttcttattttctttcctactttccatcctacctattagtgttgctgtacttggattttttgtaaattaaatcaatgcattatgattttagggaattatgattatattcataaggggaaggctaccagaaaatatatgtggcatccataaaatcttcttttataggggcatattttttaggttgtatttattcgtaaagtgaaatgagataatagagtctttctgtttcatgttaatgaattttcatcagggactgaggtcatagattcttggaaaattcatttgtgactgatctagttttctcagctgtatgcaaagtaatctttcaaagactaggttaagattttttttttaagtctgaagcaat

SEQ ID NO: 221708 - DNA, 1000 bp, Homo Sapiens
gtcacactcatctgctctgcccgcggccatccagaccccaaactcagctggagccaattggggggcagccccgcagagccaatccccggacggcagggttgggtgagcagctctctgaccctgaaagtgaccagcgccctgagccgcgatggcatctcctgtgaagcctccaacccccacgggaacaagcgccatgtcttccacttcggcaccgtgagcccccagacctcccaggctggagtggccgtcatggccgtggccgtcagcgtgggcctcctgctcctcgtcgttgctgtcttctactgcgtgagacgcaaagggggcccctgctgccgccagcggcgggagaagggggctccgccgccaggggagccagggctgagccactcggggtcggagcaaccagagcagaccggccttctcatgggaggtgcctccggaggagccaggggtggcagcgggggcttcggagacgagtgctgagccaagaacctcctagaggctgtccctggacctggagctgcaggcatcagagaaccagccctgctcacgccatgcccgcccccgccttccctcttccctcttccctctccctgcccagccctcccttccttcctctgccggcaaggcagggacccacagtggctgcctgcctccgggagggaaggagagggagggtgggtgggtgggagggggccttcctccagggaatgtgactctcccaggccccagaatagctcctggacccaagcccaaggcccagcctgggacaaggctccgagggtcggctggccggagctatttttacctcccgcctcccctgctggtccccccacctgacgtcttgctgcagagtctgacactggattcccccccctcaccccgcccctggtcccactcctgcccccgccctacctccgccccaccccatcatctgtggacactggagtctggaataaatgctgtttgtcacatcaacaccaaaaaaaaaaaaaaaaaa

SEQ ID NO: 221709 - DNA, 1000 bp, Homo Sapiens
agtgacctgccctacatatctaaatcggtaaataaggacatgagttaaatatatttatatgtacatacatatatatatccctttacatatatatgtatgtgggtgtgagtgtgtgtgtatgtgtgggtgtgtgttacatacacagaatcaggcacttacctgcaaactccttgtaggtctgcagatgtgtgtcccatggcagacaaagcaccctgtaggcacagacaagtctggcacttccttggactacttgtttcgtaaagataaccagtttttgcagagaaacgtgtacccatatataattctcccacactagcttgcagaaacctagagggccccctacttgttttatttaactgtgcagtgactgtagttacttaagagaaaatgctttgtagaacagagcagtagaaaagcaggaaccaagaaagcaatactgtacataaaatgtcatttatattttccaacctggcatgggtgtctgttgcaaaggggtgcatgggaaagggctgttgatattaaaaacaaacaaaacaaaaaagccccacacataactgttttgcacgtgcaaaaatgtattgggtcaagaagtgatctttagctaataaagaaagagaatagaaaacacgcatgagatattcagaaaatactagcctagaaatatagagcattaacaaaggaaaattaatatattaagttataattggaatatgtcagaagtttctttttacattcatatcttaaaaattaaagaaactgattttagctcatgtatattttatatgaaagaaaacacccttatgaattgatgactatatataaaattatattcactacttttgaacacattctgctatgaattatttatataagccaaagctatatgttgtaacttttttttagagaatagctttatcttggtttaactctttagttttattttaagaggggaaaacaaaaatatcttgcaagcagaaccttgaaaaaaaaaaaggaattc

SEQ ID NO: 221710 - DNA, 1000 bp, Homo Sapiens; identical to SEQ ID NO: 116444

SEQ ID NO: 221711 - DNA, 1000 bp, Homo Sapiens
tatgacccatccagtccacaaaccagccagtcctggtacctgggctagcttggttcctttccaagtgtcaaataggacacccatcttaccggccaatgtccaaaattacggtttgaacataattggagaacctttccttcaagcagaaacaagcaactgagggaaaaagaaacacaacaatagtttaagaaattttttttttaaataaaaaaaaggaaaagaggaagactggacaaaacaacacaaaggcagaaaggaaagaaactgaagaaagaagataatagaccagcaattgcagcacttacaatcactaattcccttaaggttaaactgtaatgacataaaaagggtcgatgatatttcactgatggtagatcgcagcccctgcaacgtagcctttgttacatgaagtccgctgggaaatagatgttctgtctctatgacaatatattttaactgactttctagatgccttaatatttgcatgataagctagttttattggtttagtattcttgttgtttacgcatggaatcactattcctggttatctcaccaacgaaggctaggaggcggcgtcagagatgctgggtgacagagccatgagccagccattttataagcactctgatttctaaaagttaaaaaaaatatatgaaatctctgtagcctttagttatcagtacagatttattaaatttcggcccttaacccagccttttccagtgtgtaacccagtttgaaatcttaaaaaaagaaaaaatgaaaaaaaaaggaaaaaaagaaaaaaggaaaaaaacagtttgaacacaaaggctctatggaagaaatgcctctatgtaggtgaagtgttctctctgcatgcaacagtaaaaattaatataatattttccccacaaaagaaacacttaacagagggcaagtgcaatttattaaatttatattcttaaagggggaattcatggattattaaggtccttcaggcccttggggactctta

SEQ ID NO: 221712 - DNA, 826 bp, Homo Sapiens
tcatgtgacaaagcgcaggacccctcactgccccaactgcttgctgttctctctttcttgggctctaaggacccaggagtctgggtgcacagcctccttctctctgagattcaagagtctgatcagcagcctcttcctcctccaggacccagaagccctgagcttatccccatggagctctgccggtccctggccctgctggggggctccctgggcctgatgttctgcctgattgctttgagcaccgatttctggtttgaggctgtgggtcccacccactcagctcactcgggcctctggccaacagggcatggggacatcatatcaggctacatccacgtgacgcagaccttcagcattatggctgttctgtgggccctggtgtccgtgagcttcctggtcctgtcctgcttcccctcactgttccccccaggccacggcccgcttgtctcaaccaccgcagcctttgctgcagccatctccatggtggtggccatggcggtgtacaccagcgagcggtgggaccagcctccacacccccagatccagaccttcttctcctggtccttctacctgggctgggtctcagctatcctcttgctctgtacaggtgccctgagcctgggtgctcactgtggcggtccccgtcctggctatgaaaccttgtgagcagaaggcaagagcggcaagatgagttttgagcgttgtattccaaaggcctcatctggagcctcgggaaagtctggtcccacatctgcccgcccttccagcccttccccagcccctcctcttgtttcttcattcattcaacaaaatttggctggaa

SEQ ID NO: 221713 - DNA, 1000 bp, Homo Sapiens
cgcagactgcatacgaggattggttcatcaccctctacaacgtgctgtacaccagcctgcccgtgctcctcatggggctgctcgaccaggatgtgagtgacaaactgagcctccgattccctgggttatacatagtgggacaaagagacttactattcaactataagagattctttgtaagcttgttgcatggggtcctaacatcgatgatcctcttcttcatacctcttggagcttatctgcaaaccgtagggcaggatggagaggcaccttccgactaccagtcttttgccgtcaccattgcctctgctcttgtaataacagtcaatttccagattggcttggatacttcttattggacttttgtgaatgctttttcaatttttggaagcattgcactttattttggcatcatgtttgactttcatagtgctggaatacatgttctctttccatctgcatttcaatttacaggcacagcttcaaacgctctgagacagccatacatttggttaactatcatcctgactgttgctgtgtgcttactacccgtcgttgccattcgattcctgtcaatgaccatctggccatcagaaagtgataagatccagaagcatcgcaagcggttgaaggcggaggagcagtggcagcgacggcagcaggtgttccgccggggcgtgtcaacgcggcgctcggcctacgccttctcgcaccagcggggctacgcggacctcatctcctccgggcgcagcatccgcaagaagcgctcgccgcttgatgccatcgtggcggatggcaccgcggagtacaggcgcaccggggacagctgatcccttacccccaggctgggatgcggccacaaagcacgtctatttttttatgaaagactctcaggactttgtgtgtgtgtgtgaattgcattcatcacaaagatattgaagacaataaataatctttataacaaaaaaaaaaaaaaaaaaaaaaaaaaaaaaaaaaaaaa

SEQ ID NO: 221714 - DNA, 1000 bp, Homo Sapiens
tcctacctgttttgtggtcagctgtagtcctcataaaaagcaaaacaaaaattaggtattttgtcctaaaacacctggtaggagtgtgtgattttttgcattcctgacaaaggagagcacacccaggtttggaggtcctaggtcattagccctcgtctcccgttccctttgtgcacatcttccctctccccattcggtgtggtgcagtgtgaaaagtccttgattgttcgggtgtgcaatgtctgagtgaacctgtataagtggaggcactttagggctgtaaaatgcatgattttgtaacccagattttgctgtatatttgtgatagcactttctacaatgtgaactttattaaatacaaaacttccaggctaaacatccaatattttctttaatgcttttatatttttttaaaatgttaaaacccctatagccaccttttgggaatgttttaaattctccagttttttgttatatagggatcaaccagctaagaaaagattttaagtcaagttgaattgaggggattaatatgaaaacttatgacctcttcctttaggagggagttatctaaaagaaatgtctattaaggtgatatatttaaaaatatttttgggtgttcctggcagtttaaaaaaattggttggagaatttaggtttttattagtaccatagtaccatttatacaaattagaaaatgttatttaacagctgaattatctatacatatctttattaatcactattgttccagcagttttcaagtcaaattaataatcttattagggagaaaattcaattgtaaattgaatcagtataaacaaagttactaggtaacttcatattgctgagagaaatatggaacttacattgttcaattagaatagtgttctccccaaatatttataaaacttctcaagatactgctacgtgtaattttatatgaagataagtgtatttttcaataaagcatttataaattaaaaaaaaaaaaaaaaaa

SEQ ID NO: 221715 - DNA, 1000 bp, Homo Sapiens
cagaaggagcctgttcagatggagttgtctcctcccatgggggtggttcagaaggagcctgctcagagggagccacctcctcccagagagcctccccttcacatggagccaatttccaaaaagcctcctctccgaaaagataaaaaggaaaagtctaacatgcagagtgaaagggcacggaaggagcaagtccttattgaagttggcttagtgcctgttaaagatagctggcttctaaaggaaagtgtaagcacagaggatctctcaccaccatcaccaccactgccaaaggaaaatttaagagaagaggcatcaggagaccaaaaattactcaacacaggtgaaggaaataaagaagcccctcttcagaaagtaggagcagaagaggcagatgagagcctacctggtcttgctgctaatatcaacgaatctacccatatttcatcctctggacaaaacttgaatacgccagagggtgaaactttaaatggtaaacatcagactgacagtatagtttgtgaaatgaaaatggacactgatcagaacacaagagagaatctcactggtataaattcaacagttgaagaaccagtttcaccaatgcttcccccttcagcagtagaagaacgtgaagcagtgtccaaaactgcactggcatcacctcctgctacaatggcagcaaatgagtctcaggaaattgatgaagatgaaggcatccacagccatgaaggaagtgacctaagtgacaacatgtcagagggtagtgatgattctggattgcatggggctcggccagttccacaagaatctagcagaaaaaatgcaaaggaagccttggcagtcaaagcggctaagggagattttgtttgtatcttctgtgatcgttctttcagaaagggaaaagattacagcaaacacctcaatcgccatttggttaatgtgtactatcttgaagaagcagctcaagggcaggagtaatgaaactttgaacaaggtttca

SEQ ID NO: 221716 - DNA, 1000 bp, Homo Sapiens
tggctgagtgagggcatagaagttaaaggttactgtttttatcctctatccttttttcctttcctgatcaaggtgctcttctcattttttcctgagaaccttagccatcagatgaggctccttagtttattgtggttggttgttttttctttataatggctctgggctatatgcccatatttataaaccagcagcaggggaaagattatattttataagagggaacaaattttcacaatttgaaaagcccacataagttttctcttttaaggtagaatcttgttaatttcattccaaacatcggggctaacagagactggaggcatttctttttaggctctgagactaaatgagaggaaaagaaaagaaaaaaaaatgattgtctaaccaattgtgagaattactgtttgaaacttttcaaggcacattgaaatacttgaaaacttctcatttatgttatttatgatgttattttgtacgtgttattattattatattgttttataaatggaggtacaggatatcacctgaattattaatgaatgcccaggaagtaattttcttctcattcttctaaaactactgcctttcaaagtgcacacacacgcgtccacatacactgcattcgttgctccagtataaattacatgcatgagcacctttctggcttttaagccaatataatgggctgcaaaatgaagacaccagagtgtatgcatacaaatctcactgtattaaagatgcaggttttctaattgtacccttcttgtctctctggcaatcttgcccttaatatccctggagttcctcatcagtgtcattttctgttatacacagttccacaattttgtctctagttgacttcaaatgtgtaactttattggtcttgccctattataattgtcatgactttcagattgtatctgaactcacagactgctgtcttactaataggtctggaaggtcacgctgaatgagaagtaaattattttatgtaaaa

SEQ ID NO: 221717 - DNA, 1000 bp, Homo Sapiens
aagagtttaatccagactctgcacaagaagttaatctgccaaaccctaggattctccttctgaaagctcagaatatttcttccccttccctatacacacagggctcgaagggttagagaagaaaggcagacaacagcttctgagctttggactaatcacagcctctgttctcagcaggagccccaacactgagaccagaaaagatggtgctatgctttcctcttcttttactgctgctggttctatggggaccagtgtgtccacttcatgcttggcctaagcgtctcaccaaggctcactggtttgaaattcagcatatacagccaagtcctctccaatgcaacagggcaatgagtggcatcaacaattatacccagcactgtaagcatcaaaatacctttctgcatgactctttccagaatgtggctgctgtctgtgatttgctcagcattgtctgcaaaaatcgtcggcacaactgccaccagagctcaaagcctgtcaacatgactgactgcagactcacttcaggaaagtatccccagtgccgctatagtgctgctgcccagtacaaattcttcattgttgcctgtgacccccctcagaagagcgatcccccctacaagttggttcctgtacacttagatagtattctctaaggcatccactgcatttcctttcatttgacatagcttctgttacaattgcatccacgttttcttttcttttgttgattttcttgttcccgtagaagaaagaagaaaggtgtttggagaattcgagtgcctaggatgccagaccagagttgagacaaaaagaaataagattattttctgctttgtagttctgtacttttcgagagaagggaatagggaagacagcaaagaaagattcagatttctaaccctgcaacttttgccaagctttattgccctgtgttcacagcaataaaaccacttcctgctgcattctgaaaaaaaaaaaaaaaaaaaaaaaaaaaaaa

SEQ ID NO: 221718 - DNA, 1000 bp, Homo Sapiens
acaccaacaagaaggcggacttccacggggaccacagcgccgacaagaatggcttcaaggcccgctacccagcggtggactataacctcgtgcaggacctcaagggtgacgacaccgccgtcagggacgcgcacagcaagcgtgacaccaagtgccagccccagggctcctcaggggaggagaaggggaccccgaccacactcaggggtggagaagcatctgaaagaaaaaggccggactcgggctgttcaacttcaaaagacaccaagtaccagtcggtgtacgtcatatccgaggagaaggatgagtgcgtcatagcaactgaggtgtaaaatggaagtgagatggcaagactcccgtttctcttaaaataagtaaaattccaaggatatatgccccaacgaatgctgctgaagaggagggaggcctcgtggactgctgctgagaaaccgagttcagaccgagcaggttctcctcctgaggtcctcgacgcctgccgacagcctgtcgcggcccggccgcctgcggcactgccttccgtgacgtcgccgttgcactatggacagttgctcttaagagaatatatatttaaatgggtgaactgaattacgcctaagaagcatgcactgcctgagtgtatattttggattcttatgagccagtcttttcttgaattagaaacacaaacactgcctttattgtcctttttgatacgaagatgtgctttttctagatggaaaagatgtgtgttattttttggatttgtaaaaatatttttcatgatatctgtaaagcttgagtattttgtgatgttcgttttttataatttaaattttggtaaatatgtacaaaggcacttcgggtctatgtgactatatttttttgtatataaatgtatttatggaatattgtgccaatgttatttgagttttttactgttttgttaatgaagaaattcctttttaaaatatttttccaaaataaattttatgaggaattc

SEQ ID NO: 221719 - DNA, 891 bp, Homo Sapiens
atgaacctgtggctcctggcctgcctggtggccggcttcctgggagcctgggcccccgctgtccacacccaaggtgtctttgaggactgctgcctggcctaccactaccccattgggtgggctgtgctccggcgcgcctggacttaccggatccaggaggtgagcgggagctgcaatctgcctgctgcgatattctacctccccaagagacacaggaaggtgtgtgggaaccccaaaagcagggaggtgcagagagccatgaagctcctggatgctcgaaataaggtttttgcaaagctccaccacaacacgcagaccttccaagcaggccctcatgctgtaaagaagttgagttctggaaactccaagttatcatcgtccaagtttagcaatcccatcagcagcagtaagaggaatgtctccctcctgatatcagctaattcaggactgtgagccggctcatttctgggctccatcggcacaggaggggccggatctttctccgataaaaccgtcgccctacagacccagctgtccccacgcctctgtcttttgggtcaagtcttaatccctgcacctgagttggtcctccctctgcacccccaccacctcctgcccgtctggcaactggaaagagggagttggcctgattttaagccttttgccgctccggggaccagcagcaatcctgggcagccagtggctcttgtagagaagacttaggatacctctctcactttctgtttcttgccgtccaccccgggccatgccagtgtgtccctctgggtccctccaaaactctggtcagttcaaggatgcccctcccaggctatgcttttctataacttttaaataaaccttggggggtgatggagtcattcctgcctgtta

SEQ ID NO: 221720 - DNA, 1000 bp, Homo Sapiens
gagttctggatgtctggctcaaagcagcaggactgtgggaaagagcctaacatctccatggggaggcctcaccccagggacagggccctggagctcagggtccttgtttctgccctgccagctgcagcctggttggcagcatctgctccatcggggcagggggtatgcagagcttgtggtggggcaggaacggtggaggcagaggtgacagttcccagagtgggctttggtggccagggaggcagcctagcctatgtctggcagatgagggctggctgccgttttctgggctgatgggtgccctttcctggcagtctcagtccaaaagtgttgactgtgtcattagtcctttgtctaagtagggccagggcaccgtattcctctcccaggtgtttgtggggctggaaggacctgctcccacaggggccatgtcctctcttaataggtggcactaccccaaacccatcttttgttctcctatatcctccttctcctgttccatttcagttcagtttcagcggtgccaacctctttgcgtttcctttttgttgatgaggacccagagctgctgcacacactcacctctaaccccctcccctcgctgctgggccccatctccacaggagagactggttcggctctagggcctcagtctggagtgggataggagcagtgagtgacaaagcctctgaaagatgcatcatctcttcctcacacccatttagtgggggatgggtcctctagacttgaggggctaccctgggaagctgccgtagcttcagccaggcaagaaagcttccttcaacctgcatagccggtgggtgaggagattcccaccttccatagcctccaaacatgttcccaaggccccactttcaagaatcagacagcaggaagccatagatgctggctgggttccaggttatggggagaagaaatacagtcaataaaaggtttttgtataaaaaaaaaaaaaaaaaaaaaaaaaaaaaaaaaaaaa

SEQ ID NO: 221721 - DNA, 1000 bp, Homo Sapiens
ctttatacaaaatgtacatcctgtgaattctgttccagatttcacacctacaataattccaaaaggtttgcacattagagtttgtaacaaaatattttattatataaaaccaggttagaaggaatgcaggatatttttaacacaacaatctgtgcttattacacaaaattactttgtggtaaacagacagtattgtaatcccatcaaaagatgaaagaaaaacaaaaacaaaaaccaacaacaattagccatagttctgaatgcacttcaattaagccaaaacagacagctagtgatctttttatatgctctttttacttaagttttaatttgtcctttaaaaaaaggtgaaacaaaccaagaacaagttctagaaaactgaagcaacctcttatgtatactagatgcttgatttaggaggagtttttaaacgttttcaatgttattatgtagtaaatgacactattatgaagctactagtcattccataagagtcttaaaggactgctctgtgtacactgtgactgccgtgtgtgcttagacccgtagtttcctcagtggatagcactcaatttattccgtagtgatattgtaacaatactgccattcccttctactgcactgcccaaggtgtgtgtagcacaaacagttctcattacaaaggaccaattcagaactgaaaagctatgcataggacaaggaagatacatagaatggggtggaacacagcattttgtcaagcactgtgcaatattccatatttttccccactatggtagacaaccatttcgtggaagggcagcctattatcccacactgcatctagccttttgtcccattcacttctgtgatccattttaatttccaggccacaagacagtagtgatgctctgaaatgaaagtttgtcttcacaaatatcaaaacaaaatggaggaaaactaagcattggcctcatgttcagtcttcaggatatcacaccacgtcttttcaaaaactaaa

SEQ ID NO: 221722 - DNA, 1000 bp, Homo Sapiens
tgtgtgagaagtggggagaaatgccaccactacaacccaaacatatgagggaagccgttagaaggttaaagtcaaaaggacagatccctaactcgaagcacaaaaaaatcatcttcttctagaccaaagtctagaaaggcctatgttactgacggaagaagtattggttccagacttcctataagactgtctgcattggtgctttagtatctcaggcctccaaggattccatgatgattttaatgtctttctcaaaactctgatatttgtcacacctagaaagtatgtagcctgattgatacttgccttgactaaattttgggacctcttggggcattttgaagtatttaactgtcttgaccagttggaagaagatacgtgggccataagcatcttctggacaggggaactgctttcagagagaaaacctttccaagagagttttgttttgttttggtttcgttttgtttgagatagggtcttgctctatcacctaggctggagtgcagcggcatgactgcagccttgaactcctgggcttaagtgaccctcccacctcagtctcctgagtagctaggactacaggcacacactactgtgcccagctaacttatttttattttttatggagatggggtcttgctttgttgcccaggctggtcgtgaactcctggcttcaagcagtcctcctgcctcagcctcctaaagtgccgagggctttaatggtttcacattgaagcctgaagttgctaagacttaggttgtttcttatatctggttttaagtagatgaaacaaccagaaacttttacttgtgatactctaccatgaaggatgcggtaatggcaggaatagcagaataattggtgcttgtaaacatttaagattctcctgtggattttggtgagtgatcattaaactgttttccaacttgcaaaaaaaaaaaaaaaaaaaaaaaaaaaaaaaaaaaaaaaaaaaaaaaaaaaaaaaaaaaaaaaaaa

SEQ ID NO: 221723 - DNA, 1000 bp, Homo Sapiens
ggtgcgagggaagcaattgaaaaggaacttgccctgagcactcctggtgcaggtctccacctgcacattgggtggggctcctgggagggagactcagccttcctcctcatcctccctgaccctgctcctagcaccctggagagtgcacatgccccttggtcctggcagggcgccaagtctggcaccatgttggcctcttcaggcctgctagtcactggaaattgaggtccatgggggaaatcaaggatgctcagtttaaggtacactgtttccatgttatgtttctacacattgctacctcagtgctcctggaaacttagcttttgatgtctccaagtagtccaccttcatttaactctttgaaactgtatcacctttgccaagtaagagtggtggcctatttcagctgctttgacaaaatgactggctcctgacttaacgttctataaatgaatgtgctgaagcaaagtgcccatggtggcggcgaagaagagaaagatgtgttttgttttggactctctgtggtcccttccaatgctgtgggtttccaaccaggggaagggtcccttttgcattgccaagtgccataaccatgagcactactctaccatggttctgcctcctggccaagcaggctggtttgcaagaatgaaatgaatgattctacagctaggacttaaccttgaaatggaaagtcttgcaatcccatttgcaggatccgtctgtgcacatgcctctgtagagagcagcattcccagggaccttggaaacagttggcactgtaaggtgcttgctccccaagacacatcctaaaaggtgttgtaatggtgaaaacgtcttccttctttattgccccttcttatttatgtgaacaactgtttgtctttttttgtatcttttttaaactgtaaagttcaattgtgaaaatgaatatcatgcaaataaattatgcgatttttttttcaaagcaaaaaaaaaaaaaaaaaaaaaaaaaaaaaaa

SEQ ID NO: 221724 - DNA, 1000 bp, Homo Sapiens
gatcaagaaaacacttcaacagcctttttagaaattggcacactcctatagtcccacctactcaagaggctgaggcaggaggatcactagagtacaggagtttggggctgtagtgtgtaatgatcacacctgtgaaagaataaccactgcactccaacctgggcaacatggcaagaccctgtctctttaaaaaaaaaaaaaatcctgggaaaagaagtcaaagatgtaattttacacaatttctgcccccaccgtcttttttgtttgtttgtttgtttgtttgttttttggctagatactaggtattcagtgtttgctgagatgacaggtttctactaatcagccagttatttgggaaggagaaaaactttttctcaattctgaacatgatgcagcttgttaactctccagatagtgcctttgattgaaaataaggtctacacctttttaagtatattatttctgacatcgtaagaaataatttagttccttattctcatttatcttttatataatgtactgtaatattcaggtttaaagtaaaataagtatatgaattatattttggtaaaactgtttcatgaccagcttgattaatgtatattaacataccagacattgacagcgaacatttcatgaaatcagttatttacttaccaaaacaatgagttttagcttgaaagttactgctgctctattattaacaaaactaagttttaaaaattaattttaattctactgaagtttaatttctggttaaaggtatagtggatgctatttatgatccaagtttttacatcacatccattgatctgcctatcccttctttttactccaaagaggagatgatagaataatacattcagtatactaccaagaagcaaagttataatgtgtttcattttgctattggaattttttattgtaacattgtatgataacctgaaatgtttacttgtgccttttctttaaacaattaaagttttccattttataagaa

SEQ ID NO: 221725 - DNA, 946 bp, Homo Sapiens
tgacagcccaccagtgaccatgaaggctgtgctgcttgccctgttgatggcaggcttggccctgcagccaggcactgccctgctgtgctactcctgcaaagcccaggtgagcaacgaggactgcctgcaggtggagaactgcacccagctgggggagcagtgctggaccgcgcgcatccgcgcagttggcctcctgaccgtcatcagcaaaggctgcagcttgaactgcgtggatgactcacaggactactacgtgggcaagaagaacatcacgtgctgtgacaccgacttgtgcaacgccagcggggcccatgccctgcagccggctgccgccatccttgcgctgctccctgcactcggcctgctgctctggggacccggccagctataggctctggggggccccgctgcagcccacactgggtgtggtgccccaggcctctgtgccactcctcacagacctggcccagtgggagcctgtcctggttcctgaggcacatcctaacgcaagtctgaccatgtatgtttgcacccctgtcccccaccctgaccctcccatggccctctccaggactcccacccggcagatcagctctagtgacacagatccgcctgcagatggcccctccaaccctctctgctgctgtttccatggcccagcattctccacccttaaccctgtgctcaggcacctcttcccccaggaagccttccctgcccaccccatctatgacttgagccaggtctggtccgtggtgtcccccgcacccagcaggggacaggcactcaggagggcccagtaaaggctgagatgaagtggactgagtagaactggaggacaagagtcgacgtgagttcctgggagtctccagagatggggcctggaggcctggaggaaggggccaggcctcacattcgtggggctccctgaatggcagcctgagca

SEQ ID NO: 221726 - DNA, 1000 bp, Homo Sapiens
caaggagctcgagtctgcttatccatcaggcagtccacacagatgagaagccttataagtgtgagaagtgtgggaagggcttcaccaggagctcaagtctgctcatccatcatgccgtccatacaggcgaaaaaccttataaatgtgacaagtgtgggaagggctttagtcagagctccaaactgcacatccaccagcgagtccacactggagagaagccctatgagtgtgaggagtgtggtatgagcttcagtcagcgctcaaacctgcacatccaccagcgagatcacacaggagagaggccctacaagtgtggtgagtgtgggaagggcttcagtcagagctcgaaccttcacattcaccggtgcatccacacaggagagaagccttaccaatgctatgagtgtgggaagggtttcagccagagctcggatcttcgcatccatctcagagtccacactggagagaagccctatcactgtggcaagtgtgggaagggatttagccagagttccaaactcctcatccaccagagagtacatactggagagaagccctatgagtgcagcaagtgtgggaagggcttcagccagagctccaaccttcacagccaccagcgggttcacaagaaagatcctcgctaactgacattagcccattcaggtcttcacagcgctcatactgtaaaaactgttaaatatttagtatcactcttactttatattcctacaaaggagagagatgtaagggttatttagatatgttccctcactgaaaaatcactcattcaaaatatttaagtatcaagcactttgttatgctgtacaatgaatggattgttcttgtttctcagatgggtagagtaaaagtgtctgtactttacaattcaactacttgttctacccagcatttaacggcaagaactttatatttattctcaagcagggcatgtttccctttgttcacattctctgagaaattgaaactctggtttctcttc

SEQ ID NO: 221727 - DNA, 1000 bp, Homo Sapiens
cctctttcctacaatcaactggtcaccccttgtcgcttgagaatttgcattattttgatctggatctactcctgcctaattttcttgccttccttttttggctgggggaaacctggttaccatggtgacatttttgaatggtgtgccacgtcttggctcaccagtgcctattttactggctttattgtttgtttactttatgctcctgctgcctttgttgtctgcttcacttacttccacattttcaaaatttgccgtcagcacaccaaagagataaatgaccgaagagcccgattccctagtcatgaggtagattcttccagagagactggacacagccctgaccgtcgctacaccatggttttgtttaggataaccagtgtattttatatgctgtggctcccctatataatttactttcttctagaaagctcccgggtcttggacaatccaactctgtccttcttaacaacctggcttgcaataagtaatagtttttgtaactgtgtaatatacagcctctccaacagcgttttccggctaggcctccgaagactgtctgagacaatgtgcacatcctgtatgtgtgtgaaggatcaggaagcacaagaacccaaacctaggaaacgggctaattcttgctccatttgaagagagctacatagtaaatcaaatgtaatctgacagtggttttggatcatattctagattcatctggaaatttgccatcagagaaatatttacttgaatagttgactgtaaaatgaagtatgagactaaaggtttctctctttttttttctttttcatggaagaaactaaagggaaggatgtatagagggttagctcatgaaataattatagcatgtgagtattagtgtgcagtaataggaaaaattaagcactgagatgaaaaagaatatctcaaatcttctgcaggacatgagcaagccccttggctcagcatttcttgtctttctgtctggctgtaccctgcctct

SEQ ID NO: 221728 - DNA, 1000 bp, Homo Sapiens
taacaagatcccatttctttccttattgataaaacaagataatcgatgagaattcatgttgcatgagttcgagataactgaggggtttagctttgattttctacatttgacatgtattcatcattgagaaacactaaaataacaatatttttagaaaacgtttaagaatcaattatggtccaacaattatagcttctgaggtcagtttaaagtgaaagaaaaatctgtaatacaaggattcaaaatatgtgagggtgcataggtattttttactctatctgtgatactctaagatagagtacatgcaacaaagatctgttctgctgtaagagttaaaatggacaagtattgatatcaatgcagtatgaacattaggaaacaatgagaagcttatttttgccataggccatacatgttactgtaatcagtcagttataaaatcatggttttaaatacttaattgagctactagtttctctattgtcccagggagatattagacctctctttttctgaagctaagcttcagccaatcctccttgttttatatcctaatttcctttcttacttcaatctagaattctccagtaggtaccatctctggaaaaaagctgggtctcatgtttgagacaagttcccaggtactattgaagtaataagaaatatgataaaatataatactttaaagtcccagtagaaatagctaacaaaggctgggtgcgctgtggctcatgcctgtaatcctagcactttgggaggctgaggtgggcagatcacttgaggccaatagttcgagatcagcctgaccaacatgatgaaatgccatctccactaaaaatataaaaattagccaggcatggtggtgtgggcctgcagtcccagctacctgggaggctgagtcaggaaaatctcttgaaccaggaggtggacgttgcagtgatcccagattgtgccactgccctccagcctgggtgacagagtgagattctgtctacaaaaa

SEQ ID NO: 221729 - DNA, 1000 bp, Homo Sapiens
gcactgtgctaataacagtgcatattcctttctatcatttttgtacagtttgctgtactagagatctggttttgctattagactgtaggaagagtagcatttcattcttctctagctggtggtttcacggtgccaggttttctgggtgtccaaaggaagacgtgtggcaatagtgggccctccgacagccccctctgccgcctccccacggccgctccaggggtggctggagacgggtgggcggctggagaccatgcagagcgccgtgagttctcagggctcctgccttctgtcctggtgtcacttactgtttctgtcaggagagcagcggggcgaagcccaggccccttttcactccctccatcaagaatggggatcacagagacattcctccgagccggggagtttctttcctgccttcttctttttgctgttgtttctaaacaagaatcagtctatccacagagagtcccactgcctcaggttcctatggctggccactgcacagagctctccagctccaagacctgttggttccaagccctggagccaactgctgctttttgaggtggcactttttcatttgcctattcccacacctccacagttcagtggcagggctcaggatttcgtgggtctgttttcctttctcaccgcagtcgtcgcacagtctctctctctctctcccctcaaagtctgcaactttaagcagctcttgctaatcagtgtctcacactggcgtagaagtttttgtactgtaaagagacctacctcaggttgctggttgctgtgtggtttggtgtgttcccgcaaaccccctttgtgctgtggggctggtagctcaggtgggcgtggtcactgctgtcatcaattgaatggtcagcgttgcatgtcgtgaccaactagacattctgtcgccttagcatgtttgctgaacaccttgtggaagcaaaaatctgaaaatgtgaataaaattattttggattttgtaaaaaaaaaa

SEQ ID NO: 221730 - DNA, 1000 bp, Homo Sapiens; identical to SEQ ID NO: 116462

SEQ ID NO: 221731 - DNA, 1000 bp, Homo Sapiens
aggagtgtgtcctgtcagaagaacagatccgcctgaagaaactgaagcggcaagaggaggaacaggctcatgccacatccttgccccccaggcgttcctcacccccccaaatcctgccccagctcagcccggaacaactgggcatgatcgagaagctcgtcgctgcccagcaacagtgtaaccggcgctccttttctgaccggcttcgagtcacgccttggcccatggcaccagatccccatagccgggaggcccgtcagcagcgctttgcccacttcactgagctggccatcgtctctgtgcaggagatagttgactttgctaaacagctacccggcttcctgcagctcagccgggaggaccagattgccctgctgaagacctctgcgatcgaggtgatgcttctggagacatctcggaggtacaaccctgggagtgagagtatcaccttcctcaaggatttcagttataaccgggaagactttgccaaagcagggctgcaagtggaattcatcaaccccatcttcgagttctccagggccatgaatgagctgcaactcaatgatgccgagtttgccttgctcattgctatcagcatcttctctgcagaccggcccaacgtgcaggaccagctccaggtggagaggctgcagcacacatatgtggaagccctgcatgcctacgtctccatccaccatccccatgaccgactgatgttcccacggatgctaatgaaactggtgagcctccggaccctgagcagcgtccactcagagcaagtgtttgcactgcgtctgcaggacaaaaagctcccaccgctgctctctgagatctgggatgtgcacgaatgactgttctgtccccatattttctgttttcttggccggatggctgaggcctggtggctgcctcctagaagtggaacagactgagaagggcaaacattcctgggagctgggcaaggagatcctcccgtggcattaaaagagagtcaaagggt

SEQ ID NO: 221732 - DNA, 423 bp, Homo Sapiens
ccggaagtgactgcggacgaatcggcgtttgccgaggctggcatagatttggctgtctccgctcatagctgcttttggcgcgaaagatgccgggtctggttgactcaaaccctgccccgcctgagtctcaggagaagaagccgctgaagccctgctgcgcttgcccggagaccaagaaggcgcgcgatgcgtgtatcatcgagaaaggagaagaacactgtggacatctaattgaggcccacaaggaatgcatgagagccctaggatttaaaatatgaaatggtggtctgctgtgtgaataaataattcctgaagaatgaagaagattaattttgggagttctttgacgaactttgatatgtggaaaaagtatttataatttattgtaagaagaaagtaaaatattactagtggaagatcttc

SEQ ID NO: 221733 - DNA, 1000 bp, Homo Sapiens; identical to SEQ ID NO: 116464

SEQ ID NO: 221734 - DNA, 1000 bp, Homo Sapiens
ccggctggtcacagacataaaagagaaattgaagctctctaaaaaggtctggtcagcattaccctacactatctgcaaggacgagagcgtgacagcgggcacgtccaacgaggaggaatgctggaacgggcacagcaaagccagatacttgcctgagatcatgaatgatgggctcaccaaccagatcaataatcccgaggtggatgtggacatcactcggcctgacactttcatcagacagcagattatggctctccgtgtgatgaccaacaaactaaaaaacgcctacaatggcaatgatgtcaatttccaggacacaagtgatgaatccagtggctcagggagtggcagtgggtgcatggatgacgtgtgtcccacggagtttgagtttgtcaccacagaggcccccgcagtggatcccgaccggagagaggtggactcttctgcagcccagcgtggccactccctgctctcctggtctctcacctgcattgtcctggcactgcagagactgtgcagataatcttgggtttttggtcagatgaaactgcattttagctatctgaatggccaactcacttcttttcttacactcttggacaatggaccatgccacaaaaacttaccgttttctatgagaagagagcagtaatgcaatctgcctccctttttgttttcccaaagagtaccgggtgccagactgaactgcttcctctttccttcagctatctgtggggaccttgtttattctagagagaattcttactcaaatttttcgtaccaggagattttcttaccttcatttgcttttatgctgcagaagtaaaggaatctcacgttgtgagggtttttttttttctcatttaaaataaaaaaggaagaaagaaaataattttccttgtaaaatcgggccaaaccccaagacagctacattttcaacaaaaaagcaaacagagaaaaataaatgaactttaacactgtaagttcagcattgacagcc

SEQ ID NO: 221735 - DNA, 1000 bp, Homo Sapiens
atgtgtgttaagaaggctgcagcccacaggagtccagggaaggcggggaccacagaggcacagagtccagcacttggccgctcatgggccttctttctgcctcagaggacgggggcagagaagtgatgaagggaaatgttcttagaggaggaaatatcctttgtcctgttcagagagaccagggccctaccattaggcatactttcagaagcaacctggagaacagctatcaatcatattcaaaaccagtacaagaactgctgcctggtaccctgtgagtcatttctatgaaattccatataaagaatgatgataagtttacacactgtgcaatctcacaatctgaaaataaagttgagttggctgtgttttctctgctcttgtcagaacattgggacaattggtcgttcaaaaacattcatcctcttactgcaagtttatctgggtacttttacctgtgtgttcaaaggcatttcttttcagcagtgatcattataacttcacaaaaaaagatgctgacggatttacttacagggccttaatgttattttgtcccagccaacaccctctaggtcctaaaagtcaaggtacttcagtttatttggcaaacatgacaacatttttttggccctgggcccaacagtttgtacttcatgaaacatattgtacattttacatagtttaatttaaaaaataccttttaagctagttgatctttgactgtcttatttattataacctttcagcacattccaaggttttagttactcaggaaggagttaattaaaatgattttattttggtctgatggatgttttttaaaaggaaaattattattatgaaccttcagcctactttcttgagtgccgtaaaagtgcttgtaaatctttttttttttttaagaagaaagaaaaaaatggtgtttgacgttgatggaaattcaaaaatatatatggaactgaaacattaacttagctaaaataaaagcaatctgtgtttg

SEQ ID NO: 221736 - DNA, 1000 bp, Homo Sapiens
aaggtgcctcttcagggacacagtgtgtctctctgattgggcttctaaatcaaaagcctgatgttcgtgtccctctcatagggggagctttggacacaggaccagtttggaaaagggtcaggtaagggtttccactctgcacattgtagagggaacactctgtaggcccatgggtcccttactagagaggttgagtgaatttgccttcagttaacatgggaccttctgtttagcttcctcttgcttcccaaagattttaagcattttgtaaatgtataaactcacctctggtaacagtggcccagacgctgctttgtgctaaaagcatgggaaatgtaaaggcagtctttctctgggaaatggatgctattctattctgctgcccctacctgttcctgaggcctcatttagaaagaaaatcccctcagaaggctgtctggcacccagtgtcctagccaggccaagtatatgagaaaggtaagtccattttccccttcaggtcctcagtggattacttaaccactgctgtccctcggtccctttttcctaaacgggtttagttctgtcttttttctccttttttctaaatgctggtaaatatttacattcagccagggaagaggaggccagaggtcgggccagctgccccattcttttaacgttgtagggcctgcccatggagcggaccctcctctttgggcctcgtgagcttttttgcttatcatgttccatttcgtgccgctttcccccttcaagatgccatttggagggtaggggatctgcttcccactgtgactgggctatgggattctgactaccttgcttacagattcatggtttgataaatttgttgtattccaaaacttgaaatgcaggacgccattaagtgtctgtttatatttttggaatatttgtattacttacaattaattaataaaagtgggtttaaaaaacctttccaggaaaaaaaaaaaaaaaaaaaaaaaaaaaaaaaaaaaaa

SEQ ID NO: 221737 - DNA, 1000 bp, Homo Sapiens
gagacattcactcagagaatgtaaaggtagtctagattgtgaagcttgccagagcactttgaatattgatcggatgtgttcattaagtagtcctgatagtactctgagtaccagctcctcagggcagtccagcccatccccctgcaagagaccgaatagtatgtcagatgaagagcaagaaagtagttgtgatacggtggatggctctccgacatctgactcttccgggcatgacagtccatttgcagagagcacttttgtggaggacactcatgaaaacacagaattggtatcctctgctgacacagaaaccaagccagctgtctgttctgttgtggtgccaccagtggaactagaaaatggcttaaatgccgatgagcatatggcaaacacagattctatatgccagccattaataaaaggacgatctgcccctggaagattaaaccagccttctgcagtgggtactcgtcagcaaaaattgacatcagcattccagcagcagcatttgaacttcagtcaggttcagcactttggatctgggcatcaagagtggaatggaaactttgggcacagaagacagcaagcttatattcctactagtgttaccagtaatccattcactctttctcatggaagtcccaatcacacagcagtgcatgcccacctggctggaaatacacacctcggaggacagcctactctacttccatacccatcatcagccaccctcagtagtgctgcaccagtggcccacctgttagcctctccgtgtacctcaagacctatgttacagcatccaacttataatatctcccatcccagtggcatagttcaccaagtcccagtgggcttaaatccccgtctgttaccatccccaaccattcatcagactcagtacaaaccaatcttcccaccacattcttacattgcagcatcacctgcatatactggatttccactgagtccaacaaaactcagccagtatccatatatgtga

SEQ ID NO: 221738 - DNA, 1000 bp, Homo Sapiens; identical to SEQ ID NO: 220787

SEQ ID NO: 221739 - DNA, 1000 bp, Homo Sapiens
tggaccctgccgcctgctccaaactccaccagccccgtgtccttcattgccacgtacaggctcggcatggctgcccggggccacagctggccctgcctgcagcagacgccaacgtccaccagctgcaccatcacggatgtccagctgttctccatggctccctacgtgctcaatgtcaccgccgtccacccctggggctccagcagcagcttcgtgcctttcataacagagcacatcatcaagcccgaccctccagaaggcgtgcgcctaagccccctcgctgagcgccagctacaggtgcagtgggagcctcccgggtcctggcccttcccagagatcttctcactgaagtactggatccgttacaagcgtcagggagctgcgcgcttccaccgggtggggcccattgaagccacgtccttcatcctcagggctgtgcggccccgagccaggtactacgtccaagtggcggctcaggacctcacagactacggggaactgagtgactggagtctccccgccactgccacaatgagcctgggcaagtagcaagggcttcccgctgcctccagacagcacctgggtcctcgccaccctaagccccgggacacctgttggagggcggatgggatctgcctagcctgggctggagtccttgctttgctgctgctgagctgccgggcaacctcagatgaccgacttttccctttgagcctcagtttctctagctgagaaatggagatgtactactctctcctttacctttacctttaccacagtgcagggctgactgaactgtcactgtgagatattttttattgtttaattagaaaagaattgttgttgggctgggcgcagtggatcgcacctgtaatcccagtcactgggaagccgacgtgggagggtagcttgaggccaggagctcgaaaccagtccgggccacacagcaagaccccatctctaaaaaattaatataaatataaaataaaaaaaaaaaaaa

SEQ ID NO: 221740 - DNA, 1000 bp, Homo Sapiens
ctcatgacccttggacagcaggatgtttccaaagtcctgctaggccctctctctccctacacgatagaatttttgcggcatttgaagagctttttccagattatgtttaaaattgaaaccaagccatgtggtgaagaactcaagggtggggataaagtgctgatgacctgtgttggcattggtttctccaaccttagcaagaccctcaagtgataaccatcacaagataaggccccagtgcctacagacaaagcagaagctgccacggacaccaatgggaccaagtccaaatggattaatccaggacagaatagccacttgcttaattttctgtgaagaaatatcaatatacaaataaaagacatccctgtagcatatggtttccagctgtttctccagtggcattgccattgcccaggaggggcccagtcaccatgagagctcccttgccttacctggaggaagaatgtgccttcaggccacagtcgtgctgctagaacagtctcatagctgcagttcagctgtgcttcctcagcctactatcataggcttcctcagccctctgtcatatggctgttttgcaaacctgtggagtctgttactgttctttctgcaaggactcacctccttgagccttggtttttgttgtagggattaaatgagataatatgagtggcagctcttcatgagtcctgcagtgctaagcaaatgtcagaaattggtgtattagactatttatctttgatcttctgaatggattgctgtcatggacacggacacggatcttcatctggttcattgtatttatatgtgagggatggatggctgcggggctccaagtaagttattgggatgttttttatattccaggtgtgctgtacattcttattttattttcacaacagctctgtgatgtaaatgctatctccatgagaaaattcataaagggtgttttgttcctttgaaatgtataatgtaaagacattaaatctcctcattt

SEQ ID NO: 221741 - DNA, 1000 bp, Homo Sapiens; identical to SEQ ID NO: 116483

SEQ ID NO: 221742 - DNA, 1000 bp, Homo Sapiens
aaacaaacagtatttctactggaaaaaccattttcagttaaagcaggtgaagccttgaaaggaaaggtcacagttcacaagaataagaaagatccacgttctctcaccgtgaccctcacgttgaataattcaactcaaacttatggtctccagtgaaacagccataaaagcacactaccttgtagtttttaatgtgggggtagagtgggtcagcaggagggagctggttttatgtgagcagatggatggatgatggaccctttcctaatgagcctcctcaataagagagaagttctcattgtgggaatctgacatagttcagctgaggaagagaatcagctgatcctcatggtctgccacgtaatcattttcttagacgtttgctccaccagatttaaccaaatgtaactcccacattgagtttatctatattgaaaatcatttacattggcctatatttggaagagagatagtcttttgtttttaataagtttcttactataaattttaaacaaattggttagttatttggatattttattaaactagtaacacaggtactacacattttattatggactcctctgaggaggagtttttaattgtatttgctagaaaatcaggatgtaataaagatttgtataaaaaaactaaaatatggaaaagagcttcagccttcatatacaaatcatatatgcagacagcctagttgattatctagcatacttagggttctcattttgtagtttcttccctctttgtgactattccttagccttatagatttctagtactgcccaggaaatctaatttcaatacatttatcctaggtttcatgaaagtttttaaagattgggataaatatgtacttatttactaacgtattatctttttcaaaccagatttatgtgcaaaggttaaacatgtaactgttactaagcagtctataaagttgtcatttacaattactaaaaaaaaaaaaaaaaaaaaaaaaaaaaaa

SEQ ID NO: 221743 - DNA, 1000 bp, Homo Sapiens
ttgttaacagcttttgtgttaatccccttcagcccctagctcttttattctaccacggctggagagttgatacctgcagtcagcctgccagtgactcttagtgtctgtttctgacttatttttcctgtctctgtcttccaacccccaataatatttccaccggggatgcatcatttttactcccaatattctgtagagagggagtcaggatgctgtcttcccacgaatagtactcagtaacaaaccaattgcattttagttgggcagtgctcccacccaccctccagatcccttccagctaaaacccttcccccttccctccatgtgtttctcagtttcccgtttcgtttgttggactgttccactgcccctcctcctcaccctatcacccatggatcgtaatgtaaaattcttttaccatgtcaagaaattattaaaaatacaggtactttgacctctttctaaagccgcagaccctggtgcaatgctctggtggctagggatgtactcatgctcatatgtgtgcacgcttggacacccacctccatggacacctagccaccctgttgtgtgtccttatgccagttgagctgaatcttttccccagtatagtggaaagactgaggcttctgcctactgagcaaggttgggtgcttcatttgtgttcagtctgaattatgggaaagttagctcttcccagacctaagctgccttctctccctactttcagaagatcctagttccttccttcccgagtgatacccatgaactgccagtagaggctgctatcgttccatgtgtaaggaatgaactggttcaaggcgcgtcctacccagtcattttctttaccttatactaattcttcctgaataatgtcttcagtttcttgaggagactcctagttttggttttcaaattacttggagggctgcctaggaatctatctccctctgaaataaagtttcctcatcttccaccttgcaaaaaaaaaaaaaaaaaa

SEQ ID NO: 221744 - DNA, 1000 bp, Homo Sapiens
gttcctgattgtacgaatgagagaactactgtggagaaaggaagattgccagaggttttaccgagagcatgaagggcgttttttctatcagaggctggtggagttcatggccagcgggccaatccgagcctacatccttgcccacaaggatgccatccagctctggaggacgctcatgggacccaccagagtgttccgagcacgccatgtggccccagattctatccgtgggagtttcggcctcactgacacccgcaacaccacccatggttcggactctgtggtttcagccagcagagagattgcagccttcttccctgacttcagtgaacagcgctggtatgaggaggaagagccccagttgcgctgtggccctgtgtgctatagcccagagggaggtgtccactatgtagctggaacaggaggcctaggaccagcctgatgcaggtctatgaagaccagtggtagtgcccagacttctcctagacatctagtctaaaacattctcctaggaccagggaagcctggcttacagtgccatttctgctgggcaccaccacctgcctgagggcctagctcaccacagcacatcctccaggatctagccttctatctacctcttctctggaatgtttatggtggttcagaagaatgatgactcctctttgctgagaactgttcatccttcttcaagaagaagcttgccaggccgggcacggtggctcacgcctataatcccagcactttgggaggccgaggcaggcggatcacaaggtcaggaattcgagaccagcctgaccaacatggtgaaaccccatctctactaaaaatacaacaattagccaggcatggtggtgcatgcctgtaatcccagctactcagaggctgaggcaggagaattgcttgaacctgggaggcagagggtgcagtgagccgagatcgtgccattgcactccagcctgggcgacattctgtctcaaaaaaaaaaaaaaaaaaaaaa

SEQ ID NO: 221745 - DNA, 1000 bp, Homo Sapiens; identical to SEQ ID NO: 116487

SEQ ID NO: 221746 - DNA, 1000 bp, Homo Sapiens; identical to SEQ ID NO: 116488

SEQ ID NO: 221747 - DNA, 1000 bp, Homo Sapiens
aagttttttccattttaaagtgagaaaacattatatttagacttccataattccaaaatcagaagctatttttaaaattagcattttcttgcatcaccaaatggtattcaattgtttgaagctcaaaatttttaccattccataaatgtttgtgaatttttagacagtgccaatttaaaagtagagatagccaatctgaatacggtgaaattatggggatctctggtgattgggatgaaaactctggccttaaaaggtccacttttagtatataattgcctaattagcaatcatttttattttttgctcactccctggtctgaatctatctgtctattcagatattttttggtaggtttggaaaatggagaagtgagcctaattggtgcctaattgtctggtgtatcattcactttattcagtttgttctatcaatatgatttacccctcaaggttaacctagcaggttgctcagttattatctctcaaggtcacagtactagaaatacttggcttgcatctttcagatgccattcatgttatcaagctcaaattatagttggtcacaggattctaaagtctttatttgacttctcctttttgaactggctcaaatggaaaagtgtagttgcttttaaatgttaaaaataagtttaaactttatatttcccattggtttcccctattttgtcctttctttgtgtgcttgaaatattttatttttcagtttgtcctcatagggaatcaagtattttagctaggtgatgtcttgcaagtacgttccactttgttacaatctactatctgtatatactatttgtatcttaattcttttatgagatgttctgtaacatttttctcactttgacaaatgtttttagactgtacagtcaagatctggcgcttgggggtaagtggaatgatttgctaatattgagaatctgttgtatcaaacataataaactttttttgagatgtgaaaaaaaaaaaaaaaaaaaaa

SEQ ID NO: 221748 - DNA, 1000 bp, Homo Sapiens; identical to SEQ ID NO: 116490

SEQ ID NO: 221749 - DNA, 1000 bp, Homo Sapiens
cctgcattggcctggcctccagctcccactccctttccaacctcacttcccgtagctgccagtatgttccaaaccctcctgggaaggccacctcccactcctgctgcacaggccctggggagcttttgcccacacactttccatctctgcctgtcaatatcgtacctgtccctccaggcccatctcaaatcacaaggatttctctaaccctatcctaattgtccacatacgtggaaacaatcctgttactctgtcccacgtccaatcatgggccacaaggcacagtcttctgagcgagtgctctcactgtattagagcgccagctccttggggcagggcctgggcctcatggcttttgctttccctgaagccctagtagctggcgcccatcctagtgggcacttaagcttaattggggaaactgctttgattggttgtgccttcccttctctggtctccttgagatgatcgtagacacagggatgattcccacccaaacccacgtattcattcagtgagttaaacacgaattgatttaaagtgaacacacacaagggagcttgcttgcagatggtctgagttcttgtgtcctggtaattcctctccaggccagaataattggcatgtctcctcaacccacatggggttcctggttgttcctgcatcccgatacctcagccctggccctgcccagcccatttgggctctggttttctggtggggctgtcctgctgccctcccacagcctccttctgtttgtcgagcatttcttctactcttgagagctcaggcagcgttagggctgcttaggtctcatggaccagtggctggtctcacccaactgcagtttactattgctatcttttctggatgatcagaaaaataattccataaatctattgtctacttgcgattttttaaaaaatgtatatttttatatatattgttaaatcctttgcttcattccaaatgctttcagtaataataaaattgtgggtgg

SEQ ID NO: 221750 - DNA, 1000 bp, Homo Sapiens
aaaatttaaggaggtattcacactcagggtcatgcacttgcacaatgttgagaatgagtaccactctcaccattggtatagccaaaaaagcttggaagtgaccaaggctaggtcacaaaatacactgtggcttcttctttgatctctctttgaccatactgacactgggaaaagcccattcccatgccatgaagacaccaaggcagccctattgagaaatctacctgtcgtggccgggcgcagtggctcacgcctgtaatcccagcactttgggaggccgaggtgggtggatcacgaggtcaggagatcgagaccatcctggctaacacagtgaaaccccgtctctactaaaaatacaaaaaattagccgggtgtggtgtcgggcacctgtagtcccagctactcaggaggctgaggcaggagaagggtgggaacccgggaggcagagcttgcagtgagccgagattgtgccactgcacactccaatctgggtgaaagaccgagactccgcctcaaaaaaaaaaaaaaaagaaagaaagaaagaaagaaagaaatctacctgtcaaggaactaaggtattttgctaacaagcaccaacttgccagccatgtaagggagccatcttggaagcagatcctccagcctccagtcaagtcttcagataattgcaacttcagttgatcttttgaccaagacctcaagagagccagaactacccagctaagccttttactaaatttctgaacttctaacactattagataataagtgcttattgtttaacaccattaattttgagtataatttgttacatagcgacagataactatacagctcaacaactagaaaaataaactgtttacctgccttaattatttatctttagttccttattagttctcaagaaacaaatgctagcttcatatgtatggctgttgctttgcttcatgtgtatggctatttgtatttaacaagacttaatcatcagtaatttgtatac

SEQ ID NO: 221751 - DNA, 1000 bp, Homo Sapiens
tttgccacaattatgtgtttcccatacaaacactggactgcaaaaggaaagagttgaaaaaagtgccaaacaacatccctccagatattgttaaacttgacttgtcatacaataaaatcaaccaacttcgacccaaggaatttgaagatgttcatgagctgaagaaattaaacctcagcagcaatggcattgaattcatcgatcctgggtctttgagatgaaaccctgcaagtagacttacgtgaatgatttttgctgtgccgcttttttagggctcacacatttagaagaattagatttatcaaacaacagtctgcaaaactttgactatggcgtattagaagacttgtattttttgaaactcttgtggctcagagataacccttggagatgtgactacaacattcactacctctactactggttaaagcaccactacaatgtccattttaatggcctggaatgcaaaacgcctgaagaatacaaaggatggtctgtgggaaaatatattagaagttactatgaagaatgccccaaagacaagttaccagcatatcctgagtcatttgaccaagacacagaagatgatgaatgggaaaaaaaacatagagatcacaccgcaaagaagcaaagcgtaataattactatagtaggataaggtagaaattgttctgattgtaattagttttgtattttctatactggtgttagaaaacatatgtttacatttgattaactgtgttgcctatttatgcagggtaatccagctaaaggaagctttctttaattataagtattattgtgactattatagtaatcaagagaatgctatcatcctgcttgcctgtccatttgtggaacagcatctggtgatatgcaattccacactggtaacctgcagcagttgggtcctaatgatggcattagactttcataatgtcctgtataaatgtttttactgcttttagaaaataaagaaaaaaaacttggttcatgttta

SEQ ID NO: 221752 - DNA, 1000 bp, Homo Sapiens; identical to SEQ ID NO: 116496

SEQ ID NO: 221753 - DNA, 1000 bp, Homo Sapiens; identical to SEQ ID NO: 116497

SEQ ID NO: 221754 - DNA, 1000 bp, Homo Sapiens; identical to SEQ ID NO: 116500

SEQ ID NO: 221755 - DNA, 1000 bp, Homo Sapiens
caatggtccatttattgcaaaaaagtgataactcatttaaccaggaactgttgaaaagtatggtaaaaagcattaaaatgaatgatgtctatggaccaatgagtcagattttagagacactgaataagtgtccacattttaaaagacagaggagtttatacagagaaatactatttctctcacttgtggcactgggaagagaaaacattgatatagatgcttttgataaagagtacaagatggcatacgatcgtctcacacctagtcaagtcaagagtacacacaactgtgatagaccaccaagtacaggggtgatggaatgtcgaaaaacctttggagaaccttatctttaagatgtatttgtatgtgtaaacattcaatgtatattgtatagtcagtgtataaaataacacttttagactctaaatattttttcttcaatttttgaaaatacaatttgtaaatggttcaaaagactcagacagcttatgtacagaatgtttgaagaagagaatagtgacaagtggggagaaagccactttgtttctcatttcttttttcttcttctttaactcccctgtaataggaaataaagtatttttgtgatgaggaaatccctaaacaaaattagttgccataaaatatgacaactgctttatggtttcttttggaagagacagattgaaaaatcatgaatggaatctaaacagaaatgtcagatgaacgtatttcctgttttcatagactattcaaatgttttgaccatgaagttgtattatacatattttaaattgtttatagtaagttgatatttttttaatttttaaatttaatatagcaaacttaaaatgaatttaaacttaagcaagcaagcgtgtattttccttgtctgctgctatttgaagtaattagtacagctgcagatctctctgtgtatatctatctatatatatattttttattacttgggagaatgaattttaaaatgtcagtgctagtg

SEQ ID NO: 221756 - DNA, 1000 bp, Homo Sapiens; identical to SEQ ID NO: 116504

SEQ ID NO: 221757 - DNA, 1000 bp, Homo Sapiens
acacaagtgcgaatgttaaatcagctggagaaggagaagtggagaagaaatcagtcagccgcagtgaagagctcagaaaagaagcaagacaattaaaacgggaactcttagcagcaaaacaaaaaaaagtagaaaatgcagcaaaacaagcagaaaaaagaagtgaagaggaagaagcccctccagatggtgctgttgccgaatacagaagagaaaagcaaaagtatgaagctttgaggaagcaacagtcaaagaagggaacttcccgggaagatcagacccttgcactgctgaaccagtttaaatctaaactcactcaagcaattgctgaaacgcctgaaaatgacattcctgaaacagaagtagaagatgatgaaggatggatgtcacatgtacttcagtttgaggataaaagcagaaaagtgaaagatgcaagcatgcaagactcagatacatttgaaatctatgatcctcggaatccagtgaataaaagaaggagggaagaaagcaaaaagctgatgagagagaaaaaagaaagaagataaaatgagaataatgataaccagaacttgctggaaatgtgcctacaatggccttgtaacagccattgttcccaacagcatcacttaggggtgtgaaaagaagtatttttgaacctgttgtctggttttgaaaaacaattatcttgttttgcaaattgtggaatgatgtaagcaaatgcttttggttactggtacatgtgttttttcctagctgaccttttatattgctaaatctgaaataaaataactttccttccacattacatgttaaccattgcagactgcaagcctgtttgtgtccttttaccctaaaatatatgaaggcttccttttcaagatttttttataagaagttcctacagaaagaatatttgtgggaaacctccctttcactaacttcagaatataataaaatattataaataaaatatagaatataaatatgaaaaaaaaaaaaa

SEQ ID NO: 221758 - DNA, 1000 bp, Homo Sapiens; identical to SEQ ID NO: 116507

SEQ ID NO: 221759 - DNA, 1000 bp, Homo Sapiens
agaaaccgccagcccgtgcgcccagaccagcggcgctttgcggaggaggctgagggtgggctgtgccggctgcggatcctggctgcagagcgtggcgatgctggtttctacacttgcaaagcggtcaatgagtatggtgctcggcagtgcgaggcccgcttggaggtccgaggcgagtgagctcagggggccacctgtgctccccccgctaccctccgagccgcgcccctgtctcaggcacctctcggacctcgctgtgtttcactgcctcctgcccacagacccaggcctgccggcccggacccgtcccagcctcccctccccaccccatgcagcccccagggggatagcccatgggcccctgtggaccctccctccccaagtggacacatggctgtgcaggccaggaggcccacagatggactgagtgctgggaaggggcggctgcgaggggtatcaaccccccgagtctctccctgaaggggagcaccgggcgagtgcatgtgctactgctgctacaggcctgtctatctgtttgtctgtctgtgtgtctgtgacagtcagggaaggatgcctcggagctgaggtggggtgagacagagtgggagagattacggcatggcatggaggggcccaaggagcaggggctgttgacaaaggccttaccaggaagggttaggacactgaccattctagaaatgggtttcgaatggcacaacactttctatttcacaaaagaccaaaagccagaggccccaggctctgtgctgatgaacagcctggctgagccctggccctggcaggtttagggcccatttggggccccctccttctctgtcagggctggggtgctctgtctgggaatgagggagttaaccaagtttggtgcaggagcaggggcagggggccactgtagtgagcgtggagaaatttggaaacacctatttcttaactcaaataaagtccagtttgtacctaaaaaaaaaaaaaaaaaaaaaaa

SEQ ID NO: 221760 - DNA, 1000 bp, Homo Sapiens
tgaagggatgccgcagtatcgtaatccctttgaaaaaggtgatctttacataaagtttgatgtgcagtttcctgaaaacaactggatcaacccagacaagctttctgaactagaagatcttctgccatctagaccggaagttcctaacataattggagaaacagaggaggtagagcttcaggaatttgatagcactcgaggctcaggaggtggtcagaggcgtgaagcctataatgatagctctgatgaagaaagcagcagccatcatggacctggagtgcagtgtgcccatcagtaaactctgcaaacaaattgcacaggtggattttctttccacatttgcctgatttgttctcagcaatccagctggagtgtcttatcaatcccagatgaactgagggacatctgttggtctatgtataacttttaaaattggtatagtatctacagagtgtataatttaaactaaccacaaagctttacatcttcattttgactgttccatagcaaaataaagcacttgaaaggaaacaaaactccctttcacacatggattattataagtttcaatcctggtatctgtgcttgatttttatcagttttgtgtaaatttttatgtttcatattttaaatttaaatcccacattgtaaagtttgtacaatttgtcctgaagctttgtgtttggctgcacctgcataagctgctacaaataaaataaaaaatttcatagcctgtatctatcatttaaatgcatggaaaaaaatgggctttgcacacaatgggtttggagctgactgggaacaatggaaaaaattacattagctgtggttgtaaagtttttttgtttttgggttttgttttttttttgttttttttttttttttttttaccattttgtgaaaggtttttgaaaatcgataataaaaagcggttggtgtaaatttaaaaaaaaaaaaaaaaaaaaaaaaaaaaaaaaaaaaaaaaaaaaaaaaaaaaaaa

SEQ ID NO: 221761 - DNA, 1000 bp, Homo Sapiens
taatattcctagtgtgatcagcattgggagttgggtttcagtggggcatgtctatacttagagaaaaaaagtccaaatgaagattttcatgagtcagcccccccgcccgcccccaccccacacccacatcctctcttttccacacacaactatctgtttattttttgtagcagtggccgaaagtcctgcaaggtcataaatctttcagagtgacatcaccaactgtactgcatcttactggatttaggacttctgagatgcttgtgaagtatagatgtggttgtggtcttagattgacagcattagagaagactggttagaacatctggtctcgctggttagtgcctcgttggctgaggactaggtgtgcatttctcctagcttttcatcaggaaatcccaaagtttccaaagctttttgtttacagaataaaacttcaaataaaaccaattcattatttgtccagaaggaagcttggctgagctggccttttaacataggaatgtatttcgttggaaacattctgaaaaatctcagagaactgaacccttacaaactttgttttccctcataaccaaagcttcaggttagaagtttagaaaaatagaatggttgggtacatgatctaaatgtttaatgctaaaggtatatcgtaagggtagtgtttgtttttgaacgataatttagaagttctcatagaaagcgtataacataggtcttcagaaactataaaagaattttcatatagtattaaaatccatagactaaaatctgagaattttttaacatatgcaagtcagccaaacataagctaccaaaataaagagcaatgtgttctggctgttttatacttcaacaattttttccctaagtggtaagcaattactttaaaacatatttttaaaaacatcggtatcgggagctgcggtggctccggccggttgtcctggcacacaaggaggcgaggctatgcgttcgaggccaacctaggcaaaattgg

SEQ ID NO: 221762 - DNA, 1000 bp, Homo Sapiens; identical to SEQ ID NO: 116513

SEQ ID NO: 221763 - DNA, 1000 bp, Homo Sapiens; identical to SEQ ID NO: 116516

SEQ ID NO: 221764 - DNA, 1000 bp, Homo Sapiens
tttttgtattttatctactgtggcctgattttttttttgttttctgcccctccccccatttataggtgtggttttcatttttctaagtgatagaatcccctctttgttgaatttttgtctttatttaaattagcaacattacttaggatttattcttcacaatactgttaattttctaggaatgatgacctgagaaccgaatggccatgctttctatcacatttctaagatgagtaatattttttccagtaggttccacagagacaccttgggggctggcttaggggaggctgttggagttctcactgacttagtggcatatttattctgtactgaagaactgcatggggtttcttttggaaagagtttcattgctttaaaaagaagctcagaaagtctttataaccactggtcaacgattagaaaaatataactggatttaggcctaccttctggaataccgctgattgtgctctttttatcctactttaaagaagctttcatgattagatttgagctatatcagttataccgattataccttataatacacattcagttagtaaacatttattgatgcctgttgtttgcccagccactgtgatggatattgaataataaaaagatgactaggacggggccctgacccttgagctgtgcttggtcttgtagaggttgtgttttttttcctcaggacctgtcactttggcagaaggaaatctgcctaatttttcttgaaagctaaattttctttgtaagtttttacaaattgtttaatacctagttgtattttttaccttaagccacattgagttttgcttgatttgtctgtcttttaaacactgtcaaatgctttcccttttgttaaaattattttaatttcactttttttgtgcccttgtcaatttaagactaagactttgaaggtaaaacaaacaaacaaacatcagtcttagtctcttgctagttgaaatcaaataaaagaaaatatatacccaaa

SEQ ID NO: 221765 - DNA, 1000 bp, Homo Sapiens
agatgttcccttgtaggcccctttcaggtaaccgtcttcacaatgtattttcatcacagtttaaggagcatcagccgcttctcaagtgggtagggaaagcagaaaaacgtacgcaagaggacatggatccaaaatgatgatgaagcatctcccatggggaggtgatggtggggagatgatgggctaaacaggcaacttttcaaaaacacagctatcatagaaaagaaacttgcctcatgtaaactggattgagaaattctcagtgattctgcaatggatttttttttaatgcagaagtaatgtatactctagtattctggtgtttttatatttatgtaataatttcttaaaaccattcagacagataactatttaattttttttaagaaagttggaaaggtctctcctcccaaggacagtggctggaagagttggggcacagccagttctgaatgttggtggagggtgtagtggctttttggctcagcatccagaaacaccaaaccaggctggctaaacaagtggccgcgtgtaaaaacagacagctctgagtcaaatctgggcccttccacaagggtcctctgaaccaagccccactcccttgctaggggtgaaagcattacagagagatggagccatctatccaagaagccttcactcaccttcactgctgctgttgcaactcggctgttctggactctgatgtgtgtggagggatggggaatagaacattgactgtgttgattaccttcactattcggccagcctgaccttttaataactttgtaaaaagcatgtatgtatttatagtgttttagatttttctaacttttatatcttaaaagcagagcacctgtttaagcattgtacccctattgttaaagatttgtgtcctctcattccctctcttcctcttgtaagtgcccttctaataaacttttcatggaaaagctcctgtgccaggagctcagtctgaaaaaaaaaaaaaaaaaaaaaaaaa

SEQ ID NO: 221766 - DNA, 1000 bp, Homo Sapiens
cagcagctgccaggagcacggctctgtccccagcctgggaaagcccctgcccctcctctccctcatcaaggacacgggcctgtccacaggcttctgagcagcgagcctgctagtggccgaaccagaaccaattattttcatccttgtcttattcccttcctgccagcccctgccattgtagcgtctttcttttttggccatctgctcctggatctccctgagatgggcttcccaagggctgccggggcagccccctcacagtattgctcacccagtgccctctcccctcagcctctcccctgcctgccctggtgacatcaggtttttcccggacttagaaaaccagctcagcactgcctgctcccatcctgtgtgttaagctctgctattaggccagcaagcggggatgtccctgggagggacatgcttagcagtccccttccctccaagaaggatttggtccgtcataacccaaggtaccatcctaggctgacacctaactcttctttcatttcttctacaactcatacactcgtatgatacttcgacactgttcttagctcaatgagcatgtttagactttaacataagctatttttctaactacaaaggtttaaatgaacaagagaagcattctcattggaaatttagcattgtagtgctttgagagagaaaggactcctgaaaaaaaacctgagatttattaaagaaaaaaatgtattttatgttatatataaatatattattacttgtaaatataaagacgttttataagcatcattatttatgtattgtgcaatgtgtataaacaagaaaaataaagaaaagatgcactttgctttaatataaatgcaaataacaaatgccaaattaaaaaagataaacacaagattggtgttttttcctatgggtgttatcacctagctgaatgtttttctaaaggagtttatgttccattaaacgatttttaaaatgtacacttgaaaaaaaaaaaaaaaaa

SEQ ID NO: 221767 - DNA, 1000 bp, Homo Sapiens
tgatgaaaggaggagaggctgtctgcctttatgaggagccagtgtctgaattgctgaggagatgtgggaattgcacacgggaaagctgtgtggtttccttttacctttcagctgaccatgaactcctgagcccgaccaactaccacttcttgtcctcaccgaaggaggccgtggggctctgcaaggcgcagatcactgccatcatctctcagcaaggtgacatatttgtttttgacctggagacctcagctgtcgctccctttgtttggttggatgtaggaagcatcccagggagatttagtgacaatggtttcctcatgactgagaagacacgaactatattattttacccttgggagcccaccagcaagaatgagttggagcaatcttttcatgtgacctccttaacagatatttactgaaggaatctaggttgtattttcagtggacaatgggaataaagcatttctaaagcaccgactggagaggaaggcaacagagacaaggagagaagccgagagacatgtctgcgtgctgccacgcatttgagcgattgctctgtgaagagttgtacactgaacactttcaggggaggctgtttacccaggcaatgtcctcaaacaagcctgtgccggggtgtcctggaatctgtgccaggactgtgtttttagcccttcacctctcagctttagcaggacatgaaccagttataacaagatggccctgcagctggttacaagaatgtgacatggcaggatctatggaaccaaatggaaggttttgaggtgatgtaggtctttcacagctagctttggggaatacggaatactcaaataaagtgctttgttattatttcagagggaatggcgattgaaatgttacaacagagatttcttggtggtagctatttgggtaaaggtatatgggtatttttctgtacatgtgaaattatataaaaataaaagttatataaattacattgacaactaaaaaaaaaaaa

SEQ ID NO: 221768 - DNA, 1000 bp, Homo Sapiens
aagtagattgatctaaggcatgctcccagcatttgtccacccacttagtccactctgagtcgattaacctgcatgcagcaacacccaagtccaccccaattaactgaagcaaataccaaagcagttgggagtacatatggtagacaatttgccttaggaagtgacttgaatgtacaaagatacttgatgcacttattttttaatgtgagacagcaagtttataaaacatccatataggattatagatacttaaaggaacacgtgggtgagcgtgtgtgggggtactagaagctgatctgattggtccaacagtttgatgctgagtcatgcgtgttgaatcccacttcagtgcacctgtggcctctcagtcaaacaagttgtgcctttcacagcttctttactactgcaagttcaagactgaaatggcttctatgatcagaactgggaaaacagtgaatcttatggtggaagaggttctcagcaagtgtacagtatttaccttcctttgtcttacattggctttttaaattttccattaatttcaacataattatgggaacaagtgtacagaagaattttttttttaagatatgtgagaacttttcatagatgaactttttaacaaatgttttcatttacaggaaattgcaaagaaaattctcaagtgatagtctttttttttaagtgtttcgtaagacaaaaattgaataatgttttttgaagttctggcaagattgaagtctgatattgcagtaatgatatttattaaaaacccataactaccaggaataatgatacctcccaccccttgattcccataacataaaagtgctacttgagagtgggggagaatggcatggtaggctacttttcagggccttgacaagtacatcacccagtggtatcctacatacttctttcaagatcttcaaccatgaggtaaaagagccaagttcaaagaaccctagcacaaatttgctttgggattttcttttctgga

SEQ ID NO: 221769 - DNA, 1000 bp, Homo Sapiens; identical to SEQ ID NO: 116517

SEQ ID NO: 221770 - DNA, 1000 bp, Homo Sapiens
agagccgcaccaacactgacatcctcgagacgctgaagcggaggggcattggcctcgatgggccagagctggagccggatgaagggcctgaggagccaggagagaagtttcggaggctggcaggcgaagggggtgatccggccttgccccgaccccggctgtatcctgcagctcctgctatgcccagcccagatgtggtatacggggccttaccgccaccaggctgtgaccccagtgggcttggggaagcactgcccgcccagagccgcccatctcccttccgaccagcagcccccaaagccgggcccccaggcctggtgcaccctctcttctcaccaagccacctcaccagcaagacaccacccccactgtacctgccgacggaagggcggaggtcagacctgcctggtggcctggctgggccccgagggggactaaacacctccagaagcctctacagtggcctgcagaacccctgctccactgcaactcccggacccccactggggagcttccccttcctccccggaggccccccagtgggggccgaagcctgggcgaggagggtcccccaacccgcggcgcctccccgccgacccccccagtcagcatcaagtctgagcgcctctctccggcccccgggggccccggcgactttcctaagaccttcccctatcccttgctcctcgcccggtccctggcagagcctctgcggcctgggcccgccctgcgccggctgcccttggccgacggctggccccggtaggagatcacccggtggcaccagcccagagcgctcgccaggtacggcgagggcacgtggggaccccacctccctccaggcctcttcagagaagacccaacagtgacgcccccctccgcggtgggggcttggaggtgggcggctggactcaatccaccctggggggctcctttccttcttcctatttgtgtgtatatccacaaataaaacgcgcgtggcgtccgtggaccaaaaaaa

SEQ ID NO: 221771 - DNA, 1000 bp, Homo Sapiens
ctccatgagcatggcatagtccaccgtgacattaaaggtgccaatatcttccttacctcatctggattaatcaaactgggagattttggatgttcagtaaagctcaaaaacaatgcccagaccatgcctggtgaagtgaacagcaccctggggacagcagcatacatggcacctgaagtcatcactcgtgccaaaggagagggccatgggcgtgcggccgacatctggagtctggggtgtgttgtcatagagatggtgactggcaagaggccttggcatgagtatgagcacaactttcaaattatgtataaagtggggatgggacataagccaccaatccctgaaagattaagccctgaaggaaaggacttcctttctcactgccttgagagtgacccaaagatgagatggaccgccagccagctcctcgaccattcgtttgtcaaggtttgcacagatgaagaatgaagcctagtagaatatggacttggaaaattctcttaatcactactgtatgtaatatttacataaagactgtgctgagaagcagtataagcctttttaaccttccaagactgaagactgcacaggtgacaagcgtcacttctcctgctgctcctgtttgtctgatgtggcaaaaggccctctggagggctggtggccacgaggttaaagaagctgcatgttaagtgccattactactgtacacggaccatcgcctctgtctcctccgtgtctcgcgcgactgagaaccgtgacatcagcgtagtgttttgacctttctaggttcaaaagaagttgtagtgttatcaggcgtcccataccttgtttttaatctcctgtttgttgagtgcactgactgtgaaacctttaccttttttgttgttgttggcaagctgcaggtttgtaatgcaaaaggctgattactgaaatttaagaaaaaggttcttttttcaataaatggtttattttaggaaagctcaaaaaaaaaaaaaaaaaa

SEQ ID NO: 221772 - DNA, 1000 bp, Homo Sapiens; identical to SEQ ID NO: 116518

SEQ ID NO: 221773 - DNA, 1000 bp, Homo Sapiens
gggcccccacccccacccccacccccaccccgggcttccagcaagcggccggccaccgccgactcgccaaagcccagcgccaagaagcagaagaagagcagctcgaaggggtcccggagtgctccaggcacctcgccccgcacctcctcctcctcctccttctcggacaagaagccggccaaggacaagagcagcaccagaggggagaaggtgaaggccgagagtgagccccgggaggccaaaaaggccctggaggtggaggagtccaactcagaggacgaggcctccttcaagtccgagtctgcccagtcaagcccgtccaactccagctccagctcagactccagctcagactcagacttcgagccatcccagaaccacagccaaggacccctgcgctccatggtggaggacctgcagtccgaggagtccgacgaggacgactcttcgtcaggcgaggaggctgccggcaagaccaacccggggagggactccaggttgagcttcagcgacagcgagagtgacaacagcgccgactcctccctgcccagccgtgagcccccacccccccagaagccacccccgcccaacagcaaggtgtcaggccggaggagccccgagtcctgcagcaagcctgagaagatcctcaagaagggcacctacgacaaggcctacacggatgagctggtggagctacaccggaggctgatggcgctgcgggagcgcaacgtgctgcagcagattgtgaatctgatcgaggagactggccacttcaatgtcaccaacaccaccttcgacttcgacctcttctccctggacgagaccaccgtgcgcaaactgcagagctgcctggaggccgtggccacatgaccctgggccgcgtgccgggcccccaccgccggggtcctgggaggctgcagccaggcctcgcctgccctcctctcccgtctcgcctgcttcatttggatatcagagctatggctcagaaaagcaagcatct

SEQ ID NO: 221774 - DNA, 1000 bp, Homo Sapiens; identical to SEQ ID NO: 116522

SEQ ID NO: 221775 - DNA, 1000 bp, Homo Sapiens
gggggaggaggagatgggcctcaccagcagcttctccaagtgaagggcccatgtgtgctcacctctgggaaaagcgggtgagcaggaggcatgaggtacaatgcctgccatcatgggtcagaaatttgaaggatgaagaaatctactgtttgaaatcctcacctttcagacgtattttctttattcacatcccaggagcatccattttaaggaactattctttggaaaaaaacaaaaaacaaaaaaaacaacaaaaaaagctaagttataagtgaactgtttggctgcactgtatgtcacttttgcttgttgtcatgtgaacttggaaactaaggttactcgtgtgcataaaaattctaaatgaaagggtgtggtttccatcaatctgatgctgcccatcgcttgcactggggtctttgtggatcgggcaggagttttcagtgtgttgggtgttgctccttcctatgtgtcttttgaatctgaggctgacatttgcttggaaggccagacccttgctccatcagagagggcagtggcaaaggccagtgaggcagctgtgagttggacagggttcaggtgagatggtgttgtcatttgtgcttagtgttggtggtgctcagggtggataacacgggtcgttctgcagcccgcttcagcacaaataggcagcttaaggcctggctcacaggctgtggggttgatctggctctgcagaggccctaggcagcttgttgactgctgtctgttgatgacgtgtgtgcaaagcaggctctagcaacatgatcactgtccttgccttcctggttctttctctcggttggttgccagggcttgcagatcgcagtgaattttccttggggaacatcgctgttttgtcctagagtgaacttgtggcttatggccagtgctgtttggtggtctgccttctttttaatggtattttcttcctcagagcagaagggctgcattttgcttatcagaagaaggtgcagatttaagg

SEQ ID NO: 221776 - DNA, 1000 bp, Homo Sapiens
cacataagaccgtgtcccaaggagctgatttccaggcccctgaggactggagaccgcttcacccctgcacttcagacaccgtttgtcccccggggcaaggtctccttactctgagcccaggccgttccccttggcttcctccgtccacccaggctgcactgcagtgatggcgcgggaggcaccagctctgtggcctgtgtccagcagctgtgggtctgaaggaatagccagagaggagcacctgaaccccatgggcttggacttcctggggccccgctgggatttcttcgctgctctagctggcaggacacatcccggcctcttccacccattcccccatgtggctgaagacattccaacaatggggtgggcccataatagttagccctcagtcagttcccggagcacagccctgggagggggctatttctctccccactgaaaacatttcaaagctgagttacttgtctgaggcctcatccctcggaagccgtctgactccagagtctgagcccccggctagtaccctatagagagggggctctccaaaggggctgctggggcatgtgtgcctgtggcagaaaagaggagaccctggaattcagcaccctgggtgccattcccagcgtttagtttctagaggcctcagtttctccatcagcttatgggatccttgtctttactgacaagaatggaatagaaatgtaaaagtactctgaaaagcaattgccctgtaacttatctagaaagaaaagaccctgagactccagaatctgctgttgccatagccccatatgtgtgaattctgcaactagccaaggctagttcctttcaattccatttaaaaaacaaaaaccagcaggtgtggtggctcatggcgtaatgggcctgcccaatgctttgggaggccaaggcagatagatcgcttgagcccaggagtttgagacaagccctggcaacatagtgagatcccatttctacaaaaaaaaaaaaaaaaaaa

SEQ ID NO: 221777 - DNA, 1000 bp, Homo Sapiens
tttgtctttcaaactccaaggttcccttgtggccctctcccttaccctgggaaggcctcttggagaccttacccctggctgtttggactttgtatactttaaataatttaactacccttaattacttaaaaaaaaaaaaaagctttatgattttcataacttattgctgattttaatggattgttaatttcagtcctgtagttttattttatgtttagatagggctgggcaaggaaaaagaaaataaagacaaccatatttagcagtgcagttgagttgtgtgttaatgttagactatccctttgtgagtgacactttaacagcattcactgcttctatatatagtgtaccatcttggtcatacattacgcctcaacatatacttgtgctcttcctttgcctccagaagaagtttttccttgattgtgctatgtttcagtggaagaaattctttgaagtagatgtgagtgaaaaactgcatgcctttagaagcccagtatcagaacttgctacgtttcaggtgctagggacttaatgaaaaacaggacaaaacaattcctttttgtggcccaggtaaattatttctggtttcacttataattactaatggctgagtcaagatgttgtctctgtgtttgcttactcttgatcaagtgtgagacagtttgaagactgtgctaccatacaaagtgaatgaagccagtgactaagcttctgtttgttttgttattctcatggccttcgcttgcattatttgggccttcattcagatgaacttgaggtgccattttgttgcatatgtacaggattatgggctggaaagcatttgttataaacctatagtgcacattttaactgccccctaaattacccttccctgggtttgttttccttggggtggtgtagattgtatgagtaagaagtattaattttttaaaagacaaatcaactttgaagacacaaaagttaattggaagaaataaaaactgtgaacgaagaa

SEQ ID NO: 221778 - DNA, 1000 bp, Homo Sapiens
gttaccatgtccatcccccaaggggggccctgcccctcgagtcgatggtgtcccgcatctactcatgtgaactggccttggcgagggctggtctgtgcatagaagggatagtggccacactgcagctgaggccccaggtggcagccatggatcatgtagacttccagatggtctcccgaaccgcctggctctgccggcgccctcctcacgtcaggagcaagcagccgtggacccctaagccgagctggtggaaggcccctccctgtcgccagccgggccctcatgctgaccttgcaaattcagccgctgctttgagcccaaaatgggaatattggttttgtgtccgaggcttgttccaagtttgtcaatgaggtttatggagcctccagaacagatgccatcttcctgaatgttgacatgccagtgggtgtgactccttcatttttccttctcccttccctttggacagtgttacagtgaacacttagcatcctgtttttggttggtagttaagcaaactgacattacggaaagtgccttagacactacagtactaagacaatgttgaatatatcattcgcctctataacaatttaatgtattcagttttgactgtgcttcatatcatgtacctctctagtcaaagtggtattacagacattcagtgacaatgaatcagtgttaattctaaatccttgatcctctgcaatgtgcttgaaaacacaaaccttttgggttaaaagctttaacatctattaggaagaatttgtcctgtgggtttggaatcttggattttccccctttatgaactgtactggctgttgaccaccagacacctgaccgcaaatatcttttcttgtattcccatatttctagacaatgatttttgtaagacaataaatttattcattatagatatttgcgcctgctctgtttacttgaagaaaaaagcacccgtggagaataaagagacctcaataaacaagaataatcatgtgaa

SEQ ID NO: 221779 - DNA, 1000 bp, Homo Sapiens
tggagccgacacatcctgcagcagacactgatggacgaggggctgcggctcgcccgcctcgtctcccacgaccgcgtgggccgcctcagcccctgtgtgcctgcgaagccacctctcgcagagttcgaggaagggctgctggacagatgtcctgccccaggaccccatcccgcgctggtggagggtcgcaggagcagcgtgaaagtggaggctgaggccagccggcagtgagggttggactggtgtcttcagacccaggacctcagacttctggctcacacagacccccacgctctccatccccggaatctagtcacaaccctggatccttcctctgcccttctcctgcctccccacctgctccatgggcataagactgtggggcttcaagcaataacaagcagaggcctggagagaggacacaaggagggtgcgtggtgccctcacccctgcccagagcgagggggcaaggactctgcctccagggcatctggggttttcccctccctcacacaacacactcccattctctttaggtttgcaccagtggtgtgagcagttggactcagtttggacaagggggaaagggggacttccctgggaaggtccagctaaaagtggcaacatttgcccccagaattgggggcctgggaacactggacctgctccttctcccctctccttccccgtttttgtgcttctggtttgtttctttaattaatttaacaagtgctgcagtttgccctcccattcccatctatcccccaagtcctttgcaatttcttccctgccctacataggggcggtgggtgtgggatcccttcactggccccctcgggaggcctgggttggactcagggtctcctccagctgggggctggaccgcagcacctatctgagcagttagagcgtctttcttttcagattgtgtacagtagattatttattttgttattttggaataaaatttattttatggcttaggaaaaaaaaaaaaaaa

SEQ ID NO: 221780 - DNA, 1000 bp, Homo Sapiens
cacaaatgtggagtgtctgcgtccaatacacgcgtgtgctcctctccttactccatcgtgtgtgccttgggtctcagctgctgacacgcagcctgctctggagcctgcagatgagatccgggagactgacacgaagccagcagaggtcagaggggactctgaccacagcccgctctctggctgtctgtctgcagtgcccggctgagggtgggaggcaaacacgccttgttcctgctcttcccagttcagcttggtgggagaaagtcattcgcgtggctcgggacgctcatgtaaatttggttttggtgctcaagggttctttcctcccaggggcaggtgtttctttcctgtttgtcttgtgtcttgagagcttggccttatgaccagtgagaactctctccctggtctctgccagcccaagcatcactgcccgaggcgccagctcagtttcaccgtccacgtccacaaggggcttttcccaccttcacctttgtcgctgggtcagtgctggaaagcgcccctcactcctgcgctgacaagggcccttctctactgtctgtggggtggttccgggctgggggggctgcctcctttgcacctgattttgaaggtgtctctttcatccatggttaagtcataaaaagcttattggttttggttttgactcacctgaaagtttttttggtttaaaagaagaataggcggggcacggtggctcatgcctgtaatcccagcactttgggaggctgaggcaggtggatcacgaggtcaggagatcgacaccatcctggctaacacggtgaaaccccgtctctactaaaaaatacaaaaaattagctgggtgtggtggtgggggtgggcgcctgtagtcccagctacgtgggaggctgaggcagcagactggtgtgaacccgggaggtggagcttgcagtgagccgagatcgcgccactgcactccagcctgggcgacagagcgagactccatctcaaaaaaaaaaaa

SEQ ID NO: 221781 - DNA, 1000 bp, Homo Sapiens; identical to SEQ ID NO: 116529

SEQ ID NO: 221782 - DNA, 1000 bp, Homo Sapiens; identical to SEQ ID NO: 116530

SEQ ID NO: 221783 - DNA, 1000 bp, Homo Sapiens
cagccgtgccttcgctgaccgctccaacctgcgggcccacctccagacccactcagatgtcaagaagtaccagtgccaggcgtgtgctcggaccttctcccgaatgtccctgctccacaagcaccaagagtccggctgctcaggatgtccccgctgaccctcgaggctccctcttcctctccatacctgcccctgcctgacagccttccccagctccagcaggaaggaccccacatccttctcactgccatggaattccctcctgagtgccccacttctggccacatcagccccacaggactttgatgaagaccattttctggttctgtgtcctctgcctgggctctggaagaggccttcccatggccatttctgtggagggagggcagctggcccccagccctgggggattcctgagctggcctgtctgcgtgggtttttgtatccagagctgtttggatacagctgctttgagctacaggacaaaggctgacagactcactgggaagctcccaccccactcaggggaccccactcccctcacacacacccccccacaaggaaccctcaggccaccctccacgaggtgtgactaactatgcaataatccacccccaggtgcagccccagggcctgcggaggcggtggcagactagagtctgagatgccccgagcccaggcagctatttcagcctcctgtttggtggggtggcacctgtttcccgggcaatttaacaatgtctgaaaagggactgtgagtaatggctgtcacttgtcgggggcccaagtggggtgctctggtctgaccgatgtgtctcccagaactattctgggggcccgacaggtgggcctgggaggaagatgtttacatttttaaaggtacactggtatttatatttcaaacattttgtatcaaggaaacgttttgtatagttatatgtacagtttattgatattcaataaagcagttaatttatatattaaaaaaaaaaaaaaaaaa

SEQ ID NO: 221784 - DNA, 1000 bp, Homo Sapiens
ctgttggtggggtcagggtccaagaggaatgggtgttctgtggcctcgagtcctctcctgtttgcgaaaataccagttttgctctctgtgggacaaagcactgctgatgaagtccccgtgggctcatccgggctggaattcttggtttttcagccattccctgcagagtcactcaatcatcaagtccctcacagccatttctgttcccagaggagccaggcctgcagctggctgctcaggagatggcctcattcctcctgttctcccagtttgctttccacttaagacaaagccttgtctatgtggggggcggggaccggggaaagagggaggctgaaatgtttattctgcttctcccgtgtttcatgccatctcgcgtcccccttcctgcacatgggtgtgaatgcacacacatacgcgtacacacaggacttggtctgctggcctggcctcttctgcccaggtgggttggaacacgtttgctgcctgagcctgtgccactgagcatgttaggtggagcagttggtgtggcacgtgcggggtgttggcaccggaggcatggagaagcacaggctgtactgccaggctgcgatgcgtgctggcccccgcacaggctcctgtgtgcagggactgattcctcagcacacgaggcttccacaacccagtctgctccatagcactctggcccaccctgtctgcaggtgaaacaggagggctgtttgcctctgccccatccccccgactgtgttcaggagtcccaccttgcatttcagacatgggctggcagtctgttggacttctcttcaggaagaaaaagcatcagggggaaatggaatgcccctgccccaggaacatggcagaagcacaggttctgtacctcagatggactcctgctgggccttcggggtctcagttgacttcccccagattctgattctacagctgcagaatgtatataacgcaataaaagcaaatgtttgaaccaaaaaaaaaaaaaaaa

SEQ ID NO: 221785 - DNA, 1000 bp, Homo Sapiens
ggcggatgtttcccaccttccaagtgaagctcttcggcatggatcccatggccgactatatgctgctcatggacttcgtgccggtggacgataagcgctaccggtacgccttccacagctcctcctggctggtggcggggaaggccgaccctgccacgccaggccgcgtgcactaccacccggactcgcctgccaagggcgcgcagtggatgaagcaaatcgtgtccttcgacaagctcaagctgaccaacaacctactggacgacaacggccacattattctgaattccatgcacagataccagccccgcttccacgtggtctatgtggacccacgcaaagatagcgagaaatatgccgaggagaacttcaaaacctttgtgttcgaggagacacgattcaccgcggtcactgcctaccagaaccatcggatcacgcagctcaagattgccagcaatcccttcgcgaaaggcttccgggactgtgaccctgaggactggccccggaaccaccggcccggcgcactgccgctcatgagcgccttcgcgcgctcgcggaaccccgtggcttccccgacgcagcccagcggcacggagaaagggctggtcacagaaggctctgggctccaacctggcttgctggacgtgctcttgaagcccccaagtaagaagtctgagtccctgagaccaccacactgcaaggacacttgaaggtactcaggtttcagagcccaagtcaggaggtcaagtgtgcatgcaagaggtggcaggggacagatgtgctgctgttcccaggccacctgcacagctggatggtggaagcagttcacttaaaggccatgagttactcgggaggctgaggcaggaggatcacttgagcctattagttggaggctgcagtaagctatgatcatgccactgcactccagcctgggtgacagagtgagacccccactgtccctggtctcttaaaagaaaaaacaaacaaacaaaccaaaaaa

SEQ ID NO: 221786 - DNA, 1000 bp, Homo Sapiens; identical to SEQ ID NO: 116532

SEQ ID NO: 221787 - DNA, 1000 bp, Homo Sapiens; identical to SEQ ID NO: 117415

SEQ ID NO: 221788 - DNA, 1000 bp, Homo Sapiens; identical to SEQ ID NO: 116534

SEQ ID NO: 221789 - DNA, 1000 bp, Homo Sapiens
ctgatggagcggctctctgttgactatggcaagaaatccaagctggaattctccatctacccagccccccaggtgtctacagccgtggtcgagccctacaactctatcctgaccacccacaccaccctggagcactcagactgtgccttcatggtggacaacgaagcaatctatgacatctgccgccgcaacctagacatcgagcgcccaacctacaccaacctcaatcgcctcattagccaaattgtctcctccatcacagcttctctgcgctttgacggggccctcaatgtggacctgacagagttccagaccaacctggtgccctaccctcgcatccacttccccctggccacctatgcaccagtcatctctgcagaaaaggcataccacgagcagctgtcggtggcagagatcaccaatgcctgctttgagcctgccaaccagatggtaaagtgtgatccccggcacggcaagtacatggcctgctgcctgctgtaccgtggagatgtggtgcccaaggatgtcaacgctgccattgccgccatcaagaccaagcgcagcattcagtttgtggactggtgccccacaggcttcaaggttggtatcaactaccagcctcccactgtggtgcctgggggtgacctggccaaggtgcagcgtgccgtgtgcatgctgagcaacacgaccgccatcgccgaggcctgggcccgcctggaccacaagttcgacctgatgtatgccaagagggcgtttgtgcactggtatgtgggtgagggcatggaggagggtgagttctccgaggcccgtgaggatatggctgccctggagaaggattatgaggaggtgggcatcgactcctatgaggacgaggatgagggagaagaataaagcagctgcctggagcctattcactatgtttattgcaaaatcctttcgaaataaacagtttccttgcacggttaaaaaaaaaaaaaaaaaaaaaaaaaaaaaaaaaaaa

SEQ ID NO: 221790 - DNA, 1000 bp, Homo Sapiens
tgccttacactggcgtcctctcctgagtccctccgcactctccatcagcaacctcacacctgccttcagacccggctgcaacttcctaagctgcccctgccccagctcctctctgcaacccagccctctcctgagctctaggctgggattacacccgctggagggacactcaccccatctgctcccacggcagcaccatcaactcaacaagtcagaagccaagtggatcatctgtgtccccttcccccacaatccctcctttttctagtaaaagacccgtgatcccgtcagccacccagtctgagatgctgacgttatcttcgactattcttccctgtcctgccttgctaattcttcccactagcactaatctcgactctttgtcacttggactatttcagcaacagtctcatctcccagattacctctgtgcacactgacacgtggtcccgtccatcctgaacatgcacagtgattttcctctcccgttgcacacaaacctttaaaagttccccggcccgtgaacaaatgtacaattctctattctgacattacagaccaccggataaggccccattcttcctttacaccctcccctggtcagcctaggagagttgtttttcctggaaagggtgcctgcgttttactgtctctgtgcctttggtcttgctatccccatcccctggaatgctcccttttcttcccttcaaagcccatgcggaaaccacgtccttcatgaagccctccctgatgtaccaaccactgggatctctccctctgctgaaccaccgtagcactttatttgtacctttctcatggcacttaccatattctgccttgtattatagttatttgtgcacttgtcctttgactgttcttagactgtaagcttgccaagggcagggactgtgttttattcatctgtatccatcacagcactaggcgtggtgcatagcacacagcagttgctcaataaatgtttgttggattaaatccttaa

SEQ ID NO: 221791 - DNA, 1000 bp, Homo Sapiens
tcacaggggaccccaacaaaaccagaggcgctccagaggcgttaatggccaactccggtgagccatggagcccctcttatctgggcccaacctcaaataaccattccaagaagggacattgtcaccaagaaccagcatctctggagaaacagttgggctgttgcatcgagtaatgtcactggactcggcctaaggtttcctggaacttccagattcagagaatctgatttagggaaactgtggcagatgagtgggagactggttgcaaggtgtgaccacaggaatcctggaggaacagagagtaaagcttctaggcatctgaaacttgcttcatctctgacgctcgcaggactgaagatgggcaaattgtaggcgtttctgctgagcagagttggagccagagatctacttgtgacttgttggccttcttcccacatctgcctcagactggggggggctcagctcctcgggtgatatctagcctgcttgtgagctctagcagggataaggagagctgagattggagggaattgtgttgctcctggaggaagcccaggcatcattaaacaagccagtaggtcacctggcttccgtggaccaattcatctttcagacaagctttagagaaatggactcagggaagagactcacatgctttggttagtatctgtgtttccggtgggtgtaataggggattagccccagaagggactgagctaaacagtgttattatgggaaaggaaatggcattgctgctttcaaccagcgactaatgcaatccattcctctcttgtttatagtaatctaagggttgagcagttaaaacggcttcaggatagaaagctgtttcccacctgtttcgttttaccattaaaagggaaacgtgcctctgccccacgggtagagggggtgcacgttcctcctggttccttcgcttgtgtttctgtacttaccaaaaatctaccacttcaataaattttgataggagacaaaaaaaaaa

SEQ ID NO: 221792 - DNA, 1000 bp, Homo Sapiens
tagagccttgttctatggaggactggcaggtgtgtgccagctacttgaagaccgctcgtgttaacatgactgtccgacaggtcctggccacagaccagaatttccctctagaacccatcgaggatgaaaaaaagagacatcagtacagaaggtttctgccatctggatgaccagaatagcgaagtaaaacgggccaggataaaccctgacagctgagacttggagatcccatcctttttactcaggcacctgcttaccgtaaatgatcatgttattgtgtattgccgtggacttcagcacccagacaagccaaaaacagagacagggaagaactcattgttgatcacactgttgccttggaacccacgcagaagtaaactcatccactttgctcagagaagtgtttgacatggtctgttcctagttacatgttggctgtaatgtatgttgagaagtcagtccaaggaggtatgttcttccacaacagccttctcagcctctgctatttcctttgaggaaggtagaagtgagtttccatgtttgcagagtatttaaatacctcagattttattaatgagaaatacagtacccctccctccactccatctggtaatttatggtaaaattgtggttctgtgaaccagctattagtctcatcttcttaactccctcaggcatcatcaaattctttgatcttctcttccacctctctggctctcatggaagaatcctttacacatgaaaacaatggaactggaaaatcttgtcttttagaaaagaaattaatcacaactatctctcttgcctaaaagataaatataggtaaacccaaggaaaggggaatttagtttctctacatgtcatttcggtctccaaactccctgttggctttttaatgcaattttaattgttggaataaaaaagtcccaagggtgttttgttactgttttctccatgaataaactcacttgattttaaaaaaaaaaaaaaaaaaaaaaaa

SEQ ID NO: 221793 - DNA, 1000 bp, Homo Sapiens
tgaaactccatgaagacttttgcagccagttcccaccaatatgccccagacgtgagacaaacaaggacttttttttttatatagagccatccataaaatcctaagcccttttattaatgtataaccaggagaacatctgtgccaacggttggactttttatggctgagattcgggaggaagtgtgacaccaagcaggagaggaagaatgattttctttgtacttaggttttctaaggacattgttttaatctgtatcgtgccaaagttgtatcactgttaaacttctgaagacataaccagttgagtcttatttcaagatatgttctcaagccaattgtgtgcttctcttgtttctgtgattgctttctagccaaagcgaagcttgtacaggttgagtatcccttatccaaaatgcttggaaccagaagtgtttcaaattttagattattttcagattttggaatgtttgcatatacataatgagatattttgggaataggacccgagcctaaacacaaaattcattgatgtgtcagttacaccttatccacatagcctgagggtaattttatacgatattttaaatagttgtgtacatgaagcatggtttgtggtaacttatgtgaggggttttcccattttttgtcttgttggtgctcaaaaagttttggattttggagcatttcggattttggatttttggattagggttgctcaacccatattattggctgtacatcctggtcacttctgacttctgtttttactaatggaagctttgcaaattgaattctcagtgagttgtatatttatacacctggcttgaagccttaattgtatataatgatgctttttaaaaaatgctatttggaagactatttatttctcgtgtatataatgtatataaaaaaatatggttagtgtttacctaaggttaaccaatttcaagattaaaatttttaaatagtaaaataataaaaaattataaagttcttaaaa

SEQ ID NO: 221794 - DNA, 1000 bp, Homo Sapiens
tagttgttattgtggttgttattgttctttaggggtaggttcccaatatgtggtctttaaataattatctaatggtgtttaaaaagatgtttattctgtttgtcaggtacaaagatatttatgatacatgtatgacttgtctaagttattaacattttctctagccttaggtaatgcatgaaagcacatgtttcagtgccactcacataagaagtgcccggccaggcaaggtggctcaggcccgtaatcctagcactttgggaggcaaggcagacagatcaccagaggtcaggagttcaagaccagcctggccaacatggtgaaacaccatctctactaaaaaatacagaaattacccgggcataatgacgtgcacctgtaatcccagctacttgggaggctgcagcaggagaatcacttgaacccaggaagcagaggctgcagtgtgccgagatcacgccactgcactcgagcatgggtgacggagcaagactgtctcaaaaaaaaaaaaaaacagtgttgagatcctttaagtattattgtgcacatgtgcaaatatttctaagtattaggaatggaattattaggtcaaaagataacttcattttttgtgtttatagctatagctgggttgcaagctttctattatttgcttgctatatcttcattttaattctttgtgttttatgttagtgtttcttatgtctgtttttgttatctgagtggttttatcttttaataggctaatttaacccattcatatttgtaattattgtattatttagacataattcggaagccctattttatttgtagttatactattgtttagggtttttttctattaagctttttgttggattgactgtataatttttttcttctagtattctttgaaaatttgaaaattgttatattttatgtctagtgttctttgaaaataattctttgaaaattatttttatgtcctaattttaccattaaaattatgaccacttga

SEQ ID NO: 221795 - DNA, 1000 bp, Homo Sapiens; identical to SEQ ID NO: 116538

SEQ ID NO: 221796 - DNA, 1000 bp, Homo Sapiens
tgtacctacgtagatgtggacggggcctggcgcaccaccagctgtgacaccaagctgcagggggctgtgtgtggggttagcagtgggccccctcctccccgaagaataagctaccatggcagctgtccccagggactggcagactccgcgtggattcccttccgggagcactgctattctttccacatggagctgctgctgggccacaaggaggcgcgacagcgctgccagagagcgggtggggccgtcctgtctatcctggatgagatggagaatgtgtttgtctgggagcacctgcagagctatgagggccagagtcggggcgcctggctgggcatgaacttcaaccccaaaggaggcactctggtctggcaggacaacacagctgtgaactactccaactgggggcccccgggcttgggccccagcatgctgagccacaacagctgctactggattcagagcaacagcgggctatggcgccccggcgcttgcaccaacatcaccatgggtgtcgtctgcaagcttcctcgtgctgagcagagcagcttctccccatcagcgcttccagagaacccagcggccctggtggtggtgctgatggcggtgctgctgctcctggccttgctgaccgcagccctcatcctttaccggaggcgccagagcatcgagcgcggggcctttgagggtgcccgctacagccgcagcagctccagccccaccgaggccactgagaagaacatcctggtgtcagacatggaaatgaatgagcagcaagaatagagccaggcgcgtgggcagggccagggcgggaggagctggggagctggggccctgggtcagtctggccccccaccagctgcctgtccagttggcctatggaagggtgcccttgggagtcgctgttgggagccggagctgggcagagcctgggctggtggggtgccaccctcccacaagggctgggctgagacccagctgagtgcaccgtggaagggcg

SEQ ID NO: 221797 - DNA, 1000 bp, Homo Sapiens
acactggaccagactacgtcagaggaggctccagggggcaccgagctgatccaaactcctctagcctcgagcacagaccaccagacccccccaacctcacctgtgcagggaactacaccccagatatctcccagtacactgattgggagtctcaggaccttggagctaggcagcgaatctcagggggcctcagaatctcaggccccaggagaggagaacctactaggagaggcagctggaggtcaggacatggctgattcgatgctgatgcagggatctaggggcctcactgatcaggccatattttatgctgtgacaccactgccctggtgtccccatttggtggcagtatgccccatacctgcagcaggcctagacgtgacccaaccttgtggggactgtggaacaatccaagagaattgggtgtgtctctcttgctatcaggtctactgtggtcgttacatcaatggccacatgctccaacaccatggaaattctggacacccgctggtcctcagctacatcgacctgtcagcctggtgttactactgtcaggcctatgtccaccaccaggctctcctagatgtgaagaacatcgcccaccagaacaagtttggggaggatatgccccacccacactaagccccagaatacggtccctcttcaccttctgaggcccacgatagaccagctgtagctcattccagcctgtaccttggatgaggggtagcctcccactgcatcccatcctgaatatcctttgcaactccccaagagtgcttatttaagtgttaatacttttaagagaactgcgacgattaattgtggatctccccctgcccattgcctgcttgaggggcaccactactccagcccagaaggaaaggggggcagctcagtggccccaagagggagctgatatcatgaggataacattggcgggaggggagttaactggcaggcatggcaaggttgcatatgtaataaagtacaagctgtt

SEQ ID NO: 221798 - DNA, 1000 bp, Homo Sapiens
ctccttcaagatgaagatgtccgtcatcctgggcgtcgtgcacatggcctttggggtggtcctcggagtcttcaaccacgtgcactttggccagaggcaccggctgctgctggagacgctgccggagctcaccttcctgctgggactcttcggttacctcgtgttcctagtcatctacaagtggctgtgtgtctgggctgccagggccgcctcggcccccagcatcctcatccacttcatcaacatgttcctcttctcccacagccccagcaacaggctgctctacccccggcaggaggtggtccaggccacgctggtggtcctggccttggccatggtgcccatcctgctgcttggcacacccctgcacctgctgcaccgccaccgccgccgcctgcggaggaggcccgctgaccgacaggaggaaaacaaggccgggttgctggacctgcctgacgcatctgtgaatggctggagctccgatgaggaaaaggcagggggcctggatgatgaagaggaggccgagctcgtcccctccgaggtgctcatgcaccaggccatccacaccatcgagttctgcctgggctgcgtctccaacaccgcctcctacctgcgcctgtgggccctgagcctggcccacgcccagctgtccgaggttctgtgggccatggtgatgcgcataggcctgggcctgggccgggaggtgggcgtggcggctgtggtgctggtccccatctttgccgcctttgccgtgatgaccgtggctatcctgctggtgatggagggactctcagccttcctgcacgccctgcggctgcactgggtggaattccagaacaagttctactcaggcacgggctacaagctgagtcccttcaccttcgctgccacagatgactagggcccactgcaggtcctgccagacctccttcctgacctctgaggcaggagaggaataaagacggtccgccctggcagtgaaaaaaaaaaaaaaaaaaaa

SEQ ID NO: 221799 - DNA, 1000 bp, Homo Sapiens
aaacatgttgaagctctttactgtaaaggcaagccagcatgtgtgtccacacatacataggatggctggctctgcacctgtaggatattggaatgcacagggcaattgagggactgagccagaccttcggagagtaatgccaccagatcccctaggaaagaggaggcaaatggcactgcaggtgagaaccccgcccatccgtgctatgacatggaggcactgaagcccgaggaaggtgtgtggagattctaatcccaacaagcaagggtctccttcaagattaatgctatcaatcattaaggtcattactctcaaccacctaggcaatgaagaatataccatttcaaatatttacagtacttgtcttcaccaacactgtcccaaggtgaaatgaagcaacagagaggaaattgtacataagtacctcagcatttaatccaaacaggggttcttagtctcagcactatgacattttgggctgactacttatttgttaggcgggagctctcctgtgcattgtaggataattagcagtatccctggtggctacccaatagacgccagtagcaccccgaattgacaacccaaactctccagacatcaccaactgtcccctgcgaggagaaatcactcctgggggagaaccactgacccaaatgaattctaaaccaatcaaatgtctgggaagccctccaagaaaaaaaatagaaaagcacttgaagaatattcccaatattcccggtcagcagtatcaaggctgacttgtgttcatgtggagtcattataaattctataaatcaattattccccttcggtcttaaaaatatatttcctcataaacatttgagttttgttgaaaagatggagtttacaaagataccattcttgagtcatggatttctctgctcacagaagggtgtggcatttggaaacgggaataaacaaaattgctgcaccaatgcactgagtgaaggaagagagacagaggatcaagggcttt

SEQ ID NO: 221800 - DNA, 1000 bp, Homo Sapiens; identical to SEQ ID NO: 116544

SEQ ID NO: 221801 - DNA, 1000 bp, Homo Sapiens
ttaagaagtggcatgtgccttgaaagggggcagaatgttcagtcggtcgtgtttttaacacagagtctctagaagaggtgcagacatcccgtctgactgtccctgtggactctctcagttgtatgttgctataatcctccaaatcaaagctctttctgcttgtgcaagattgttcctattaaacagttttaactaaccttttataatctggagagaatactttttaaggcttttgaactatctttttttaaaaaaaaaaaaaagcccacatcttatactccaatgagtgtgtttgtgagtttttatcctgtttgaattttgatgtcgtccaggcgtcctgggatcagggtagacacgtggagtgctggtgctgagctgtttgagaagctctgtgtgggtgtttctgtggtcaggtaggctgggctgtgaacagcactgctccacatggtgtcggctcacagagccaccgcaactctgcccagcgggagtgacaccactgatgccacagaagcctttatcgttaggggcaaaagcagacatctctggtagcaggagctcagtgtggtgctcttcagccacgcagaaagctcacgtgcctgcagggccaggaaagggaaatgatcgtttcttttgtattaggaaaaacaagacttagacttcccgagttgtgcagagtgacgtctgtactttttatacttagaacatttggtcaagttttgtaaccaaaccttagggaattgagagggaaactttatggtacgtttaccttttttcctttttatatgaattattttgtacaaagttcagagagcggtacctttcctactgtcttttctttgactccatggaggaatttgtaacgatcggtgtgacctgaaagggtttgtgatacagcggtcactattttctcttaacacataggaaaaaagttcagacatcgctacaataaatgtgctttatttgatccaaaaaaaaaaaaaaaaaaaaaaaaaaaaaaaaa

SEQ ID NO: 221802 - DNA, 1000 bp, Homo Sapiens
acccagaaagttatagaggaagcccactaaaggactttcacatgtctgaattatcctgcaacataactctgctgatcgtcaccatcggtgccaccatgctggtgttggctgtgactgtgacctccctctgcatctacttggatctgccctggtatctcaggatggtgtgccagtggacccagactcggcgcagggccaggaacatacccttagaagaactccaaagaaacctccagtttcatgcttttatttcatatagtgaacatgattctgcctgggtgaaaagtgaattggtaccttacctagaaaaagaagatatacagatttgtcttcatgagaggaactttgtccctggcaagagcattgtggaaaatatcatcaactgcattgagaagagttacaagtccatctttgttttgtctcccaactttgtccagagtgagtggtgccattacgaactctattttgcccatcacaatctctttcatgaaggatctaataacttaatcctcatcttactggaacccattccacagaacagcattcccaacaagtaccacaagctgaaggctctcatgacgcagcggacttatttgcagtggcccaaggagaaaagcaaacgtgggctcttttgggctaacattagagccgcttttaatatgaaattaacactagtcactgaaaacaatgatgtgaaatcttaaaaaaatttaggaaattcaacttaagaaaccattatttacttggatgatggtgaatagtacagtcgtaagtaactgtctggaggtgcctccattatcctcatgccttcaggaaagacttaacaaaaacaatgtttcatctggggaactgagctaggcggtgaggttagcctgccagttagagacagcccagtctcttctggtttaatcattatgtttcaaattgaaacagtctcttttgagtaaatgctcagtttttcagctcctctccactctgctttcccaaatggattctgttg

SEQ ID NO: 221803 - DNA, 1000 bp, Homo Sapiens
ggcgccagggcccggctttgggatgagcagtgctgggcctggcttcccccaggcagtgccacccactggggcctttgccagctccttcccagcaccgctgttccccccgcagaccccgcttgttcagcagcagaatggctcttccttcggggacttaggatcagccaagttggggcagaggccactgagccagccagctgggatctccaccaaccccttcatgactggaccctcatcaagcccattcgcctccaaacctccaaccaccaaccccttcttgtagcactgtgtttttggggggcctcttccctgccttctggggcccctctgctccctagagctctggtgaccacttgcctgtgggcatttctatgggccttggggatggtggaggtgctaatgctttgcttggggcctacaggtgaaaggtggctgccctcagattccacaaagcctctctcccctccctcgtcccacccccacccaggcaggaagcccaggaggagtgcgggcagggcctgacctggaggagtgatggttgagggggagggatttttttcaaatgatcagtcccctgtggaacagctcttccctgggcctagctcgccagcgctgtgctcctcatggacgggagcgcagtggggaaggtaggggaaagatgaggcacagtgttgatggggcagtgaccagacagtcctgagacccagaaggcccaggtggcccaagtgctcttggtggcccagcttggccagcacacactttcctcctgcagcaccccctgctgaaggggtcccccattgttttgcttccccagcgcccaggatgagcggtttaccatcgagcttacccgggcccggctcctgtcaagcactttagttagctgttggtgtcatgtttggataccagtgttttatatttatacatagagaggattttctaaaaaaaaaaaaaaaaaaaaaaaaaaaaaaaaaaaaaaaaaaaaaaaaaaaaaaaaaaaaaa

SEQ ID NO: 221804 - DNA, 1000 bp, Homo Sapiens
acggctggggttgcccagctccctttacaccggtgtgatatttacgggaaagcgtgtgctgagtgttgcctcgcccgagacccttactgtgcttgggatggttctgcatgttctcgctattttcccactgcaaagagacgcacaagacgacaagatataagaaatggagacccactgactcactgttcagacttacaccatgataatcaccatggccacagccctgaagagagaatcatctatggtgtagagaatagtagcacatttttggaatgcagtccgaagtcgcagagagcgctggtctattggcaattccagaggcgaaatgaagagcgaaaagaagagatcagagtggatgatcatatcatcaggacagatcaaggccttctgctacgtagtctacaacagaaggattcaggcaattacctctgccatgcggtggaacatgggttcatacaaactcttcttaaggtaaccctggaagtcattgacacagagcatttggaagaacttcttcataaagatgatgatggagatggctctaagaccaaagaaatgtccaatagcatgacacctagccagaaggtctggtacagagacttcatgcagctcatcaaccaccccaatctcaacacgatggatgagttctgtgaacaagtttggaaaagggaccgaaaacaacgtcggcaaaggccaggacataccccagggaacagtaacaaatggaagcacttacaagaaaataagaaaggtagaaacaggaggacccacgaatttgagagggcacccaggagtgtctgagctgcattacctctagaaacctcaaacaagtagaaacttgcctagacaataactggaaaaacaaatgcaatatacatgaacttttttcatggcattatgtggatgtttacaatggtgggaaattcagctgagttccaccaattataaattaaatccatgagtaactttcctaataggcttttttttcctaataccaccg

SEQ ID NO: 221805 - DNA, 1000 bp, Homo Sapiens; identical to SEQ ID NO: 116548

SEQ ID NO: 221806 - DNA, 1000 bp, Homo Sapiens
catcaagatgccaatccctttgtgggcttcaccagtgcccaagtctctatggagaatgagaactggaagccactgctaccgtctacccagcaccagtagtgccgatgtgccacactgcccagttgaggcccctcacgctctgtgcccctagatccttcaggtccccaccctcagctgtcaccaccaccctccccaggggactccatctgagatgaggcctcgtcctcctggaagctgaggctgagaagggtggagcttggccctggggaaggcagaccagggtctgatggcttctagggatgctctgcgtgtgtctcagcaccgctatctcagccactttcagccttatgcacgtagaatgaccacagccactcgcatccgtatagcactttaaagtttctgcagtcctttgacacataggatctcatcgagcctcacgtctactcccttctgcagatgaggaaaccgagagaagtggcccaaggtcacgcaactctgagatgccacatttcatttgatcttgtacacattttcttttattccttcttttttcctcctttcatttcccactacgcacaaagagtttataaacactgttctcagaagagtcacagtttggggtgagatctggaaatcaagaaatgggtgtccactcttttctttcattagctaggatctactagatgcattatactccatacctgcttttcccatggccgccctacggaaaatcacatccacagaggccagggctacccaagcccctccaggtgagctgggcctttcctttatgaacctccatcctcccagccagctacagtagggcctcctcaccccgtaccccacagctagacagtgtcagcactcatctcctcctcccacatttctggagctttttttttccttccccattgacctttgtggtcttctgtgattatttatgctgcctcccaaggatagaattgaaataaaatgttttcaacttaaaaaaaaaaaaaaa

SEQ ID NO: 221807 - DNA, 1000 bp, Homo Sapiens
ggactatcaggagtccactgcctccatgatgcaagccagcttcctgtgcagaaggtctggtcggcaaactccctaagtacccgctacaattctgcagaaaaagaatgtgtcttgcgagctgttgtagttacagtaaatacactgtgaagagactttattgcctattataattatttttatctgaagctagaggaataaagctgtgagcaaacagaggaggccagcctcacctcattccaacacctgccatagggaccaacgggagcgagttggtcaccgctcttttcattgaagagttgaggatgtggcacaaagttggtgccaagcttcttgaataaaacgtgtttgatggattagtattatacctgaaatattttcttccttctcagcactttcccatgtattgatactggtcccacttcacagctggagacaccggagtatgtgcagtgtgggatttgactcctccaaggttttgtggaaagttaatgtcaaggaaaggatgcaccacgggcttttaattttaatcctggagtctcactgtctgctggcaaagatagagaatgccctcagctcttagctggtctaagaatgacgatgccttcaaaatgctgcttccactcagggcttctcctctgctaggctaccctcctctagaaggctgagtaccatgggctacagtgtctggccttgggaagaagtgattctgtccctccaaagaaatagggcatggcttgcccctgtggccctggcatccaaatggctgcttttgtctcccttacctcgtgaagaggggaagtctcttcctgcctcccaagcagctgaagggtgactaaacgggcgccaagactcaggggatcggctgggaactgggccagcagagcatgttggacaccccccaccatggtgggcttgtggtggctgctccatgagggtgggggtgatactactagatcacttgtcctcttgcccgctcatttgttaataaaatactgaaaac

SEQ ID NO: 221808 - DNA, 1000 bp, Homo Sapiens; identical to SEQ ID NO: 116553

SEQ ID NO: 221809 - DNA, 1000 bp, Homo Sapiens
ctcctctcctctctcttgagaggatttcttgtgcacagagtatgaagcagttgtggagcgctgtgcctttgtcaagataccatcttgtttgatgacttctttctttgctgtttttttcttcaaaatgttagtaagctctgtcatgcttctagcaaattgtaagactaattatttgtttccacctcataacctgttgcaataaatattacttctcatacagtttaatattgttgtttgttggagaaaatgaaccataaaaattgatttgctgttcagttttcaattattcaagtatacccaattaaagatgcagttatgtttataaaataagaagaaatagacttgtaaaatgcttatgtgagggttattgaaggtttccctgaagactgactggaaatggtggctgtttttttctatttctgactctgccatgaattttttttttttttttttaaagacaatatctcactctgttgcctaggctggagtgcagtggtgcaaccacagctcactgcaccttcaaatgctggagctcaggcaatcctcttacctccgctttccaagcagctgggaccacagatgtatcctccactcctcgctggccaccatcctgctgcccaacagaagaagctcttctgtctccgatttcctgaacggtctaaggaccaggaagaaacaggctcctgccagcaccgacagcaacgaaaatgttcccacggagatcaggatgacttgctgaagctcagtggaggctaaaaagaggacacgaaagtgaacagaatgatcttcctacgcacaacacaaacatcagttaatgttccatccatgctgcttaaagagcattcctgtcctagtaaaatgggcaagtccctctaccccccaccctcacctggtatgcttacattaatagctaaagtcaatcctgtaatgaaataaagcaagtggtagctgtctggtagcctccactactgcaaatctcaagaaaaaaaaaaaaaaaaaa

SEQ ID NO: 221810 - DNA, 1000 bp, Homo Sapiens
agggcatggcccaagtctgtctttgactctgcctatccctgacgtttagtagcatgcccgacatacaatgttagctattggtattattgccatatagataaattatgtataaaaattaaactgggcaatagcctaagaaggggggaatattgtaacacaaatttaaacccactacgcagggatgaggtgctataatatgaggaccttttaacttccatcattttcctgtttcttgaaatagtttatcttgtaatgaaatataaggcacctcccacttttatgtatagaaagaggtcttttaatttttttttaatgtgagaaggaagggaggagtaggaatcttgagattccatatcgaaaatactgtactttggttgatttttaagtgggcttccattccatggatttaatcagtcccaagaagatcaaactcagcagtacttgggtgctgaagaactgttggatttaccctggcacgtgtgccacttgcccagcttcttgggcacacagagttcttcaatccaagttatcagattgtatttgaaaatgacagagctggagagttttttgaaatggcagtggcaaataaataaatacttttttttaaatggaaagacttgatctatggtaataaatgattttgttttctgactggaaaaataggcctactaaagatgaatcacacttgagatgtttcttactcactctgcacagaaacaaagaagaaatgttatacagggaagtccgttttcactattagtatgaaccaagaaatggttcaaaaacagtggtaggagcaatgctttcatagtttcagatatggtagttatgaagaaaacaatgtcatttgctgctattattgtaagagtcttataattaatggtactcctataatttttgattgtgagctcacctatttgggttaagcatgccaatttaaagagaccaagtgtatgtacattatgttctacatattcagtgataaaattactaaactact

SEQ ID NO: 221811 - DNA, 1000 bp, Homo Sapiens; identical to SEQ ID NO: 116561

SEQ ID NO: 221812 - DNA, 878 bp, Homo Sapiens
cagattttcaggttgattgatgtgggacagcagccacaatgaggaactcctatagatttctggcatcctctctctcagttgtcgtttctctcctgctaattcctgaagatgtctgtgaaaaaattattggaggaaatgaagtaactcctcattcaagaccctacatggtcctacttagtcttgacagaaaaaccatctgtgctggggctttgattgcaaaagactgggtgttgactgcagctcactgtaacttgaacaaaaggtcccaggtcattcttggggctcactcaataaccagggaagagccaacaaaacagataatgcttgttaagaaagagtttccctatccatgctatgacccagccacacgcgaaggtgaccttaaacttttacagctgacggaaaaagcaaaaattaacaaatatgtgactatccttcatctacctaaaaagggggatgatgtgaaaccaggaaccatgtgccaagttgcagggtgggggaggactcacaatagtgcatcttggtccgatactctgagagaagtcaatatcaccatcatagacagaaaagtctgcaatgatcgaaatcactataattttaaccctgtgattggaatgaatatggtttgtgctggaagcctccgaggtggaagagactcgtgcaatggagattctggaagccctttgttgtgcgagggtgttttccgaggggtcacttcctttggccttgaaaataaatgcggagaccctcgtgggcctggtgtctatattcttctctcaaagaaacacctcaactggataattatgactatcaagggagcagtttaaataaccgtttcctttcatttactgtggcttcttaatcttttcacaaataaa

SEQ ID NO: 221813 - DNA, 1000 bp, Homo Sapiens
agcccatcccgggcgggctcaacgtgggaatgtctgtttacatccaaggagtggccagcgagcacatgaagcggttcttcgtgaactttgtggttgggcaggatccgggctcagacgtcgccttccacttcaatccgcggtttgacggctgggacaaggtggtcttcaacacgttgcagggcgggaagtggggcagcgaggagaggaagaggagcatgcccttcaaaaagggtgccgcctttgagctggtcttcatagtcctggctgagcactacaaggtggtggtaaatggaaatcccttctatgagtacgggcaccggcttcccctacagatggtcacccacctgcaagtggatggggatctgcaacttcaatcaatcaacttcatcggaggccagcccctccggccccagggacccccgatgatgccaccttaccctggtcccggacattgccatcaacagctgaacagcctgcccaccatggaaggacccccaaccttcaacccgcctgtgccatatttcgggaggctgcaaggagggctcacagctcgaagaaccatcatcatcaagggctatgtgcctcccacaggcaagagctttgctatcaacttcaaggtgggctcctcaggggacatagctctgcacattaatccccgcatgggcaacggtaccgtggtccggaacagccttctgaatggctcgtggggatccgaggagaagaagatcacccacaacccatttggtcccggacagttctttgatctgtccattcgctgtggcttggatcgcttcaaggtttacgccaatggccagcacctctttgactttgcccatcgcctctcggccttccagagggtggacacattggaaatccagggtgatgtcaccttgtcctatgtccagatctaatctattcctggggccataactcatgggaaaacagaattatcccctaggactcctttctaagcccctaataaaatgtctgagggtgtctc

SEQ ID NO: 221814 - DNA, 1000 bp, Homo Sapiens
aaggccagatggcttacgagggccagcactggcatgcctcagaccgctgcttctgctgtagtcgctgtgggcgggccctgctgggccgcccattcctgccacgccgaggcctaatcttctgctctcgagcctgcagccttgggtccgagcccacagctccagggccgagccgccgcagctggagtgccggccctgtcacagccccacttgcagcctccacagcctctttctctgctgtgaagggggcatcagagaccaccaccaaaggcaccagcacagagttagcgccagctacaggccctgaggagccctcccgctttctgagaggggctccccaccgccactccatgccggaactggggctccgcagtgtccccgagccgcccccagagtcccccggccagcctaacctgcgcccagatgatagtgccttcggtcgtcagagcaccccacgcgtcagcttccgcgaccctctggtgtctgaaggaggcccgcgccggaccctgagtgcacccccggcccagcgccgcaggccacgcagtcccccacccagggcccccagccgtcgccgccaccatcatcataatcaccatcaccatcacaaccgccacccaagcagacgtcgccactatcaatgtgacgcgggatcagggtcagactcggaatcttgctccagctcgccctccagttccagttccgaatcatcagaggatgatggcttcttcctaggagagcgcatccctctgcccccgcatttgtgcaggcccatgcctgctcaggacactgcaatggagaccttcaactccccatctttatcgctccccagggactctcgcgcagggatgcctcgtcaggcccgagacaagaactgcatcgtggcttgaaggcaggccgtcctggagggggctccattctccagtcagagtagatgatgaggcccatgcccctcacccccacgccccgcccctacaacctaagtcataaatcctcttcctccctc

SEQ ID NO: 221815 - DNA, 1000 bp, Homo Sapiens; identical to SEQ ID NO: 116562

SEQ ID NO: 221816 - DNA, 1000 bp, Homo Sapiens
gcgcatcgacagcttgatggacgaaatctcttttctgaagaaagtgcacgaagaggagatcgccgaactgcaggcgcagatccagtacgcgcagatctccgtggagatggacgtgaccaagcccgacctttccgccgcgctcaaggacatccgcgcgcagtacgagaagctggccgccaagaacatgcagaacgctgaggaatggttcaagagccgcttcacggtgctgaccgagagcgccgccaagaacaccgacgccgtgcgcgccgccaaggacgaggtgtcggagagccgtcgtctgctcaaggccaagaccctggaaatcgaagcatgccggggcatgaatgaagcgctggagaagcagctgcaggagctggaggacaagcagaacgccgacatcagcgctatgcaggacacgatcaacaaattagaaaatgaattgaggaccacaaagagtgaaatggcacgatacctaaaagaataccaagacctcctcaacgtgaagatggctttggatattgagattgctgcttacaggaaactcttggaaggcgaggagacccgactcagtttcaccagcgtgggaagcataaccagtggctactcccagagctcccaggtctttggccgatctgcctacggcggtttacagaccagctcctatctgatgtccacccgctccttcccgtcctactacaccagccatgtccaagaggagcagaccgaagtggaggaaaccattgaggcgtctaaggctgaggaagccaaggatgagcccccctctgaaggagaagccgaggaggaggagaaggacaaggaagaggccgaggaagaggaggcagctgaagaggaagaagctgccaaggaagagtctgaagaagcaaaagaagaagaagaaggaggtgaaggtgaagaaggagaggaaaccaaagaagctgaagaggaggagaagaaagttgaaggtgctggggaggaacaagcagctaagaagaaagattga

SEQ ID NO: 221817 - DNA, 1000 bp, Homo Sapiens
ccatcaaaatggggaaactttgtataacagtggtgacacctgggtccagaattgtcaacagtgccgctgcttgcaaggggaagttgattgttggcccctgccttgcccagatgtggagtgtgaattcagcattctcccagagaatgagtgctgcccgcgctgtgtcacagacccttgccaggctgacaccatccgcaatgacatcaccaagacttgcctggacgaaatgaatgtggttcgcttcaccgggtcctcttggatcaaacatggcactgagtgtactctctgccagtgcaagaatggccacatctgttgctcagtggatccacagtgccttcaggaactgtgaagttaactgtctcatgggagatttctgttaaaagaatgttctttcattaaaagaccaaaaagaagttaaaacttaaattgggtgatttgtgggcagctaaatgcagctttgttaatagctgagtgaactttcaattatgaaatttgtggagcttgacaaaatcacaaaaggaaaattactggggcaaaattagacctcaagtctgcctctactgtgtctcacatcaccatgtagaagaatgggcgtacagtatataccgtgacatcctgaaccctggatagaaagcctgagcccattggatctgtgaaagcctctagcttcactggtgcagaaaattttcctctagatcagaatcttcagaatcagttaggttcctcactgcaagaaataaaatgtcaggcagtgaatgaattatattttcagaagtaaagcaaagaagctataacatgttatgtacagtacactctgaaaagaaatctgaaacaagttattgtaatgataaaaataatgcacaggcatggttacttaatattttctaacaggaaaagtcatccctatttccttgttttactgcacttaatattatttggttgaatttgttcagtataagctcgttcttgtgcaaaattaaataaatatttctcttacctt

SEQ ID NO: 221818 - DNA, 1000 bp, Homo Sapiens
ttctgcatcatttttattggtttattattctgctgtatgactcaatcataattcatttaatcttctattggatattttgactatttacatcttttcacagttataaacagcacttcactgaatcccatgtacatccatgactgttttcttaaattctttgaattgctgggttaccaaatatgcaaaattttaaggcttttgatacttcgttatgagtgtatttttgagatattttccacttgatccaagcagtgtgtcactatataactgataaaagcacttggtctttgattatcagatactgtctctaaaattattttaaagattaatatttgttcaagtagagaatgaagataaaaaaggaatttgaggccaggtatggggtgtctcatgcctataattccagcactttgggaggccaaggcaggcagatcactttgaggtcaggagtttgagaccagcctggccaacatggagaaccccccgtctctacaaaaaatacaaaattagcagggtgtggtggtgcacacctgtagtcccttactccctggtggctgaggcattatcccttgaacctgggaggcagagcctaaagtgagccgagatcgcgccactgcactccagcctgggtgacacagcaagactcttgtctcaaacaaacaggaatttgagtaaattttaaattagtatatactacaacaaatttccaaacttcataatttgctagtagtgctaactaaaattttacaccaggtaaaatcaggtcaccttttttatgtattgacttcattgttggacttcatactctgatgggaaagaaaatggacattctgaatgtgtcaggtgcataatatcctaatttatgcttgtcagagctggggtctctgtcttccttggcccatgttgcatttaactgaatgtcatgttttctcctctggaacttcttatgtatgcaagctcccatgttaacctatcataaaaatgttttttataattttgt

SEQ ID NO: 221819 - DNA, 1000 bp, Homo Sapiens
attatccagaatcccacagaccagcagaagaaggaccatgaaaaagctgaatttgaggtacatgaagtatatgctgtggatgttctcgtcagctcaggagagggcaaggccaaggatgcaggacagagaaccactatttacaaacgagacccctctaaacagtatggactgaaaatgaaaacttcacgtgccttcttcagtgaggtggaaaggcgttttgatgccatgccgtttactttaagagcatttgaagatgagaagaaggctcggatgggtgtggtggagtgcgccaaacatgaactgctgcaaccatttaatgttctctatgagaaggagggtgaatttgttgcccagtttaaatttacagttctgctcatgcccaatggccccatgcggataaccagtggtcccttcgagcctgacctctacaagtctgagatggaggtccaggatgcagagctaaaggccctcctccagagttctgcaagtcgaaaaacccagaaaaagaaaaaaaagaaggcctccaagactgcagagaatcccaccagtggggaaacattagaagaaaatgaagctggggactgaggtgcgtcccatctccccagcttgctgctcctgcctcatccccttcccaccaaaccccagactctgtgaagtgcagttcttctccacctaggaccgccagcagagcggggggatctccctgcccccaccccagttccccaacccactcccttccaacaacaaccagctccaactgactctggtcttgggaggtgaggcttcccaaccacggaagactactttaaacgaaaaaaagaaattgaataataaaatcaggagtcaaaattcatcgtcttcaaggcccctctttctagccttttctactactctctgcttggtcaaggtttgtgccccactacagaacagggctaaattagccaccaccactgaaaactcagccgaatttttttataccactctgacgtcagcatttttt

SEQ ID NO: 221820 - DNA, 1000 bp, Homo Sapiens; identical to SEQ ID NO: 116569

SEQ ID NO: 221821 - DNA, 1000 bp, Homo Sapiens
cccctttccagggtcctccggaccccaccttccacactctgatcacagcccccctaccttttgccctaggaggaagcaataatggtgtataccctcattctcattcctgggcagcccttccttccaccctggcaccaaaataatttctcctccatccgtaccttgcctagcctctccctctcccccagctagtcccctgagcaatacggcagacagatgcaagaccatttttctccaagccatgggggactgtttggaaggaaagccccctctctccctcctcccctcgccctcggcctggttctgcagctggaccgacctcattcatcgcctgccccctacccaattctgagcacacggtactgtagcccccagttcctccctagccttccatccctctgtccaccccagggggaggtaaccccgcactcacactcccttgatgctgtctgtacagggttcatattttgtagcgaaagtcgtttttgtcccagccggcgatcggagtgggccttttctttctttttgttcattctttacctttttttcttttctttctttcttttttgtacatactgtaaggttggtttgtaaattattctacggaggcaaaaagggaaaataaaaacttgcccttccctggctgacccagtcgggaaggtagggaaggaggtctcccgttgggagagtctctgttcctgctgtattatacaactgtaccatagtcctgggaaaagggtggactcaccgctgttgttttatgggaagtcgtgtcatcctaggggttggggctgggcagagcctgtcccctccccccttctccaggagccagggggtgactggagagacagacccacccccaagcagggctcctctccccagggtgagcacaggacctctgtaagctgcttgtgtattgtccactttgacgatcagtcattcggtccgttgatcaataatccttcgatcttgtctccaattaaaccgaggctttcaccga

SEQ ID NO: 221822 - DNA, 1000 bp, Homo Sapiens
gattccaactcacttctttattgtgctaacaagctgtaaagatacatctcagacgcctttgcactgtgaaaacctagacaccttagctttcattttgcctcacaggactgataacagcgagagctgtgtgcatgggaagcatgactcctcatgggttgaagaattgttaatgttacacagagcacggatcacagatgttgagcacatcactggactcagcttctatcaacaaagaaaagagccagtttcagacattttaaagttgaaaacacatttgccaacctttagccaagaagactgatatgttttttatccccaaacaccatgaatctttttgagagaaccttatattttatatagtcctctagctacactattgcattgttcagaaactgtcgaccagagttagaacggagccctcggtgatgcggacatctcagggaaacttgcgtactcagcacagcagtggagagtgttcctgttgaatcttgcacatatttgaatgtgtaagcattgtatacattgatcaagttcgggggaataaagacagaccacacctaaaactgcctttctgcttctcttaaaggagaagtagctgtgaacattgtctggataccagatatttgaatctttcttactattggtaataaaccttgatggcattgggcaaacagtagacttatagtagggttggggtagcccatgttatgtgactatctttatgagaattttaaagtggttctggatatcttttaacttggagtttcatttcttttcattgtaatcaaaaaaaaaattaacagaagccaaaatacttctgagaccttgtttcaatctttgctgtatatcccctcaaaatccaagttattaatcttatgtgttttctttttaattttttgattggatttctttagatttaatggttcaaatgagttcaactttgagggacgatctttgaatatacttacctattataaaatcttactttgtatttgtattt

SEQ ID NO: 221823 - DNA, 1000 bp, Homo Sapiens; identical to SEQ ID NO: 116572

SEQ ID NO: 221824 - DNA, 1000 bp, Homo Sapiens
aactgccttctctgaaaatttgggaaacctgcaaggagctcctgcagctgtccaaaccagagcttcctcaagatggcaccagcaccctcagagaaaatagcaaaccggaagaaagccatttgctagccaaaaggtatgggggcttcatgaaaaggtatggaggcttcatgaagaaaatggatgagctttatcccatggagccagaagaagaggccaatggaagtgagatcctcgccaagcggtatgggggcttcatgaagaaggatgcagaggaggacgactcgctggccaattcctcagacctgctaaaagagcttctggaaacaggggacaaccgagagcgtagccaccaccaggatggcagtgataatgaggaagaagtgagcaagagatatgggggcttcatgagaggcttaaagagaagcccccaactggaagatgaagccaaagagctgcagaagcgatatgggggcttcatgagaagagtaggtcgcccagagtggtggatggactaccagaaacggtatggaggtttcctgaagcgctttgccgaggctctgccctccgacgaagaaggcgaaagttactccaaagaagttcctgaaatggaaaaaagatacggaggatttatgagattttaatatttttcccactagtggccccaggccccagcaagcctccctccatcctccagtgggaaactgttgatggtgttttattgtcatgtgttgcttgccttgtatagttgacttcattgtctggataactatacaacctgaaaactgtcatttcaggttctgtgctctttttggagtctttaagctcagtattagtctattgcagctatctcgttttcatgctaaaatagtttttgttatcttgtctcttatttttgacaaacatcaataaatgcttacttgtatatagagataataaacctattaccccaagtgcaaaaaaaaaaaaaaaaaaaaaaaaaaaaaaaaaaaaaaaaaaaaaa

SEQ ID NO: 221825 - DNA, 1000 bp, Homo Sapiens
cagtaccgccgggtgaagcctgtgacccgggagatcgtcatccgagacccctatgccctccggcctctgcgccggctcatcgacgcctacgctttccgaatctatggccactgggtgaagaaggggcagcagcagaaccgggcagcccttttcgagaacacacccaaggccgtgctcctctccctggccgaggaggactactgaggggctggccagtcagggagggctagggggcaggtggggaggggaagccatggaaatacaagtcaaaggggtgagatgcgtgcaggcctctgcagaaggagcacttggccctggccaggaacccctggaactgaggccacgatcccctctcaaaggctgtgcacaagggaagtgggtgttcccaccacacagcaatacctgcaggctggggcaggccctgggtgggcagagatcacacgtggcctgagaaccaggaaccccctgctcctctacttcctagatgagccaccatctccatttctctttaggggaggcccagagttactgacactcaggctttcttcccttagggtcacagggtgaggatcaaagacacaaatgtctgagatacacaattgcaggagattttattggccccatgacatccagtgacagtgtgggagcaggctactctccagggacatgtttttggaggcatatggagaagggggcccaggcgaggtggctcacacctgtaatcccagcactttgggaggtcgaggtgggaggatcgcttgaggccaggagttcgagaccaccctgggcaacagagcgagatcccatcactacaaaaattcaaaaaattagccaggcatggtggtgcacacttgtagtcccagctactcaggaggctgaggtgggagaattgcttgggcccaggaattcaaggctagagtgagccgtgatcaccagtgcactctagcctgggcaacagagaaagaccctgtctcaaaaaaaaaaaaaaaaaaaaaaaaaa

SEQ ID NO: 221826 - DNA, 1000 bp, Homo Sapiens
tcctgtggcttccaccagcaacctggacatggacttccggggggccttcttccccctgactgagaggaactggagcctccccaaccgggcagtggagccccagctgcaggaggaagagcggatggtgtatgtggccttctctgagttcttcttcgactctgccatggagagctacttccgggcgggggccctgcagctgttgctggtgggggacaaggtgccccacgacctggacatgctgctgagggccacctactttgggagcattgtcctgctgagcccagcagtgattgactccccattgaagctggagctgcgggtcctggccccaccgcgctgcaccatcaagccctctggcaccaccatctctgtcactgctagcgtcaccattgccctggtcccaccagaccagcctgaggtccagctgtccagcatgactatggacgcccgtctcagcgccaagatggctctccgggggaaggccctgcgcacgcagctggacctgcgcaggttccgaatctattccaaccattctgcactggagtcgctggctctgatcccattacaggcccctctgaagaccatgctgcagattggggtgatgcccatgctcaatgagcggacctggcgtggggtgcagatcccactacctgagggcatcaactttgtgcatgaggtggtgacgaaccatgcgggattcctcaccatcggggctgatctccactttgccaaagggctgcgagaggtgattgagaagaaccggcctgctgatgtcagggcgtccactgcccccacaccgtccacagcagctgtctgagccctcaatccccaagctggcagctgtcattcaggaccccaacccctctcagcccctcttttcccacattcatagcctgtagtgccccctctaacccccagtgccacagagaagacgggatttgaagctgtacccaatttaattccataatcaatctatcaattacagtccgtccaccacctc

SEQ ID NO: 221827 - DNA, 1000 bp, Homo Sapiens; identical to SEQ ID NO: 116578

SEQ ID NO: 221828 - DNA, 991 bp, Homo Sapiens
aagaggcctcttattagggctctggtggcggcggcggcggacccttggggtctggacgcaacggcggcgggagcatgaacgcccctccagccttcgagtcgttcttgctcttcgagggcgagaagaagatcaccattaacaaggacaccaaggtacccaatgcctgtttattcaccatcaacaaagaagaccacacactgggaaacatcattaaatcacaactcctaaaagacccgcaagtgctatttgctggctacaaagtcccccaccccttggagcacaagatcatcatccgagtgcagaccacgccggactacagcccccaggaagcctttaccaacgccatcaccgacctcatcagtgagctgtccctgctggaggagcgctttcgggtggccataaaagacaagcaggaaggaattgagtaggggccagagggggctctgctcggcctgtgagccccgttcctacctgtgcctgaccctccgctccaggtaccacaccgaggagagcggccggtcccagccatggcccgccttgtggccacccctcaccctgacaccgacgtgtcctgtacatagattaggttttatattcctaataaagtatagcgggagagacctggatgtggacttgagcagcggtgacttcgcaagcaaatggattgtcaggcttgatgcaggcagatgacctgtttcaggggcgtccggctggcagggatgaattcattctggaccaaagatccggggtccaggggctgctgcgggggctgtgctgagccggagagaagtgtgcaaacccatgagctcccaagagtctctgctctagaagcctcaactcctgggcctgcctgtcagtcaaagcaggaacacttcttcctgcataactcgaaacacctttccacaggcttcttgtccacagtagagtttaataaaaatattcactgaaagacccccccccacccccatcggcccaaaaaaaaaaaaaaaaa

SEQ ID NO: 221829 - DNA, 1000 bp, Homo Sapiens
cgggctctgtatttctggaacaatgagtatatcctaagcctcattgaggacaactgccacactgtgctgcctgctgtgtttgggaccctctaccaagtctccaaggagcactggaaccaaaccatcgtatcactgatctacaatgtgctcaagaccttcatggagatgaatgggaagctgtttgatgagctcacagcctcctacaagctggaaaagcagcaggagcagcagaaggcccaggagcgtcaggagttatggcaaggtctggaggagctgcggctacgccggctacaggggacccagggggccaaggaggcccccctccagcggcttacaccccaggtggccgccagtgggggtcagagctagacagcacctcagaaggggaaaagctaaacccagagctgtcagtccctctatcccttctcctgtccaggggcccagagagaaacacacctacccctggccttgccagagtggcttctgaggactccctgcccagcccagctttcactggggggagacgaggagaggcaatggtggtcttggcaacagaatgctcagcccctcgtggcaggacttgacaagggcaagcttgaccaggaagctgccatcagggatcttcccctgccccgcaaagctaggctccagctgcaggcgggctcccaccctctgctcctggccttgggcaagggcactcagcgcctcgcctgcccctgccttggccaatgcgaggtccttccttatccccaccatggggtccatggtctatttattctcgcccagctcaccctctacacagacactgtcctgggtgcacactcctcccttccctcgctgtgtacttccttgtcccctttttatttattgggcagggggagggggagggcacaggcaagaagagattcacagtgtcctggggtaagggggggttcacagtaatcatggtctactcctctttccgtggctgggggtagacttaataaagagagaaattcaa

SEQ ID NO: 221830 - DNA, 1000 bp, Homo Sapiens; identical to SEQ ID NO: 116581

SEQ ID NO: 221831 - DNA, 1000 bp, Homo Sapiens
cgttggcccagtgcatcaacggcaaagtgctgatcatgcacggaggcctgttcagtgaagacggtgtcaccctggatgacatccggaaaattgagcggaatcgacaacccccagattcagggcccatgtgtgacctgctctggtcagatccacagccacagaacgggcgctcgatcagcaagcggggcgtgagctgtcagtttgggcctgacgtcaccaaggccttcttggaagagaacaacctggactatatcatccgcagccacgaagtcaaggccgagggctacgaggtggctcacggaggccgctgtgtcaccgtcttctctgcccccaactactgcgaccagatggggaacaaagcctcctacatccacctccagggctctgacctacggcctcagttccaccagttcacagcagtgcctcatcccaacgtcaagcccatggcctatgccaacacgctgctgcagctaggaatgatgtgaggtgacgggcggggcggcctgcatcccagggcccctccaatcccaccggacccaggccctgggctaggggcagagcaggccccgccccagggcaatgttggacccccttttactttgtaaagtttgtatttattcccctttaggtttgcagagggggtaggggcagagtcaggggctggccagagggtctgctccctggacagagaggaaggaggtggagcagctggggctgggggcacagcctgggcattctgtggggaggccgtcctcggggtggggtggggccgagtggctgccctgcccccctcatttgcatggctcctcccccactcaagcaatagggccccgccataggaagacccccagagagagggtcagcaggggggccccgcctgcgcctcccctcctatagccccatggtggggctaggctggggctcacccccctccccagctattttatgtctgtaattaaatatgttaaaataaagtcattatcggaaaaaaaaaaaaaaa

SEQ ID NO: 221832 - DNA, 1000 bp, Homo Sapiens
ttagagtccagagggagccatggcactagaaatagttgataatgaaatgagattttatgaagtataccgctccacctatgagcgtctgtctctgtgggcttgggatgttaacaggagccaaaaggagggaaagtgtgaagaataaagtagatctgagaaattctgagccaatcaggcttcttaattcaagagacaaaccaagacgttctgtcaactgtgctgtgctcttctttaagccaatgaaccccaattcctggcagtctacaagaagtctcttaatgctaatgaagaatttaaaggtctttttaaggaaatgaagggctttccaaatagaatgatttactctgaagaaacaaacaatggtatctctgaaactcacaacctaaagcccaatcttgaaaatatgttgtgcaccaagacgactgcttcagcttcttctcttatccttactttctttaatagatatttattaaactgtccagtgaaaaggtgccacaatgcccagtattgtaaacaacaggtttgcattcatgaagctttcattcattctggagtctactaatttacctgaatggtgtttgcattctgtgaaatgcctctccacgttgcatatgtcacacttttgtctgcacataactcttttttcacaagaagggtcactgccacaacagcacagtcagcgggtgaattacaggtgcctgctgcctgcctacctgggtaatctgatcttgtctgtatcgccgtgtgctcatcactgaagaattgcaggccactcatgtcagtgaccagatttgtggcttataaacattagcagtttatttatgttttaagatgcaaagatgtgtgtttgatattcactttaataattagaaatggatcttgtaaacagggcatatatcaaagatgaccttataatatgtacccgaatatacagttcaagaattttgtctgactggaaataaatgcattttgtagcaaaaggaaaaaaaaaaaaaaaaaa

SEQ ID NO: 221833 - DNA, 1000 bp, Homo Sapiens
tgctatagccttccttgataagattttagaggtttgtgtttgggatgcagaactacgggaacttcgagctgaatgttttataaaagaaggagaacctaggaaagctataagtgacttaaaagctgcgtcaaagttgaagaatgataatactgaagcgttttataaaataagcacactgtactaccaactaggagaccacgaactgtccctcagtgaagttcgggaatgtcttaaacttgaccaggatcataaaaggtgttttgcacactataaacaagtaaagaaacttaataagctgattgagtcagctgaagagctcatcagagatggcagatacacagatgctaccagcaaatatgaatctgtcatgaaaacagagccaagcattgctgaatatacagttcgttcaaaggagaggatttgccactgcttttctaaggacgagaagcctgttgaagctattagggtttgttctgaagttttacagatggaacctgacaatgtgaatgccctgaaagatcgagcagaggcctatttgatagaggaaatgtatgatgaagctattcaggattatgaaactgctcaggaacacaatgaaaatgatcagcagattcgagaaggtctagagaaagcacaaagattattgaaacagtcgcagaaacgagattattataaaatcttgggagtaaaaagaaatgccaaaaagcaagaaattattaaagcataccgaaaattagcactgcagtggcacccagataacttccagaatgaagaagaaaagaaaaaagctgagaaaaagttcattgatatagcagctgctaaagaagtcctctctgatccagaaatgagaaagaagtttgacgacggagaagatcctttggatgcagagagccagcaaggaggcggcggcaaccctttccacagaagctggaactcatggcaagggttcaatcccttcagctcaggcggaccatttagatttaaattccacttcaattaa

SEQ ID NO: 221834 - DNA, 1000 bp, Homo Sapiens
attggtgatatatttgatcagttttatttcagtaacacatttgacttgatgggtaaaagaagaaaacaaaaaagaattaacttcttggggttagaggaagaaggtaatttaaagaaatttcaaccagatttgaaggaaaggttttgtatgaatttcttgcacacatcattgttagttgtgggtaatgtggattcaaatacacaagacctcagcggtcagacaaatgaaatctttaaagcagtcgatgagaataacaacttattaaataacagattccagggctcaagaacaaatctcaaccaagtagtaagagaaaatatcaactgtcattacttctttgaaatgcttggtcaagcttgcctcttagatatttgccaagttgagacctccttaaatattagcaacagaaatattttagaactttgtatgtttgagggtgaaaatcttttcatttgggaagaggaagacatattaaatttaactgatcttgaaagcagtagagaacaagaagatttataatttcaatatcagcacactcattctttgtcaattcattttttcccatgagatgaagcacatgtgacgaatacggactagataacctctaagaattttccacttcttcaaaatgaacttactctagaaagcttacccttggataaccagtttgactttcataatgtctctgttttttgtttttccaacaattacagactcaggttctcttattttggaagtttctatctggttttgttctgaacttacattttttttttttttggtatctatgattttttttgctcagggcatcaaaatgtgctaaggacaagaattatatcctttttaaaaaatgttgttagcttggtgtaaaatgtatattgactgtattggtgaataaattgaatagacataacctcaaagtacttcacttattctttttaactactgatttgataaaaagtatgattataagatatccacgacaatctcatagtttctt

SEQ ID NO: 221835 - DNA, 1000 bp, Homo Sapiens; identical to SEQ ID NO: 116584

SEQ ID NO: 221836 - DNA, 1000 bp, Homo Sapiens
ggtggccctcatcgacgttttccaccaatattctggaagggagggagacaagcacaagctgaagaaatccgaactcaaggagctcatcaacaatgagctttcccatttcttagaggaaatcaaagagcaggaggttgtggacaaagtcatggaaacactggacaatgatggagacggcgaatgtgacttccaggaattcatggcctttgttgccatggttactactgcctgccacgagttctttgaacatgagtgagattagaaagcagccaaacctttcctgtaacagagacggtcatgcaagaaagcagacagcaagggcttgcagcctagtaggagctgagctttccagccgtgttgtagctaattaggaagcttgatttgctttgtgattgaaaaattgaaaacctctttccaaaggctgttttaacggcctgcatcattctttctgctatattaggcctgtgtgtaagctgactggccccagggactcttgttaacagtaacttaggagtcaggtctcagtgataaagcgtgcaccgtgcagcccgccatggccgtgtagaccctaacccggagggaaccctgactacagaaattaccccggggcacccttaaaacttccactacctttaaaaaacaaagccttatccagcattatttgaaaacactgctgttctttaaatgcgttcctcatccatgcagataacagctggttggccggtgtggccctgcaagggcgtggtggcttcggcctgcttcccgggatgcgcctgatcaccaggtgaacgctcagcgctggcagcgtcctggaaaaagcaactccatcagaactcgcaatccgagccagctctgggggctccagcgtggcctccgtgacccatgcgattcaagtcgcggctgcaggatccttgcctccaacgtgcctccagcacatgcggcttccgagggcactaccgggggctctgagccaccgcgagggcctgcgttcaataaaaag

SEQ ID NO: 221837 - DNA, 1000 bp, Homo Sapiens
ataagaagcgggtgcgaaagggtttctggaaacagcctcccctcatctgggatgtcaatcctaaacagattcggattctcaaccccttcttcatggagattgcagctgacaaactgctgagcctgccaatgcaacagccacggaagattaagcagaagcccaccacgggcctgttggccatcacgctggccctccacctctgtgacttggtgcacattgccggctttggctacccagacgcctacaacaagaagcagaccattcactactatgagcagatcacgctcaagtccatggcggggtcaggccataatgtctcccaagaggccctggccattaagcggatgctggagatgggagctatcaagaacctcacgtccttctgacctgggcaagagctgtagcctgtcggttgcctactctgctgtctgggtgacccccatgcgtggctgtgggggtggctggtgccagtatgacccacttggactcaccccctcttggggagggagttctgggcctggccaggtctgagatgaggccatgcccctggctgctcttatggagccgagatccagtcagggtgggggcgctggagccgtgggagcccggccagggcagggggctcgtcgctgtggcaccccctctctgccagcaccaagagattatttaatgggctatttaattaaggggtaggaaggtgctgtgggctggtcccacacatccaggaaagaggccagtagagaattctgcccactttttataaaaacttacagcgatggccccaccaaggcctagacacggcactggcctcccaggagggcaggggcattgggaatgggtgggtgccctccagagaggggctgctacctcccagcaggcatgggaagagcactggtgtgggggttccaccgagaaggggacctcatctagaaaagaggttacaaacctaccattaaactatttttcctaaaacggaaaaaaaaaaaaaaaaaaaaaaaaa

SEQ ID NO: 221838 - DNA, 1000 bp, Homo Sapiens
tttcaatatgtgatgctcatgtgtgtttgtagtgtgagctcttgtttttgaaatgattgcttcagtctttgcctttgtttgcactgtgtgttcagtgaaaactagagaaacacaataagcaaatcacatgaaggctgagatgattgagatgaaagttaacatagtgtgaatgaaagtctggccaacagagcagtagatgatataacacagaaagcatgctttctgaggagatagtggggataatccctgaagagttggcagtgtgagtccaactcatttatcttctgtgaggtgggatttttgtgttccctcaccacccatgtaatattcttagaattgagattgctacacggagcagtccttgacgatcgtgtttctgacgtttctcttccttgcctggactgcctttgacaaggcagaaatgaacatgaaaagtccccaggagaggggagctgtgtagtgagggatactgagggcagtcctgtggctgaggggcacagattgaactgctgaactagttggaggtctagatgaggtgctttacgcatcagctgccttagacagcttctagaaaggagcgagcgctacttcttaagtacttaagtgacatttagataatttatagtaaaactgaaattattattagccaatgcattggtgcatagaatttactagggctacttctggaagcccccaatagaatagcatttccatgtgcattaaatactttgccagcactgcctttgccagcatcctaaatctggagttttaccaagaaggaaactgtatctttaggttaatccaagctatgcatttcatatagctttttcatttaaaacaaggcaaagaaacaaattcctatgaccaaattgcttgcctacagttccctgcagtaattgtatgatctcacccagtgtgcaatttgtggaaatgaaccaaatgtcattacttttgtcttaaagaaaagtctatttcaagaatatggacagcagtggaaaaa

SEQ ID NO: 221839 - DNA, 1000 bp, Homo Sapiens
ccagagagaactagtggcccaagggaaggtgggtgccattccagccaatgcactggacgatgggcagtggtcccagggcctcatttctgctgcccggatggtggctgcggccaccaacaatctgtgtgaggcagccaatgcagctgtacaaggccatgccagccaggagaagctcatctcatcagccaagcaggtagctgcctccacagcccagctccttgtggcctgcaaggtcaaggctgaccaggactcggaggcaatgaaacgacttcaggctgctggcaacgcagtgaagcgagcctcagataatctggtgaaagcagcacagaaggctgcagcctttgaagagcaggagaatgagacagtggtggtgaaagagaagatggttggcggcattgcccagatcatcgcagcacaggaagaaatgcttcggaaggaacgagagctggaagaggcgcggaagaaactggcccagatccggcagcagcagtacaagtttctgccttcagagcttcgagatgagcactaaagaagcctcttctatttaatgcagacccggcccagagactgtgcgtgccactaccaaagccttctgggctgtcggggcccaacctgcccaaccccagcactccccaaagtgcctgccaaaccccagggcctggccccgcccagtcccgcagtacatcccctgtcccctccccaaccccaagtgccttcatgccctagggccccccaagtgcctgcccctccccagagtattaacgctccaagagtattattaacgctgctgtacctcgatctgaatctgccggggccccagcccactccaccctgccagcagcttccagccagtccccacagcctcatcagctctcttcaccgttttttgatactatcttcccccacccccagctacccataggggctgcagagttataagccccaaacaggtcatgctccaataaaaatgattctacctacaaaaaaaaaaaaaaaaaaa

SEQ ID NO: 221840 - DNA, 1000 bp, Homo Sapiens; identical to SEQ ID NO: 116588

SEQ ID NO: 221841 - DNA, 1000 bp, Homo Sapiens
ctggctgactaagccccgtctgaccccagcccagacagcaaggtgtggaggctcctgtggtagtcctcccaagctgtgctgggaagcccggactgaccaaatcacccaatcccagttcttcctgcaaccactctgtggccagcctggcatcagtttaggccttggcttgatggaagtgggccagtcctggttgtctgaacccaggcagctggcaggagtggggtggttatgtttccatggttaccatgggtgtggatggcagtgtggggagggcaggtccagctctgtgggccctaccctcctgctgagctgcccctgctgcttaagtgcatgcattgagctgcctccagcctggtggcccagctattaccacacttggggtttaaatatccaggtgtgcccctccaagtcacaaagagatgtccttgtaatattcccttttaggtgagggttggtaaggggttggtatctcaggtctgaatcttcaccatctttctgattccgcaccctgcctacgccaggagaagttgaggggagcatgcttccctgcagctgaccgggtcacacaaaggcatgctggagtacccagcctatcaggtgcccctcttccaaaggcagcgtgccgagccagcaagaggaaggggtgctgtgaggcttgcccaggagcaagtgaggccggagaggagttcaggaacccttctccatacccacaatctgagcacgctaccaaatctcaaaatatcctaagactaacaaaggcagctgtgtctgagcccaacccttctaaacggtgacctttagtgccaacttcccctctaactggacagcctcttctgtcccaagtctccagagagaaatcaggcctgatgagggggaattcctggaacctggaccccagccttggtgggggagcctctggaatgcatggggcgggtcctagctgttagggacatttccaagctgttagttgctgtttaaaatagaaataaaattgaagact

SEQ ID NO: 221842 - DNA, 1000 bp, Homo Sapiens; identical to SEQ ID NO: 116590

SEQ ID NO: 221843 - DNA, 1000 bp, Homo Sapiens
ttgggtgtgagaaaagactgtgtcttgaaagaattatcaaagctgatacagcacatatacagaattagccaaatggtataagacaatagaaaaaggctgtggattctttgaggacatcactagaaatcattctttgtctcaagttcacactcttagcatagaatattattgactaggctgtatgacattttgagctcttaactgtgaatggcattcattaagctcctttatcctatagattctatctttatgttcatctgaaatgaactattcatcagtactttctcctcccatcctaagcttctcattttaggaactgacatgataaggtggttctttcataactctaatgccatccaacatagccctgggagaggcatgttaggtttcagagattttctccatggagcaaggtgcagtgctagaatatggtggttgattcccaaacagagcagttaactttactcttggttctgagtctccaaataataatagccgacgtttattgagcacttactatgtgcccaaccctgttatgcctttctcaggctcatgataaatgtattagtctgttctcatgctgctattaaagacatacctgacactgggtaatttataaaggaaagaggtttaatggactcagttccacatggctggggacgcctcacaatcatggtggaaggcaaggaggagcaaatcatgtcttatacatggatggcagcaggcaaagagagaacttgtgcaggggaactctttataaaaccgtccgatcttgtgagacttattcactatcacaagaacagcacaggaaagttctgcccccgtgattcaattacctcccacttggtcccacccacgacacgtgggaattgtgggagctacaattcaagatgagatttggatgggacacagccaaaccatatcaataggtattattttatcccccattttataaatgaggaaacggaggcttagttgagtgagctgaccaatatcaccc

SEQ ID NO: 221844 - DNA, 1000 bp, Homo Sapiens
acaatataaattcaacaatcatttgtaactcttctcacactacaggctgaaaatggtttgttaacttgtcaataacagtccactgcatatatcacaattacatttttttcaacagtgttaaggcaaaatttatagtaatactttttacgtggcagatgtagttacgttggaaaaaacttccttagttctgaattctcatgattgcttctgtatttccatgcaggccttgatataatggccttctaattgtggtagcatttattttatcaaacaactcaggtagaagctatgccaatttgacaatttttggaaacctaacctaatattctcttcctatctctatgaaataccaagagaaacctatcggagtttggtaatttcatgaaatgtatccatgattggggtaggagtgacatttacatgctcttctttattgttggcagtaaaaataagtcttttgtaagcagtgtatatcagaatgtataaggtacaagtgttttacctggaaatgatgggataggaaattatgattatgatgttaaaactgtgaaaagtagaaaaccacatggatgatatcaccccattttaaaatggaataagtattcaacaagaatttgtgtgaaatgcatttattcctataacataagaccaataaaatgagggaaccagacatacagtaaaaggagaaaaacataatgtgagctttgtgaaatctgactgtaaccttcataacataatcaaatatctttgtgtgtttctgggactttttaatgtgtatatacgtaatttgtgaacaactattctttcctctggcaatgaatatttgctggtatttttccattttataattttatgcattttttctcagtgaacatcagttttatcaaagcagtaaatttagtgcaataaatttgcaaacttattaacgttaatcacttacctaccaggactcagaatctcagaataaaattgctctatattaccaaaaaaaaaaaaaaaa

SEQ ID NO: 221845 - DNA, 1000 bp, Homo Sapiens
cgggcttcacacccttcagtaaccgagcggcacctggacctgcgatgttgggtgggactgggtgcccgtgtgctgacgcggctggcagagcatctgggtgaggctgaggtagctgctgagctgggcccactggctgcctcactggaggcagcagagagcctggatgagctgcactgggccccagagctaggagtctttgcagactttgggaaccacacaaaagcagtacagctgaagcccaggccccctcaggggctcgttcgggtggtgggtcggccccaacctcaactgcagtatgtagatgctcttggctatgtcagtctttttcccttgctgctgcgactgctggaccccacctcatcccgccttgggcccctgctggacattctagccgacagccgccatctctggagcccctttggtttacgctcccttgcagcctccagctccttttatggccagcgcaattcagagcatgatcccccctactggcggggtgctgtgtggctcaatgtcaactacctggctttgggagcactccaccactatgggcatctggagggtcctcaccaggctcgggctgccaaactccacggtgagctccgtgccaacgtggtaggcaatgtatggcgccagtaccaggccacaggctttctttgggagcagtacagtgaccgcgatgggcgaggcatgtgccgccctttccacggctggaccagccttgtcttactggccatggctgaagactactgaagggagggagaggaggggagccaagacactcatgccactctggctctgaaggacaagggacaaaggcttctggcttttgcccccagccccttggataccagtaattcaaaccttcctcattcattctcaggtgtctccttgctgtcatcccacatagccctggggtgaatgtgaatccagagtctatttttctaaataaattggaaaaaacaaaaaaaaaaaaaaaaaaaaaaaaaaaaaaaaaaaa

SEQ ID NO: 221846 - DNA, 1000 bp, Homo Sapiens
tgccatgcttgcagtcccttctaaggggtttccttagcataagttgccatgctctgtaccatgtgacctcacaatcctggccacagatagctagatgtggatagtgtctggttcaagggcaaccaatctctaggctggccagtggcctgttagctggactggcataaggacttcaccttacaggggtggcatgtatcaaatggcaaatgtatgaaacaaccagatctttcagggaggcagaatgtgagctattcagaagaagtgaacgttaattagaatttaatgaggcattagtggtggtggatgaggggtggccagaaactaaacagcaaaagcaaagagaaagctgcagaaaccataagtaagcagaggtcatgagacatttgtataatgagatcacggagccacagggtggcagaagccatgaagcagcaaggcaacaatgggctagaagccatgaagcaataggagccacgaggaacagaaaccgtgagacaaaactgactatgagatccacaaagcagcagaaggcttgaatagataagatcatgagacagtagaagcgatgagactgcaagaaccacaaggtagccagaaccatgtggcaacatggcaacaggaatggaagaggcagcaggagctacaatgcagaaaagccatggattaataggaactgaagcgccgggagccatgaagctgcaggacccatgaggcagaaaaagccatgggctagcatcgaggggggcagaaagaagttagtcagtagcagtaggaggagtataaatacagccagaaaggagttgagtcaccaatttgggaagcactagagaagggagcaacagatgcctgcagctgagggggtgacaagataagccaggctctagagctgctttggatcatgaaccattttcaagtttctgttcttccatgaggctgcctgtgtagctgttcttgtcttccttatttccctgtgaatgctttaataaatccccatcactaa

SEQ ID NO: 221847 - DNA, 1000 bp, Homo Sapiens
aaacattttttgctttaaaatgcatatctttaattgggtgttggtccaaaattaaaatttttgctgtctgtttttctctaccccattttgtggtaatttggcaacttgagctctcccaattattgtaatataaggacagacataatagtattctgtacccatagtaataattgcatcaagcttagatgagaaatttttttcatatactggcctttaaatcattaatggacaattggctataaaggtaggtctgttaactttctttgtgtgttcctgatggaattcaccatagccttacagcttttctcagaaggtaacttgttataagagaaatggcatttgcatgttccagagtcagaacctgtacagtatataaagcataaacaccttgaatttgattttagttcaccacattcaaggatccaggatgccaaaaatatgtgtgaacatttgaaacatttttatttgctgctttttccctttgatatagttgaaagaatgtattgtaaattggcatacaatactgcctttaatagaaaacctaaatgctggggcacatttcacatatcgactacctgagaaattgctttgtgtcccactgttattaaagcaaaaagtataatgttcttcacttgaactaatcaaatacaatagattataaattgtgtattgtaaataaaagttcactctgtgagtgcacattttggtaaattatttatttatgttagcatttaaaagtttaaaaaaaatgcatttgaccaggataaatgaggtatgttgatcatggctttgctttatatcttgatattaaagctggtttatcatcctggtattttaaaagctgctttggggttttttttttcttttttttttttttaatgtaaactaacctcctgcatgacagaggttaaaattttgtctgcacttgagttcacttgagtttacatttgaaatgtgcatgtttatttatatagatttcaataaagctattcaaggcctt

SEQ ID NO: 221848 - DNA, 1000 bp, Homo Sapiens; identical to SEQ ID NO: 116593

SEQ ID NO: 221849 - DNA, 1000 bp, Homo Sapiens
tgaagctcgcggtcctcccagggagctgcgggtgatgttcgttgcactgctagacacgaaattcccattgacgtcctgcaggaactgcatgctgcaggtgtcctgcccttccgcccacgagtgcgccatgtttcagcggagcggcgtgtgggagaagccacgtcgtgtttcacatgtcggagtcgaatgcatttgtaaatccctaagtcaagtaggctggctgcactgttcgcatttgtctctaaaagtcttcatcgctaaaagataccataatttgctgaggcttcttaagctttctatgttataatttatatttgtcactttaaaaaatccatttcttttagaaaaaattagggtgataggatattcattagttaagatggtaacgtcattgctatttttttaacatcctctttagaggtaatttttgttaacataaccaaaaattaaattgaaacaaaatgtcccaactaagaaaatatatagagcattttatttttttttagtgttgtaaaatattaacctctgtgagatcctttgtatcttaatgcattacctttacacatatttattcttattttctctcctttcagagtttacatttttatatttaatttactatttcagatttttaaaatagtatagaaaaaagtaggagtgatagagaacaaaaatactcttatacagtgcaacccaaataccgcgaatgcatcagctaaagcagcgtgtaaataggagtgatgagaaagttaatggagtattttattttcaaagttcctgataagcattggaaagaaatcgacatggataatgaagatttcctttttccttgcctattttttcattgtaaatatttatatactactgaccaagatgttggggtgggggggattgttttttgtaaaaatgtcattatcaggtcacataaatctgcctttatgttgcataagtgaaaatttagaaaattaaaagcaattatcttccaaaaaaaaaaaaaaaa

SEQ ID NO: 221850 - DNA, 1000 bp, Homo Sapiens
ctagatacactttcatcagaaagagccagatccttcataacttggcttagagacagcagaccattaagtccaatccttcacatagtaaaagatgagagtcctgccaaagcagaattttttcagcatttgattgaagaccggacagaggctgcattttcttactatgaatttttgcttcatgttcagcagcagatttgtaagtgaagtagaataaaattgaataagaaaaagatctataacctaggtaaagcataatctgtcagagaagcgcgtgagaaatttgaaatgaaggcatttgttaatacaagatgcaacgcacagcactctgtctgaggctttggtaaaaagtaaaggggaagaaagaacttgacagatctttttcaactcaaattaatggtaacgatgatgctgtttcaccaagtatattttgaattggtttctacacatttccagtagtatggcagtacagtgctctgttcattgcaagctggcaaatttatgtagctatgtggaatgatatgtcataatgtaaaattagataaattcttttttcttataattaatataacatttctggacttgaactctggcaagagatgccaaaaggcattggtaccgtgttatttgtttatatgaattactttttaacaaggaatgtttcttattcattaaatgaattcaacattttctctgtaaaaacaatagagtttcagtacatgaactatagaaaaaaatctatatataatgtacataaatgttacatttgtaaagaaaatgtaaaaatgtaactatagcatatgaattgcttaaactgtgctgcattgttggatgacaactctttttgtcacagttagagaatgaggttgactaatgcatattatgaattgagtccacaaaggaacacaaaactctttgtaattctgttaaatcttttatgtagatttatttatgatcagcctactaattaaaactatttcgcttgacaaaaaaaaaaaaaaaa

SEQ ID NO: 221851 - DNA, 1000 bp, Homo Sapiens
ctggggcaggaaagtgagccattcctaggctgaggtccaggcagccctgcccctgaagaccctctaggagcagggcacccagtggccctgctgctgtccagccaggcctgcctgaggccacgctgctatggaggctgcctcctagtctcccaccaggtcccaggctgtggaaagccccagcccagggatggtcagaactcgggggcagattccactgccccttctgccaaacacatccagaacctgccctcagccctggaagctagcatcttctggggccaggggcttgcttcctcgctccatagccctcaactgcccaggcgctcccaccagcagaactgagcctgcctcctcctcccagcctgccccgctgcccagaggaccccacgcctctcagaggcagaggtcccatgccagcctttgacccacaacggccacacagccgcctccagaccagcactcggactgccctgcagtggccgcttgggcctccctggcggtcccgccctgccctaggctttaccttggaagcctgagaggcgccggctctcttgctcctccatcgatggacactgcattgcttctcatcggacacttgtggagcgcaggggcctggggagcagcgctaaccctggaggcagcctttgggtgatggctttttcttcccttttcctcccgcgggcctgttttcaggtgttcctagcatttctgcctccaggcaggacggcaggggtgagcagctttgggagagacacctggcctttttctcctggagcctctccctcccggccctgggaagtgggcgcagccctgtgttcccccagcttggcagatgggctgcatgcggcgctcccttccttcccacgctcagcggccccggccagaccctggcagacttcacacctcattgctttaccccctggggcctggggaaatgtctgtactttgggaagtcacagaaatacatttttgtgcaaaatggaaaaaaaaaaaaaaaaaa

SEQ ID NO: 221852 - DNA, 1000 bp, Homo Sapiens
gagaaccgatcccttagaccgccccaccttttcagtattgaggctgcagctagaaaaactcttagaaagtttgcctgacgttcggaaccaagcagacgttatttacgtcaatacacagttgctggagagctctgagggcctggcccagggctccacccttgctccactggacttgaacatcgaccctgactctataattgcctcctgcactccccgcgctgccatcagtgtggtcacagcagaagttcatgacagcaaacctcatgaaggacggtacatcctgaatgggggcagtgaggaatgggaagatctgacttctgccccctctgctgcagtcacagctgaaaagaacagtgttttaccgggggagagacttgttaggaatggggtctcctggtcccattcgagcatgctgcccttgggaagctcattgcccgatgaacttttgtttgctgacgactcctcagaaggctcagaagtcctgatgtgaggagaggtgcggggagacattccaaaaatcaagccaattcttctgctgtaggagaatccaattgtacctgatgtttttggtatttgtcttccttaccaagtgaactccatggccccaaagcaccagatgaatgttgttaagtaagctgtcattaaaaatacataatatatatttatttaaagagaaaaaatatgtgtatatcatggaaaaagacaaggatattttaataaaacattacttatttcatttcacttatcttgcatatcttaaaattaagcttcagctgctccttgatattaacatttgtacagagttgaagttgttttttcaagttcttttctttttcatgactattaaatgtaaaaatatttgtaaaatgaaatgccatatttgacttggcttctggtcttgatgtatttgataagaatgattcattcaatgtttaaagttgtataactgattaattttctgatatggcttcctaataaaatatgaataaggaagaaaaaa

SEQ ID NO: 221853 - DNA, 1000 bp, Homo Sapiens
caagtaacacagctttcacaagagcttgacagagccaattcgctattaaaccagactcaacagccttacaggtatctcattgaatcagtgcgtcagagagattctaagattgattcactgacggaatctattgcacaacttgagaaagatgtcagcaacttaaataaagaaaagtcagctttactacagacgaagaatcaaatggcattagatttagaacaacttctaaatcatcgtgaggaattggcagcaatgaaacagattctcgttaagatgcatagtaaacattctgagaacagcttacttctcactaaaacagaaccaaaacatgtgacagaaaatcagaaatcaaagactttgaatgtgcctaaagagcatgaagacaatatatttacacctaaaccaacactctttactaaaaaagaagcacctgagtggtctaagaaacaaaagatgaagacctagtgttttggatgggaagcacctgtagaccattatatactcctgaagttctttttctgatggaaaacaaaattcagcttaatcgtgtactcagcattttttaaataacaatgtttatttgaactaatattaaattaacaaattcagtgtaatcaaaatgtgtaaagaacaatcaatatactttatttttttttctattttataaaataaatatatatgctatgctttaaattttggagctttcataaatgttcaatgcattttaagtgtgtggcttataaatattttggtatttttctatactacgtaaattctgagtttaaatgtcatacacaaatactaagacactttgcatttttaaaaattaagaatcatttgtgaagtccactacgaggtacttcaaaagcccagtaatggtggtcagataccatgtagatggatacagattgttgactcttttgaagttgtttttttcttatattttatattaccattaaccaataaaatctggcagaaagtctgctattccattggtaaa

SEQ ID NO: 221854 - DNA, 1000 bp, Homo Sapiens
actgacatgttgtttaataatctaagcggcagtcctggaggctaccagacttactgagttctacctgagaaacagccaagcaaagtgtgagagaagggttaagactggcttacaatgagatgcttcaaatgaaaagggaattatgagtaaaattgaactttgatgggggattcagttctggaaaagaatttggtattttccagtctgctaggaccaattaccttgaaatattttaaaatctcagtaaatagttattgctgaaatggctgttggcagttcttattatgattcagagaagagcaaatagaccttaacttcattttgaaaaagaccaaattaccatacccgagtgagtaatgacaggactacaactaaaacataaacaacattaatgatgaccataaaaagtcacaaaattgctaaatgttataatttagagttgacataaaaattgatggccaggcatggtggctcacgcctgtaatcccagaactatgtgaggctgaggcaggtggatcacttgaggtcaggagttcaacaccagcctggccaacatggtgaaaccctgtctctactaaaaatacaaaaattagccgggcatggtggtaggggcctgtaacccagctactcgtgaggccaaggcaggagaattgcttgagcctgcagcagctgcagtaagccaagatcatgctgtgcctcaaggaaaaaaaaaattaatgtttactgatatttgttgaagtcctacaacatcacctctgagaataggagaaatgaagcaacagttgtgtctagatgtcagaggcatggctgggcctccatctctgcctaagggagatataaaagagttcaaactattgcccatgttccccagggtcagaagttctaattatgatgatagaggctgggttgtaagtagtaagtgaagggtagcagaatatgccatctttggcataagaagtattttgagttgaagacaattgagaaaaaaaaaaaaaaaaaa

SEQ ID NO: 221855 - DNA, 1000 bp, Homo Sapiens; identical to SEQ ID NO: 116606

SEQ ID NO: 221856 - DNA, 1000 bp, Homo Sapiens
gtacctgggctcagtgcccggtgggactcatctcctggccgcgcagcaaagccagcgggttcgtgctggtccttcctgcaccttaggctgggggtggggggcctgccggcgcattctccacgattgagcgcacaggcctgaagtctggacaacccgcagaaccgaagctccgagcagcgggtcggtggcgagtagtggggtcggtggcgagcagttggtggtgggccgcggccgccactacctcgaggacatttccctcccggagccagctctcctagaaaccccgcggcggccgccgcagccaagtgtttatggcccgcggtcgggtgggatcctagccctgtctcctctcctgggaaggagtgagggtgggacgtgacttagacacctacaaatctatttaccaaagaggagcccgggactgagggaaaaggccaaagagtgtgagtgcatgcggactgggggttcaggggaagaggacgaggaggaggaagatgaggtcgatttcctgatttaaaaaatcgtccaagccccgtggtccagcttaaggtcctcggttacatgcgccgctcagagcaggtcactttctgccttccacgtcctccttcaaggaagccccatgtgggtagctttcaatatcgcaggttcttactcctctgcctctataagctcaaacccaccaacgatcgggcaagtaaaccccctccctcgccgacttcggaactggcgagagttcagcgcagatgggcctgtggggagggggcaagatagatgagggggagcggcatggtgcggggtgaccccttggagagaggaaaaaggccacaagaggggctgccaccgccactaacggagatggccctggtagagacctttgggggtctggaacctctggactccccatgctctaactcccacactctgctatcagaaacttaaacttgaggattttctctgtttttcactcgcaataaattcagagcaaacaaaaaaaaaaaaa

SEQ ID NO: 221857 - DNA, 1000 bp, Homo Sapiens
gcaccaggagcggaccttggcctttcctctgaccatccgctgcttcctgggctgtgagctgcctcccgagggctctagagcccatgtcttcttcgaagtggctgtgaatgggagctcctttgtgagtttccggccggagagagccttgtggcaggcagacacccaggtcacctccggagtggtcaccttcaccctgcagcagctcaatgcctacaaccgcactcggtatgaactgcgggaattcctggaggacacctgtgtgcagtatgtgcagaaacatatttccgcggaaaacacgaaagggagccaaacaagccgctcctacacttcgctggtcctgggcgtcctggtgggcagtttcatcattgctggtgtggctgtaggcatcttcctgtgcacaggtggacggcgatgttaattactctccagccccctcagaaggggctggattgatggaggctggcaagggaaagtttcagctcactgtgaagccagactccccaactgaaacaccagaaggtttggagtgacagctcctttcttctcccacatctgcccactgaagatttgagggaggggagatggagaggagaggtggacaaagtacttggtttgctaagaacctaagaacgtgtatgctttgctgaattagtctgataagtgaatgtttatctatctttgtggaaaacagataatggagttggggcaggaagcctatggcccatcctccaaagacagacagaatcacctgaggcgttcaaaagatataaccaaataaacaagtcatccacaatcaaaatacaacattcaatacttccaggtgtgtcagacttgggatgggacgctgatataatagggtagaaagaagtaacacgaagaagtggtggaaatgtaaaatccaagtcatatggcagtgatcaattattaatcaattaataatattaataaatttcttatatttaaggcaaaaaaaaaataaaaaaaaaaaaaaaaaaaaaaa

SEQ ID NO: 221858 - DNA, 1000 bp, Homo Sapiens
aggaacttaaaactcagtatggcgtctagggattctttgtacaggaaatattgcccaatgactagtcctcatccatgtagcaccactaattcttccatgcctggaagaaacctggggacttagttaggtagattaatatctggagctcctcgagggaccaaatctccaacttttttttcccctcactagcacctggaatgatgctttgtatgtggcagataagtaaatttggcatgcttatatattctacatctgtaaagtgctgagttttatggagagaggcctttttatgcattaaattgtacatggcaaataaatcccagaaggatctgtagatgaggcacctgctttttcttttctctcattgtccaccttactaaaagtcagtagaatcttctacctcataacttccttccaaaggcagctcagaagattagaaccagacttactaaccaattccaccccccaccaacccccttctactgcctactttaaaaaaattaatagttttctatggaactgatctaagattagaaaaattaattttctttaatttcattatgaacttttatttacatgactctaagactataagaaaatctgatggcagtgacaaagtgctagcatttattgttatctaataaagaccttggagcatatgtgcaacttatgagtgtatcagttgttgcatgtaatttttgcctttgtttaagcctggaacttgtaagaaaatgaaaatttaatttttttttctaggacgagctatagaaaagctattgagagtatctagttaatcagtgcagtagttggaaaccttgctggtgtatgtgatgtgcttctgtgcttttgaatgactttatcatctagtctttgtctatttttcctttgatgttcaagtcctagtctataggattggcagtttaaatgctttactcccccttttaaaataaatgattaaaatgtgctttgaaaaaaaaaaaaaaaaaaaaaaaaaaaaaaa

SEQ ID NO: 221859 - DNA, 1000 bp, Homo Sapiens
acttacttagtgagaccattttcaagcgtgaccagagccctgaacccaaggtgccggaacagccagttaaggaagataggaagttgtgtgaaagaccgttggcgtcttctccccccaggctatatgaggatgatgagacccctggtgccctttctgggctgaccaagatggctgtcagccagatagatggccacatgagtgggcagatggtagaacatctgatgaactcagtgatgaagctgtgtgtcatcattgctaagtcctgtgatgcttcgttggcagagctgggagatgacaagtctggagatgccagtaggctaacttcggccttcccagatagtttatatgagtgcttaccagccaagggcacagggtcagcagaagctgtcctgcagaatgcctatcaagctatccataatgaaatgagaggcacatcaggacagccccctgaagggtgtgcagcacccacggtgattgtcagcaatcacaacctaacggacacagttcagaacaagcaactccaagccgtccttcaatgggtagctgcctctgagctcaatgtccctattttgtattttgctggtgatgatgaagggatccaggagaagctacttcagctctcagctgctgctgtggacaaaggatgcagtgtgggcgaggttctgcagtcggtgctgcgctatgagaaggagcgccagctgaatgaggcggtggggaatgtcacaccgctgcagctgctggactggctgatggtgaacctgtaatcggcaaccccactgctttcccctcttctggcagtggggccggcccttatccccgcccttctttctcacttccacatctccccctctatatcctcacagagccctaacattatcttcacaccactctcatcaaagacatgtcatcttgtgctagccactggattttgcagattttcctgtccatgcaagcaaggacgtaaaattaaaaaattacaattaaagggctccaaaaaaaa

SEQ ID NO: 221860 - DNA, 1000 bp, Homo Sapiens; identical to SEQ ID NO: 116622

SEQ ID NO: 221861 - DNA, 1000 bp, Homo Sapiens
aattgaaatcacttgcactgggtttccactcaatggttatacgagcactaggaggaattctagctccaatatattttggggctctgattgatacaacgtgtataaagtggtccaccaacaactgtggcacacgtgggtcatgtaggacatataattccacatcattttcaagggtctacttgggcttgtcttcaatgttaagagtctcatcacttgttttatatattatattaatttatgccatgaagaaaaaatatcaagagaaagatatcaatgcatcagaaaatggaagtgtcatggatgaagcaaacttagaatccttaaataaaaataaacattttgtcccttctgctggggcagatagtgaaacacattgttaaggggagaaaaaaagccacttctgcttctgtgtttccaaacagcattgcattgattcagtaagatgttatttttgaggagttcctggtcctttcactaagaatttccacatcttttatggtggaagtataaataagcctatgaacttataataaaacaaactgtaggtagaaaaaatgagagtactcattgttacattatagctacatatttgtggttaaggttagactatatgatccatacaaattaaagtgagagacatggttactgtgtaataaaagaaaaaatacttgttcaggtaattctaattcttaataaaacaaatgagtatcatacaggtagaggttaaaaaggaggagctagattcatatcctaagtaaagagaaatgcctagtgtctattttattaaacaaacaaacacagagtttgaactataatactaaggcctgaagtctagcttggatatatgctacaataatatctgttactcacataaaattatatatttcacagactttatcaatgtataattaacaattatcttgtttaagtaaatttagaatacatttaagtattgtggaagaaataaagacattccaatatttgcaaaaaaaaaaaaaaa

SEQ ID NO: 221862 - DNA, 1000 bp, Homo Sapiens; identical to SEQ ID NO: 116625

SEQ ID NO: 221863 - DNA, 1000 bp, Homo Sapiens
tcaagcttgggaagcctggtgccgatggccccaccctcaccagcctgggcagcagcaagaactatttattaaaaacttaagatgggccaggtgcggtggctcacacctgtaatcccagcattttgggaggccaaggtgggtggatcacttgaggccaggagttcaagaccagcctggccaacatgatgagacctccgtctctactaaaatacataaattagccgggtgtggtggcaggcgcctgaaatcccagctactcaagaggctgaggcaggagaatcgcttgaacctgggaggcaaaggttgcagtgaactgagattgcgccaccgcactccagcctgggcgacagagcgagactccatctttaaaaaaaaacaagacgggccggcacggtggctcacgcctgtaatcccagcactgagaggccgatcacttgaggtcaggagttcaagaccagcctggccaacatggtgaaaccccatctctactaaaaaatacaaaaattagccaggcatggtggcacacacctgtaatcgtagctgaggcaggagaatcgcctgaacccaggaggcggagcttgcagtgagccgagatcgtgccactgcactccagcctgggcgacagagtgagactccatctcaaaaaaaaaaaaaaaaacttaagatggacacagctgactggacccccatcctgcctcacccatgggtgctgcaccccagacccatcctgccacttctatgtctctggaccacaggatggtggtggcattgcaggttggcaagtgggctgatggggtccgccctcctcactgctgagctcctcacctggacagtctcctggacaaggagtttccagctgctggctggagtctcaggccaaattgcagagggtcctccagggtcctgaagagcactggactaagagtctagtggttccagggccctgaccagtaggtgctcaataaatgtttgttgttgaatgaaaaaaaaaaaaaaaaaa

SEQ ID NO: 221864 - DNA, 1000 bp, Homo Sapiens
ggaacaccctctgcctaatgacaggaccttcctgggaagcatcttgacagcagtggcagatgaagagccagaatcaactcctgtgcccttgcttggaagtgacaagagtgctttcacccgagtagcatcaatggtttcccttcagcccgcagagaccccaggcatggaggagagcctggcagaaatgagtattatgactactgagcttcagagtctttgttccctgctacaagagtctaaagaagaagccatcaggactctgcagcgaaaaatttgtgagctgcaagctaggctgcaggcccaggaagaacagcatcaggaagtccagaaggcaaaagaagcagacatagagaagctgaaccaggccttgtgcttgcgctacaagaatgaaaaggagctccaggaagtgatacagcagcagaatgagaagatcctagaacagatagacaagagtggcgagctcataagccttagagaggaggtgacccaccttacccgctcacttcggcgtgcggagacagagaccaaagtgctccaggaggccctggcaggccagctggactccaactgccagcctatggccaccaattggatccaggagaaagtgtggctctctcaggaggtggacaaactgagagtgatgttcctggagatgaaaaatgagaaggaaaaactcatgatcaagttccagagccatagaaatatcctagaggagaaccttcggcgctctgacaaggagttagaaaaactagatgacattgttcagcatatttataagaccctgctctctattccagaggtggtgaggggatgcaaagaactacagggattgctggaatttctgagctaagaaactgaaagccagaatctgcttcacctctttttacctgcaatacccccttaccccaataccaagaccaactggcatagagccaactgagataaatgctatttaaataaagtgtatttaatgaatttctccaaaaaaaaaaaaaaaaaa

SEQ ID NO: 221865 - DNA, 1000 bp, Homo Sapiens
gccagaggttgagccgccccagggtatgaggagatgaataactccacagctcctcctggaccctgcgcgggagcaggcagctcctgtgctgtaaagaaaattgattcgcttgcggctcacctcagtcgaggaagccctggaatgttcagcagaacaccaccactgtgacatggggctgtggcagtgggagacaccgcgcgtggcgtgggtgtgtgtggcagcgtggctcgcattcagtcctgtgtaggagaggaaagggaatcaaaagcttgagcacaaacagatacctcagcccggtaagctgcagctctgctcaactgcgtcttctctcagccctccacacacactcacccccactcccacacacatacacacacacacacacataccccatctcccgagggctgacctcctctggcctcagcctgcagggtgtgggcagagaagggcatctgggacgtggtgccagtgaggagcccagttggctggcactgggcccatttgaaggtgtctcagacatttggccagtatgtctttctcaggggtttggtcacaaaggatggactcttcccacccagaggatgcagggaaagcacactgtgtctttccggtcattggatcctctccctttccccaggcagctcgcctggccacaccgttggagtgaaccctcactgccctcaaggacaacagcagggtgtcacccagagcccgatgaggggtgccagcaggtgcccccacgagtggggccttggcccaagcagagcttcccctgaaggtgccatcagccagggcagctctgtcccctcctgctctccatcttatatgtattctaaccaggaaaaatgtgatagcacatgggtagcctaggcagtgagtaaatacctcagatgtcctcctgcagcaagtgtctatatgttgtggttattttctatcttacatgttctcgaatgtttatatttcaataaacctctacctcttcacacaaaaaaaaaaaaaa

SEQ ID NO: 221866 - DNA, 1000 bp, Homo Sapiens
agcgcaacagttgcatttccggaaacaacttctcctggagcctccaatggaacgggaaggagttcacggcctggtacagtgacatggagaccccactcaaagctggccctttccggaggctcggggtctatatcgacttcccgggagggatcctttccttctatggcgtagagtatgataccatgactctggttcacaagtttgcctgcaaattttcagaaccagtctatgctgccttctggctttccaagaaggaaaacgccatccggattgtagatctgggagaggaacccgagaagccagcaccgtccttggtggggactgctccctagactccaggagccatatcccagacctttgccagctacagtgatgggatttgcattttagggtgatttgggggcagaaataactgctgatggtagctggcttttgaaatcctatggggtctctgaatgaaaacattctccagctgctctcttttgctccatatggtgctgttctctatgtgtttgcagtaattcttttttttttttttgagacggagtctcgcactgttgcccaggctggagagcagtggcgcgatcttggctcactgcaagctccgcctcccgagttcaagcaattctcctgcctcagcctcccgagtagctgggattacaggtgcctgccaccacacccagctaatgttttgtatttttagtagagatggggtttcaccatgttggccaggcagatctcaaactcctgacctcgtgatgcacccacctcggcctcccaaagtgctgggattacatgcgtgagccactgcgccctgcctgtttgtagtaatttttaggcaccaaatctccctcatcttctagtgccattctcctctctgttcaggtaaatgtcacactgtgcccagaatggatgaccaggaaccttaaagagtggctgaaaagattgcagagttatcataataaattgctaacttgcgtaaaaaaaaaaaaaaaaaaaa

SEQ ID NO: 221867 - DNA, 1000 bp, Homo Sapiens; identical to SEQ ID NO: 116629

SEQ ID NO: 221868 - DNA, 1000 bp, Homo Sapiens
aatggaaacgtgtgtgttcctccaaattttctagtatgatcggtgagctgttttgtaaagaagcctcatattacagagttgcttttgcacctaaatttagaattgtattccatgaactgttcctcccttttctctgcttttctcctctctgttcctcttttaataccacacgtctgttgcttgcatttagtttgtcttcttccttcagctgtgtatcccagactgttaatacagaaaagagacatttcagctgtgattatgaccattgtttcatattccaattaaaaaaagaacagcagcctagctacttaaggtggggatttcatagttccaaagaagatttagcagattagagtgagttcacacttttcaggtgccactgtaaggttctctcagcctgggaaactatcaactctttctttaaaaagaaagagggttgaaaatcctctggacgaacagaagtcactttggctgttcagtaaggccaatgttaacaacacgtttagaggaggaaaagttcaacctcaagttaaatggtttgacttattcttcgtatcattagaagaaccccagagatagcattcctctattttattttactttcttttggattgcactgattgtttttgtgggaatgacactttatctggcaaagtaactgagagtttggtaaaagaatattttcttctctgaataataattattttcacagtgaaaatttcagtattttatcactaatgtatgagcaatgatctatatcaatttcaaggcacgtgaaaaaaattttttagtatgtgcaatttaatatagaaagatttctgcctgtttggacaataggttttgggtagtacagattaggataagtaagcttatatatgcacagagattattgtattacctgtaaattgatttacaagtacttaaaagcgtggtccccagtgaggccaagaaagtttccggttaagttctttaataataatcctacagtttatcttaagaa

SEQ ID NO: 221869 - DNA, 1000 bp, Homo Sapiens
gaggggcctggggaggctggggggcccctcaccccaaggcgggtgagctctgacctccagcatgccacggcccagctctccctggagcaccgagactcctgagggctgtgggcaggggacctgtgtgccccgcaccccccatgcttcttttgctgccttaagccccctatgccctggaggtgagggcagctctcttgtctcttccctgcctcctcccttttccctccccacattttgtataaaactttaatttcttttttttaaaaatggtgggggtgggtgggtgcccagggctaggggctattccctgtctctgtgggtttctaagctctgggcaaattggtggtagggggagggagggggaagttaagggggtcacctccattctggggaatttatatttgaattgaggctttggccttaacacccaggaacttttctattacaatcgcttaggaagtaaagccttgtctccctccctgttctctgcctcttgtacccctctgacccacccgctctgccccactcccagccctcctcagccccagccctgcctgccctgcccctccagggggccatgagtgcctaggtttctcataccccacaaggtcacagcaggggagggagggacaattttataatgaaccaaaaattccatgtgttggggggtggggggcggaggagggtgaggggtgccgcccatgggccacaaatctctacaagtgcctgctatccctctcccactccccaccccagcaccggtccaaccccttcatccccagctgctcctaggactggcccatgggcaggcgggtggggggatgggaagggggtgccctgaaaccaaactggaagccccctctgcctcccagctggggcctctggggtggggtggggggctgtggtcaagccttattctgtattggggactgagggtggggggagtagaggggccgctggagaatgtattcaaaacaataaactttggacctttggaaaa

SEQ ID NO: 221870 - DNA, 1000 bp, Homo Sapiens
aagttgtttgaatcaagtgaaaacattgaagactccaacaaccccaaaacagagaaaataaaagatcaagtaaatggtacatcagaagatagtgctgatggttcaacagttggaactgctgtttcttcttcagatgatgcaggtctgcctccaccacctccccttctggatttggaaggacaggaaagtaaccaatctgacaaacccacaatgacaattgtatctcctcttccaaatgattctactagtctccctccatctctggactgtctcaatcaagactgtggagatcataaatctgagataatacaatcatttccaccgcttgactcacttaacttgcccctgccaccagtagattttatgaaaaaccaagaagattccaaccttgagatccagtgtcaggagttctctattcctcccaactctgatcaagatcttaatgaatccctgccacctccacctgcagaactgttataaatattacaacttgctttttagctgatcttccatcctcaaatgactcttttttctttatatgttaacatatataaaatggcaactgatagtcaattttgatttttattcaggaactatctgaaatctgctcagagcctatgtgcatagatgaaacttttttttaaaaaaagttatttaacagtaatctatttactaattatagtacctatctttaaagtatagtacattttacatatgtaaatggtatgtttcaataatttaagaactctgaaacaatctacatatacttattacccagtacagttttttttcccctgaaaagctgtgtataaaattatggtgaataaacttttatgtttccatttcaaagaccagggtggagaggaataagagactaagtatatgcttcaagttttaaattaatacctcaagtattaaataaatattccaagtttgtgggaatgggagattaaaatgcatgtttgagagtaaaaaaaaaaaaaaaaaaaaaaaaaaaaaa

SEQ ID NO: 221871 - DNA, 1000 bp, Homo Sapiens
ccctttaatggtctaactggcatctcttgtatcaagaagtacctttaaggtagaccttttcagggtgccctcaggaaagggccctgctcatgtttttttcctgtccccttagaccaaccccaggtgtccactgcaggggttctgcctgttcccaaactttttccattccaggaacaaaggagaagccactttccccaggacgcaagactctcccctccactgtccgggacagcgttcgccctttagcggggaggtcattacagcctcatggcctctaccaaggccccagatcacaggatctcctgggccttggagcacctcacgctgggggaatcaatccctgagggactcagaatcttctccgtgcaacctggaaagttcatctcttgtttccttcagtcaaagaaagtccattgtacataacaaaacagcccccaaacagcccagtgccgacaccattgttcctttcacactttcctttgttgcatgcagttgggttcaaatgccaaatagtgattagaagacgaccattctgatctgtgtgtgatctggtcactatgtgactgcctttacggtttctctccatgtgctatatgaatgaagaatgcataccagtgttttaaaaggtatttttatgtgtttttaaacacttttttaaatgagcctgacacctgtgtttcagcatttggagacatccccatgttattcttttaagtgtataattactgatacttttttgtttgtttgtttaactaagttgtgtttaacttatgtgcagtctttataatgtatgtatgttattacagtttcaactatcatattttctttgattacatttataatttgatcttgctctgattataatgccagtgaatgttgctgaactctttgtatatgcaaattgcaagatttaaaccattctgatgcaaggataaacctttactttgactaccagcctgtgtttttgtctttaaatctcttaatttcattcctctgcaaa

SEQ ID NO: 221872 - DNA, 1000 bp, Homo Sapiens
tgcacagacaattagaacattaactctcatctcaaaaactatacaaactttgggaagctgggggagtctgtccaaaagcaagtcaagtttcaaagagacattcatgtgtgaatttttcaaaatgtttcaagaagaaggatatattatagcagttaaaaagttcttggatgaaatttcatctactgaaactaaagagtccagtggtacgagtgagcctgtgcacctgaaagaaggtgagatgtataaaagagctcaaggaagaactcggattggaaaaaagaattttaagaaacgatggttctgcttaacaagcagagagctcacctaccacaaacagccaggcaaagatgcaatctacacaatcccagtaaaaaacattcttgctgtggaaaaactggaagagagctctttcaacaagaaaaatatgttccaagtaatacatacggagaaaccactctatgtccaggcaaataactgtgtagaagctaatgaatggatagacgtactctgcagggtgagccgatgcaatcaaaacaggctcagtttttatcatccctctgtgtatctaaacggaaattggctctgctgtcaggagactggtgaaaacactctcggctgcaagccatgtactgcaggtgtccctgcagacatccaaatagatattgatgaagacagagaaacagaaagaatttattccctttttaccctcagtttacttaagctgcagaagatggaagaggcttgtggaactattgcagtctatcaaggaccacagaaagagcctgatgattattctaactttgtaatcgaggattctgtaacaacctttaagacaattcagcaaataaaaagcataattgagaagctggatgaacctcatgaaaaatataggaagaaaagatccagtagtgcaaaatatgggagcaaggaaaatccaattgttgggaaagcatcttagagtttaacagattggttcagaagaactggaaaatattatttt

SEQ ID NO: 221873 - DNA, 1000 bp, Homo Sapiens
gtctgcagcgagccattgcctttcacgtacctgcctcgcgaccatgacagctacggcgtggacaagaagcggaaacgggggatgcccgacgtccttggggagctgaacagctctgacccccatggcatcgagagcaaacggcggaagaaaaagccggccatcctggaccacttcctgcccaaccacggctcaggcccgttcctcccgccgtcagccctgctgccagaccctgacttcttctctggcaccgtgtccctgcccggcctggagccccctggcgggcctgacctcctggacgatggctttgcctacgaccctacggcccccacactcttcaccatgctggacctgctgcccccggcaccgccacacgctagcgctgttgtgtgcagcggaggtgccggggccgtggttggggagacccccggccctgaaccactgacactggactcgtaccaggccccgggccccggggatggaggcaccgccagccttgtgggcagcaacatgttccccaatcattaccgcgaggcggcctttgggggcggcctcctatccccggggcctgaagccacgtagccccgcgatgccagaggaggggcactgggtggggagggaggtggaggagccgtgcaatcccaaccaggatgtctagcacccccatccccttggcccttcctcatgcttctgaagtggacatattcagccttggcgagaagctccgttgcacgggtttccccttgagcccattttacagatgaggaaactgagtccggagaggaaaagggacatggctcccgtgcactagcttgttacagctgcctctgtccccacatgtgggggcaccttctccagtaggattcggaaaagattgtacatatgggaggagggggcagattcctggccctccctccccagacttgaaggtggggggtaggttggttgttcagagtcttcccaataaagatgagtttttgagcctcaaaaaaaaaaaaaaaaa

SEQ ID NO: 221874 - DNA, 1000 bp, Homo Sapiens
aatgggtcgtaaagcagcagaaacaactcgcaacatcaacaatgcatttggcccaggaactgctaacgaacgtacagtgcagtggtggttcaagaagttttgcaaaggagatgagagccttgaagatgaggagcgtagtggccggccatcagaagttgacaacgaccagttgagagcaatcatcgaagctgatccccttacaactacacgagaagttgctgaagaactcaatgtcaaccattctacggtcgttcggcatttgaagcaaattgaaaaggtgaaaaagctcgataagtgggtgcctcatgagctgactgaaaatcaaaaaaatcgtcgttttgaagtgtcatcttctcttattctacgcaaccacaacgaaccatttctcgatcggattgtgacgtgtgatgaaaagtggattttatatgacaaccggcgacgatcagctcagtggttggatcaagaagaagctccaaagcacttcccaaagccaatcttgcacccaaaaaaggtcatggtcactatttggtggtctgctgctggtctgatccactacagctttctgaatcccggtgaaaccattacatctgagaagtatgctcaggaaatcgatgagatgaaccaaaaactgcaacgcctgcagctggcattggtcaacagaaagggcccaattcttctccacgacaatgcccgaccgcatgttgcacaacccacacttcaaaagttgaatgaattgggctatgaagttttgcctcatccaccgtattcacctgacctcttgccaaccaactaccacgtctttaagcatctcaacaactttttgcagggaaaacgcttccacaaccagcaggatgcagaaaatgctttccaagagttcgtcgaatcccaaagcacggatttttacgctacaggaataaaccaacttatttctcgttggcaaaaatgtgttgattgtaatggttcctattttgattaataaaaatgcgttgagcctaaaaaa

SEQ ID NO: 221875 - DNA, 1000 bp, Homo Sapiens
ctaggggcagagggcactgccaggctgtgttcagttagcacagctcacctcattaggagctcagcctctctcctcactctgcctctttgtgtctctttttctcctctctgagcctttgtctattgtgttcctgtcacccaccctttcatcatctttttgccaggcattcctggctgtcacttggagccaacagtaacttgccaccttaaggcagggtcatccccgggccaggaggatgaggttgtcctgaggggctccaaagaagacaatagttcccactcatgattttccgttacaaacaggcagctggggcatggttggcctccaatgatttcattcaaggccaaagtcctgagccccctccgctggtcccagtccagctcttatcaactccccaaaggaaaacccactggttcttagctctgtgggtaggaaggggccctagaaagggcctagttactatcctgtcagttctaacagtagtggaacaggagaatctgggccctaggagccctgtaactcccaggagagaccactgaaaatactggagcaacaatgcccctgcttccatttctccccacctcactctcaccaagtcaccagagggtggttctgtaggacctcttttgttgcttaagatgcagatggctcttaagaatcaggcagtcgcccacttctctccagatgaagggaagacattcataggtcccaaatctgcccattcagatgtcacataatatggtgggatatcaatttacttcttccacacatgtggttgtgcacatgtgagcttgtgtgcttttggagagaatgttgattggcaaaagcagcacagtattaatatttagagtaggatgcagcctcttatgcaccacagttaaatctagaacgaacaaaatttcagagctcaagacatgggacatttaaatcctcaaggagtttggaacaaaataaacagatctaaaaattaaaaaaaaaaaaaaaaaaaaaaaaaaaaaaa

SEQ ID NO: 221876 - DNA, 1000 bp, Homo Sapiens
ccacaaatgtgaagaatgtggcagagcttttaaccagtccgcaaagctcactgaacataagttaattcatactggagaaaaaccctacaaatgtaaagaatgtggaaaagcttttcaccgatactcaatccttagtacacataagaaaattcatactggggagaaaccccacaaatgtggagaatgcggaaaagcctttaactggtcctcaactcttattacacataagataattcacagtggagaaaaaccctacaaatatgaagaatgtggcaaagcttttaaccagtcctcacaccttatgagacataagaaaattcatagtaaagagaaaccttacaaatgtgaacagtgtggcaaggtctttaagaagtcctcaactcttactgcacataagatcattcatactggagagaaaccttacaaatgtgaggaatgtggcaaaggtttcagccaactctcaaaccttactaaacacaagaagattcatactagagagaaaccctacaaacgtgaagaatgtggcatatcttttaaccagttctcacaacttgctatacataagatgattcacacttgaatgaaaccctacaaatgtgaacgatgtggcagttgttttaactagttctcgaactttactatgcataagaaaattcaaactggagagaaactctacaaatgtgaagaatgtggcaaagcttttaaccaagtctcaacacttactatacataagataatttatactggagcaaaaccttggaaattcaaagaatgtggtaaaacttataatcctcaaaacttcttacacctaaaattcatgcaggagagaaaccccacaaatgtgaaaaatttggtaaattctttaacaaatcttcaaccctttctgcacataatataattcatactggagagaaaccccacaaatatgaagaatgtggtaatgcttttaaccaattctcaaatcttactaaacaaaattaatactgaaaatgttacaaac

SEQ ID NO: 221877 - DNA, 1000 bp, Homo Sapiens; identical to SEQ ID NO: 116635

SEQ ID NO: 221878 - DNA, 1000 bp, Homo Sapiens
tatgtgaagaaaatccagtttaaattacatgaaagctatggcaatcctttaagagttgttactaaacctccatatgaaattactgaaacaggatggggtgaattcgaaataatcatcaaaatatttttcattgaccctaatgaaagacctgtaaccctgtatcatttgctaaagctgtttcaatcagacaccaatgcaatgctggggaaaaagacagtggtttcagagttctatgatgaaatgatatttcaagacccaacagcaatgatgcaacaattattgacaacatctcgtcagctaacattaggagcctataagcatgaaacagaatttgcagagcttgaagtgaaaaccagagaaaaattagaagctgctaagaaaaaaacaagctttgagattgcagagcttaaggagagattaaaagcaagtcgtgaaactataaattgtttaaaaaatgaaatcagaaaacttgaagaagatgaccaagcaaaagacatataaacagttctcatgagaacttggtagtaagctaaactgaaaataaggtgggcttcactggagaaatggacttactgcaaatgctgtgatgtttcttagaggaacttcatatacagctgttgaccatgaatttcttagcaataggaatttgtactatttaagcaatctttaatggaaaatatgtgtgtaagaatggatgctatataggtattttaccaacccattttaagaaaattctatgatattaagcacagtttttaaaaatgtttattgtagtatatgtatagcttattacccttttgacaggcatcaaaatttcattataaagtattacttgtacaaattttgtacttctttagtggctagaattagtgaagaaacttaatgtgtatatttaatttcttcaagttcttacctgcccccatccttttttgtatatgatgtgtccagtaagtattcaataaatgtagtttacagatcctaaaaaaaaaaaaaaaaaaaa

SEQ ID NO: 221879 - DNA, 1000 bp, Homo Sapiens
cacgcaagtgtgggtgtgtgagtgtgcgtatgtggggaccccccagggcatggtggggtctgaggcgtgtgttcccatttagggctgaatgaagccatgacttggaaaggtggtggggggtggatggcggctgtgactcagggcccagggatcacatgggggtcactgctgccatcagcagtcaggcagggagaacagaaatgcaaaaatacagatgtctatttttctaaactggggggtggaggggtgcctcctgacagcttccaaagagctgactgtggagggcccacagtgtatcccacccctgcccgagagtctctctcctttgggacccccgggttcccagagctccgaggaaactgatccttcatgtttcaatagctgttgttgtttttctctttgggccgggccgggccggggaagggccgagcaggctccaggaggcctccagagtcagctggaccttgctgtgtcgcccgcaggcagccctgcagacaccggtgaggtgggatgatttcaggaggtcccagcccgggactgcccgcccctctgccctgggaaccagtccaaggggctgtcagttgaatttgcctttttgttgttgttgttgtttttgttgtttatttgttctccttttaaggaattatgaagctaagaaaagttttgtgttttgggggttggtggacaaagttctagctgattaaatatggtctaacttattgatactatttttttttcttttaatgttgtactgtggagaaaaactattttgagccatggggttggtgtttacaagaactttccacttttgccaaaatgttacaattgaaaggcatctatctgcgtcttcagtttcctgatattttcttaaaagatctagtgtcctttttgtacactaaacaggtgaatgctgacttttttcattctccaataaatttcactgaactgaaaaaaaaaaaaaaaaaaaaaaaaaaaaaaaaaaaaaaaaaaaaaaaaaaaa

SEQ ID NO: 221880 - DNA, 1000 bp, Homo Sapiens; identical to SEQ ID NO: 116639

SEQ ID NO: 221881 - DNA, 968 bp, Homo Sapiens; identical to SEQ ID NO: 29734

SEQ ID NO: 221882 - DNA, 1000 bp, Homo Sapiens
tgttaagggttttaaaagctgtcataactcttaccttttatttctaccagtgatcaatcatttctctttacaaatttagggaggaaacaactgttcaaatgtataggggacagaaacctgacatttagagaacagaaattttaattgccaaattaaagcagctaggctgcccctgggcttaacaaaattcctatttttgaactagacccgaggtattttatcattattatttgataggtaccattaacctttgttttgtgattatcgacttttggggggaaagatgagtaattaaacacactcgcccattttctaagtggtttagaaggttgcagtctgcctcaccatacaaagccagtttaaataggaatatatcacatcatacttcacatagcagtcaacctcagaggaaagtcatttattcagaaggcatagattttgctagacagcagtgatgcattacaaatatataattatttgcactaatatttgagcaggtggaatggattagaacatggtcaacatcatgctgctgataacatgtatttttctatattaatatgtactgtgcaacatgtattaaaattgtcaataattcattttagccaagatactaatatttatattactgtgtttaagagacagtatccaactgagccacttttaatttaaaagtctgaaactggaattaagtttactttcaaaaatcacttaaattactttataatcagtgaaaggtcagtaaaatgtagaattataagtgcctagtgacttaataggaggaaatatggagggttaaggaaggaagtaggaacctggaataagaaagctaagtttcatttatagttccaatgagtgactttctttgttttcaccactgggaatcttaaatgaagaaagtgtcgtatcccttccagttatctttatgttaataaactaagtgaagtttggatagaactaacaaaggaattagtctccattggtggacttccagagtttt

SEQ ID NO: 221883 - DNA, 1000 bp, Homo Sapiens
aaaaaaaaaaccaaaaaaaaaaatttttttttaaaagggagacattttccagtgaccactggattgttttaatttcccaagcttttttttcccccataaataagtttcactctttggcgattttcttcacttgtttaagataacgtgctagctattccaacaggtaacagctttcacagtctgcccctggcctgtctcaccccatcccccaccctattcctgccagtgagtccttcctgtgcttctctcccttctcccctcccagccagctgacttcagtcacccctgtcccccctcccctgccaataagctcccccaggaataaaggctttgttttggggatgcttaaatcttgactggcacttcccggctgtgggggctggggagccacttgtaacatttctgtgcagattttatgttagccactgctatgtaaaagcacgttcaaaatgaatttcagcagattatgtgttaccataatgaataaacgtcctctatcaccatttggagtctcccttttctccaggatcttgatcctggtccccaaaaccagagtgaatcaaaagagcttcctcccctgaggcaaagtggatttgtaagcagttctgaaacatcacttactcagaagagggaacgatgtattttgatgagtgcaaattgggaagagctggaggcctactgcttgggacagttttttttttttttttttttttaaatatgagtgctagcttattctgtaattgcggcaactttgaaaattgtattttactggaaatctgccagccatcaccacccgattttgattgtatccttcctcccatcctttaatctgttcattgctttgggggaggtggggcagctggctcacacgttggagtttgttctttgatggatgaacgaacactccagttttctttcccgtgaaggttgtttcagccacaaaccacttcattttgctgtttcaatttcaaaataaaaggaaacttatattgaaagacaa

SEQ ID NO: 221884 - DNA, 1000 bp, Homo Sapiens
ggttttttgcatactgctatataattctctgtctctctctgtttatctctcccctccctcccctccccttcttctccatctccattcttttgaatttcctcatccctccatctcaatcccgtatctacgcacccccccccccccaggcaaagcagtgctctgagtatcacatcacacaaaaggaacaaaagcgaaacacacaaaccagcctcaacttacacttggttactcaaaagaacaagagtcaatggtacttgtcctagcgttttggaagaggaaaacaggaacccaccaaaccaaccaatcaaccaaacaaagaaaaaattccacaatgaaagaatgtattttgtctttttgcattttggtgtataagccatcaatattcagcaaaatgattcctttctttaaaaaaaaaaaatgtggaggaaagtagaaatttaccaaggttgttggcccagggcgttaaattcacagatttttttaacgagaaaaacacacagaagaagctacctcaggtgtttttacctcagcaccttgctcttgtgtttcccttagagattttgtaaagctgatagttggagcatttttttatttttttaataaaaatgagttggaaaaaaaataagatatcaactgccagcctggagaaggtgacagtccaagtgtgcaacagctgttctgaattgtcttccgctagccaagaacctatatggccttcttttggacaaaccttgaaaatgtttatttaaaaaaaaaaaagatgacaaagaaaaacagagagagagaatattggagatgtcctgaattttaatagggtacgcgccattagggctttttgcgctaaaggatgaacatgtactggtttatgtggacaagccattataccaccagactgcaatgccagtttcctctactgcaaacagtgttctgtgacaaaaaaaaaaaaaaaaaaaagaaaaaaaaagaaaaaacagaaatatatccagctaacaagaaaaaa

SEQ ID NO: 221885 - DNA, 1000 bp, Homo Sapiens
caccttgcgtacaagaggtgtaccagccccagcaataaccaggggaaggggaggagttacagcccggccagttggagttgtagtaccacgagggacgccaactcccagaggagtcctgtccacccgagggccagtgagtcggggaagaggacttctcactcccagagcaagaggagtccccccaactgggtacagacctccaccgccacccccgacacaagagacttatggagaatatgactatgatgatggatatggcactgcttatgatgaacagagttatgattcctatgataacagctatagcaccccagcccaaagtggtgctgattactatgattacggacatggactcagtgaggagacttatgattcctacgggcaagaagagtggactaactcaagacacaaggcaccttcagcgaggacagcaaagggcgtctacagagaccagccatatggcagatactgattgtactgtctgatgttgtgaaatagccaatctccaccagtcctgtatactgttcaaagtaatttttttctatgaacaatccctttttaaataaatcaaaatgcttaaaatctgaatggatggaacttaaaactactttgttgaaacatcaacctgggcagaaaaaaagaaaaaaagacatgtaaaattttgttatttccagtctgtatatgaaaaaataggtcatcaaaaggaaaaaaaataactttgattaactagtgttaaacaaaaaataggtttactaaatatgttaatctattcttttaacataagcctcacctttcattttaaaggtttccatagaatttagttattttatctttcagccatatgctagtttttttttctcttgccaacatgcgtaaaaagggaagccaattacaagtgcaaataatgtggtattcttttgtaactcaagtcttgaaatgttctgtagtgttaagcaaagtctcctcttgcttgatactaaataaacttttgaaaaaaaaa

SEQ ID NO: 221886 - DNA, 1000 bp, Homo Sapiens; identical to SEQ ID NO: 116642

SEQ ID NO: 221887 - DNA, 1000 bp, Homo Sapiens
tggccaccaggcttcccagagttctatggtcttcttcccaagagagtttttaattgtaaatgcatacttgggaaggacttagagttttaaactgttttttgcttttgcttttccctgactccctttgcttggagtcagctgcacaccagtagtatggcatgctacgatcaggttctgtcctgaaagctttgcctctttcttggcaaagtttctggtatggtcaagcttgtaaataactttttttacattttaatcttttccattaattaagaggttgaaaagaagtgcagtgtaagaaaacccagcattttaattacttgcaaattaagttaccacagactctgtagtgtgtaaatgttgacaaggaattggatcacaatcatgtagcagaatggcacccagaccactgcccaccagtgacggacatgcacgtggcagatcatgatttccagcccacggagccagcatttgaaccttgtataattaactttcagttatgatttcccatcgacattttctttgccctgtttgtagctgattgttgtgttttataaatcttctgttaaggcagaagggtgattatgagtggttcacagcagcccttataagctgggccagaaaatttcactaggtcagtaatttaaaccttggatcttcaaaaaataaaataatgtgaagcaaaaccaactaaaaagtgattcttgcacatgaactgtcacatgtttaaaaatgtgttttttagagagcctcagtcttactgatttcaaacacttttttcttctgtgtattgcttttaagagagccatcagttagctatcagactctaggttgatgcattttgtacttagctgtactgtgtgatatttttcattattttaggacgccaacatgagacctgtaataaaatatgtaatggggttgaaagctggggaggaggatctactgctgtacagctaataaatcataacggattaacaagtgctccaaagaaaaaaaaaaa

SEQ ID NO: 221888 - DNA, 1000 bp, Homo Sapiens; identical to SEQ ID NO: 116644

SEQ ID NO: 221889 - DNA, 1000 bp, Homo Sapiens
cccaggcggtggtgtcgatctacgttccaattggggccgtaccatggcggagaagactcaaaagagtgtgaagattgctcctggagcagttgtatgtgtagaaagtgaaatcagaggagatgtaactatcggacctcggacagtgatccaccctaaagcaagaattattgcggaagccgggccaatagtgattggcgaagggaacctaatagaagaacaggcccttatcataaatgcttacccagataatatcactcctgacactgaagatccagaaccaaaacctatgatcattggcaccaataatgtgtttgaagttggctgttattcccaagccatgaagatgggagataataatgtcattgaatcaaaagcatatgtaggcagaaatgtaatattgacaagtggctgcatcattggggcttgttgcaacctaaatacatttgaagtcatccctgagaatacggtgatctatggtgcagactgccttcgtcgggtgcagactgagcgaccgcagccccagacactacagctggatttcttgatgaaaatcttgccaaattaccaccacctaaagaagactatgaaaggaagctcaactccagtaaagaactaagaacagtgtataacatgaagataacattttgtctttgaccactgtcttttgaatgggcccacagtgtttatgtactcttaacaactcacagaataatacatgttcactttattttgtaaaattgggttgagaggaaactaatggagtttcattgtaactgtcctttgtaatttatataaatgtattattttcctatatccttggttcttttctgataatttacagatttagcttttcttttgttatataaactgctagccacaaattttagttatgtaaaaggctacccttgacaagaaaagacatactgtcatgtatttatattctagcatagactaaactgaataaaaatgctgataacaggacctttaaaaaaaaaaaaaa

SEQ ID NO: 221890 - DNA, 1000 bp, Homo Sapiens
taaagtgaatcttgtccatataaattatattcatggccgggcgcggtggctcacgcttgtaatcccagcactttgggaggccgaggcgggcggatcacgaggtcaggagttcgagaccacggtgaaaccctgtctctactaaaaaatacaaaaaattagccgggcgtggtggcgggcgcctgtagtcccagctactcggagaggctgaggcaggagaatggcgtgaacccgggaggtggagcttgcagtgagccgaggtcgagccactgcagcctgggtgacaaagcgagactccgtctcaaaaaaaaaaaaaaattatattcatatgtattgcattgcaattataattacatatgcagattgattgatagtcatgaataataacgtctgctcctcttacatagaaaaacgatattaaaagaagatcttctctttatttgagactcagaattccttctagaagaaggaagtgctttttgttataggatcccttcttttcctttttttgtttttttgtaagatgtagatgcttattctttgctttagaaaacttctcacttaaaaagatggcatgcacctaggggaataaaaggtcacctcagacaccaggtgtcattcctggtgaggcctgcctcgtcggtggcctggggtctgccggcaggttctggctgcacctgaaggctgcgtgcaccttgtcccctggacaggtctcctttcctggccctgctccagcccagcccttcttctagtggtagctctggctttgcaggcccagctccaggccctgctcctcagagagactcttccagagctggagctgggcacagccataagacaggactggaccagatgctcctgtaaacatccaggggtgtgccaggcccaccctcacaactgcttgttcaggtatcgtgatgggccactcggtccaaaatcagccaggccatcttttccatcatctcacttcaaataaacataataattatatttgatcatttgc

SEQ ID NO: 221891 - DNA, 1000 bp, Homo Sapiens
tctggtttggaacaagctcatgcaatgccctcaccacggatcctgaaaacacatcttccctttcacttgctgccaccatccttgctagagaaaaactgtaagataatctatgtagcaagaaatcccaaggacaacatggtgtcctattaccatttccaaagaatgaataaagctcttcctgctccaggaacatgggaagagtattttgagacttttctggctgggaaagtgtgctggggctcctggcatgaacatgtgaaaggatggtgggaagccaaagacaaacaccgtattctctatctcttctatgaggacatgaagaagaacccaaagcatgaaattcagaagctggcagaatttattgggaagaaattagatgacaaagttctagataaaattgtccattacacttcgtttgatgtcatgaaacagaatccaatggcaaactattcatcgattcctgctgaaatcatggaccactccatttctccattcatgagaaaaggggcagtgggagactggaagaaacacttcaccgtggctcagaatgagagatttgatgaagattacaagaagaaaatgactgataccagactaactttccacttccagttctagtaaggaagaaaaactgaaaatgttttagtttattacccagtatatttgggtaataatgaaagtttaattctcataacaaatgatatcagattccagttatcagaatagtttactgtgtttgctcttattcactctactaaaaaattattttaaaaggctggaggcaaggtggtgacaggcagcagggtggcgacatggagagagggaagctcaataaatcactaggtacaatcctggtatcattgccaattatcatcatatttacattttctacaatcatgtgcttattaacatattggaaatgcttcagtcctcacatgataatacactaacattttcagattaagttttggttcaagttaattttttttttttttttttt

SEQ ID NO: 221892 - DNA, 1000 bp, Homo Sapiens
ttaaagaggctgtttagcactaatttgaccaaatctatagtcaaagtttgattctacttgaattttttggaaatttgctgttgtattacttattctttgccttgttctctgtgaagtcctttcctaaaaaagaaacttatacaatttagttcacaaaactttgttgacctctttctctgtagaaatgaaaactaaatatatataattgagaaataattctgatactcttcattcctataaaagtaattaagatagacctataggattgttgaactttgctgccaaatatagtaaccagtaaccacagctagctgtaaaattgaaaattcagttcagtcaaactagccatatttcaagtgctcaacagccactggtggctattggttaccttactgaccagccaatataggctatttccgtcattatagaaagctctattggacaacattggtctaggacatatattttgtattttcccctcacccaccatccaataatgagtaatagcacaaagtaaaagtgacttaatttgaaattacttctgtttggctagtttgcttagctgatcaccaccaacatcataggtctataaatcacccaactaagatcaggggtgtttcatgggaaaatctacacaaactattcattaaaaaccatagagccatggactgtcatttctgatttctgtttgattctttgtggtcatcattgaatatacaggggcctctatacactctggggagtatctattctcaggtgagcaaaataccgaatactgaatggaaatcaactgtaagtattaggacttcatatgcaacttgaatttttggtgctgtccggagtctagagccccacaatctgttttggttacagtttatccctgtaggataaatgatccatttaactattcatcagaggtgctgtaattttaaattgtctcttgtctccttcagttaattttcagaattaaaaacataccatgggaaaaaaaaaaaaaaaa

SEQ ID NO: 221893 - DNA, 1000 bp, Homo Sapiens
atggttatcactgcgttcctatctaaagagacgggggccacagcgttcagttgatgtggttgtatcctcggttttcctactgacactttcgattgctttcatttgttgtgctcaggttctccaaggacataaaacttccctgaatgatgcttataactgggagtttttgatctgggaaacagctttactactttttttattgcgtctggcctcactggggtctgaaaccaataagaaatacagcaatgtttcaatattacttacagaacagattaatttatatcttaagatggaaaaaaagccaaataagaaagaacagcttactctagtaaacaatgtattaaagctgtccaccaagttgttgaaagagctggacacaccatttagactctatggactgacaatgaatcccttaatctacaatatcacaagagtagttatcctttctgctgtctcaggtgttataagtgatcttctaggatttaatataagactgtggaaaattaaatcataagctgagttaaatgcctggactctcccctggctggtatcaaaacttacctatcaaggaaagtgatgactgcagaaaccagtgagatacccacctgcttgttcacatgcacaggtgctctcagctctgcaaagcgaatgaatggtgtttccggaggagcaagtccttttccaactgggtgtgcatgctaaaaacctgtattttcatgcttttcaaacaacatgaatagtcagctgactaaagactgtgtgtgttgtggtaacaccaaagacaattttgatagtttagcttcagtactgtgacagttatgtttactggacatagtctttttggcaactatgatagatgcccaaagcatgaagcaaagctattttatggaaatatgcaaattcaatacttttcattatagtctatagaactggagatttcatttctctatcaaagagagatcaagcgaactatttaggtaaatccgaataaaagactttt

SEQ ID NO: 221894 - DNA, 1000 bp, Homo Sapiens
atggaaaacaaggagaagaaaatgatgtataatttgtagtttttagtgatagtatttaaaatatatcctcatttgtggggttgagccctaaactttagtttagggtaggtactcaacttaaagaatataggtttcttcttatatctgtattctttagatcctaacctctgtctaccaacctttttgctcagtaggagtcttgatagaagatatgaatctctgagaggtatgtttatttgttaatcctaaccagtataataagcaaatacactataatagatccacgttactggaatctgtaaaccttgagggatagctttctgcttaaaaacacacacacacacacacacacacggaaaacctttattttaaagtcaagttgtgagcaaatagaaataaaagacaaaaggacatcactcttatcaaatgtgtgagcagtagaagagaccacatttacagtcaatagaaataatgaaaaaaaattaggtgtttagtgtattttaaacagttttgttttgttttacttgagggggacgtcccaaaattaaaggaatggagaaataatcaaaatcatgtataccatcttctatttccagctcctgattccccataggtaacatcccttaggagcgaagagttcaattagtaatgtttatgtgttatgtcaggagatgaaacccttgttcttaggatcacagaatactaaagcacctcaaaaaaacaggtatcatgtgaaacagtggttgccaaaagtggagcgaggatgatttcactaggcatttggcaattcttagagacatttccggttgtcacaattggagggatactagtagcatgaattgggtagaggccagggatgttgctaaatagattataatacacaaggaaagcagcctcaaagaattacccctcccaaaatgtcagaagtgctgaggctgagaaaccctgatgtaaagatcagtcccagttataaactgaaaacagctatttacaaagcagt

SEQ ID NO: 221895 - DNA, 1000 bp, Homo Sapiens
cacccactggaggctcaacctaaggaaccctggccatggtgggtgggttcaccttgggctgaccacccactgggcctgcctgcccctccctcaaaaggcccctggagttgttcaggctgttgggaggtggctcagcctcgaaggacagactgcacacctgttgacctaaactcactggacagactccaggtggacaccaactcctcaacagccccatgacttcagctccacctggggcacccagcaccccaccacagggctagaggccctaagaccctgaaaaaggggcgggcagtagggaaggtggaggcacactcctcttctgttggacaggtgagctctgagggcaagccctgggcccagccacgcagagaccctggctgccctggctcttgtttgtttaggcccaggttctgcccagaccggggcccagcagagctctcaggaggctgagaaacctccagggcagacagaaagttggggccagagctaggttttagagatcctacaggatcccacatgggacggctacctaggtggggcacggcccctacccgagaacaggagggtcctccagagaatgtgccatgatcagggatatgagcagggcctgcccagagcctgggcacctttgggagagggaaaagtgaggtgggacttggaaaggctttgaacgccaggctgatggttgagggatggtgggcagggagggagggcgaagaggctccctctggcatttgggagccggtgggtggagggaggagcccttggaggtggctgcagtcccttaatggggggccttgctctgggcatgtggggctcttcctccatccagagctggcccaagacccttagaaccctgagtgctggcaaatctcactgctcctgacccagcctgtgtattcaaaacgaaaacagtaaaaccaacatcaggatgtccgtcaaaaaaaaaaaaaaaaaaaaaaaaaaaaaaaaaaaaaaaaaaaaaaaaaaaaaaaaa

SEQ ID NO: 221896 - DNA, 1000 bp, Homo Sapiens; identical to SEQ ID NO: 116657

SEQ ID NO: 221897 - DNA, 1000 bp, Homo Sapiens
ccatttaagtatgtacaaataagttaatagtgtaaatgtaggtgtaaaatacaatgcaaaacaaaataatgaagtaagtgaattaaattattgcaccaaatatggggatatgaaatagggaaagaaaagcattaagttacttatagtccataaagggactacattattttgttactctgataatcccataaaacaaagttttaagaatgtttacagtaaccatgaatggaattagtgaaactattcatatcaatgcaaaaaaaaaaaaaaaaaaaagcaaagaaactaagtctgtacagcaaaagatggtaaggaaacaagaaaattaaatgaagacaaaggttgtgattattacagtaaatgaaaataggtttttatctttaaaatgtagactcaaactgcaaagctaatgatatgctatctgcaaaatattcctattttgtaaataaataaaaccatagatttaaagaagaaagggcacagatgtactggggagacaaaaataactgatccgttgggtgtataccatgtgccaagcaattttcatatactcatttaacatgacatatctataattatatgaggcagatattattaacctcagtctatagatgagaagactaaagctcagagggattgctaaaaactagtaaataaattatggaaccatgatttgaatttagatttaagtctgactgaggcatgttcaaagacactacactgcctctccagaaatcaggagtagcaatattaacactggacaaagaatttaaagcaagtaaaaaaaaattaagagaatttcatattaataacaagtataatgcacaataaaactgtaccaaatgacataaaaatgcataatgaaatttattagaaattaaaaattaaagggcatagttacaattattgaggaattctcatagctctgccttatagatcatgtaaacaaacaaggtcatagaggacttaaatagcaaagcagaaaaaaaaaaaaaaaaaa

SEQ ID NO: 221898 - DNA, 1000 bp, Homo Sapiens
gcgacattgtgctgaatttctccttgaactttttaactttatatgtaaaataactttgatcttggtcatttgaaagatcatttccaggtctaaaattccatgattttgtatttaattcttcctgagaacagaagaggggaaagcaagagaggacggttttgtgtctttatgaactttgttacttaagtactccattggagacataatttttctaattagtggatctttttccactggaaagtgtgatagctcattgctaatttttcattcatagttcattgcttccatttgacctaagattggccatttgttggtgtgaaaatattttcttttcagaaatagtttactagtgattgaagtacttttcttatttttgcttcctattataaaatggcgtggggggaagggggaaggatggagatgggaggagagggtaaaagaatagtactctgattttttaagaattagtatctactatcttggatatttgaaaaaaaattggttgaaactatgtttaagttttatgtgtgccttgtaagattgttgtaaaattttttgtgagcactttgagatttttgctgggggaggggtgttttgtgaaagtgatggttattatttatattatttattcctgttcagtagcacggaatgatctccaaacattcctaggagagtgtctgtttgcatgatatgtctaaaaattttcaggaaaatggaatctttttttaaagttcaggtatgacaaagtatagaatttattcatttaacatattcacatttagtttatgtttctgatatgacagaaaaatgaaaagtgtttgagttcagcctcttcatttactccatttacatataaaagatcttgaaaaggtagttgttacttcgttgtcagagaaaaacacttgccctttttcctgggatgtaactatcttacatgtttacataagaaataataaactggaggtgggaatggaaaaaaaaaagaaaaaaaaaaaaaaaa

SEQ ID NO: 221899 - DNA, 1000 bp, Homo Sapiens
gtaggcattttcgatgtaagatcaaaattccttggtgttgagatggaaaaggtgcaactcaatattcaggatttacttcagatgcaatatgaaggagtagctgtaatgaaaatgtttgataaggttaaagtgaatgtaaaccttctcatatacctgctgaacaagaagttctatggaaagtgaagtgcctacagaaatttcttggattctgtatcatctggattaggaaatgaatttgtttaatatttttgtttttaaacatgattgaaatcactgcttataaatgtgtgattttttttaaatgaccaaaactgttctgaagaatgtacccaggtgcctttttgctaatttgatactataatagaatgagacataaaatgaattaatggaaacatatccacactgtactgtgatataggtactctgatttaaaactttggacatcctgtgatctgttttaaagttggggggtgggaaatttagctgactagggacaaacatgtaaacctattttcctatgaaaaaagttttaaatgtcccacttgaataacgtaattcttcatagtttttttaatctatggataaatggaaacctaattatttgtaatgaattatttagacagttctaagccctgtcttctgggagttatcaattttaaagagaacttttgtgcaattcaaatgaagtttttataagtaattgaaaatgacaacacaataacactttctgtataaaagtatatattttatgtgatttattcctactaaatgaaagtgcactactgcctcatgtaaagactcttgcacgcagagcctttaagtgactaaggaacaacatagatagtgagcatagtccccacctccacccctcacaatttatttgaatacttcaattgtgcctctcaattttttgtaatgctaaaaaatcagtatctagatggtttttaaatgtattctctggaaattgttttatgtaaaataaatgttacttaattccatt

SEQ ID NO: 221900 - DNA, 1000 bp, Homo Sapiens
gttagaaattgacacagccaagagtcttattctacatctgataattcacccatgaaagagacccagtggttactgtgcacttaggaaaaccttcagccacatctttcttattagtttacagtgaaatgttatctcagggacattcaaacaaaggaggaggagtcatagggaagagaaagaaatggaagcacagcttctttcagacttccctgacaagcccatggcaatttgtcatcccctccttattttatttgggagagggaaatgtttcagaaacaaaagggcctcatcccctttattttccctgtgtatacattcactgctgtccagtgctgtagacaaacggtttgtttgaaaacattttgtgaaagcctgctttgttccacagcattgtctccactcttgaggagcagaagcatatatctttatgagaaagatggaggcttgagttatgaaatacttttacatttaaggagataaaggatgtacatatgaatgggcacattttactgcacacttcagacgctttgacttttttaaaaaaattgtttctccgtgtgtctttaaccacccagtaccatacttttttcttgatctggatctacttgtcaatttcttctttatttttctgtaggatggagatgatattgtagctgtttgtacataatgtaatccagggagtcctaattcttccctctgattgtggtttctcagcttttttactgctctttagagagagtaaatagttcaaaattcacctcaacaattttctagaggtcaatttggaaccaaaaatgaaataagacatgtagctaaagtaagttaaaagattatgataaactcagaaaataaacacagagaaggaatctcatttttcagtcttacagaagattgtgtgaaggctgactatacataaagtgactggaattttaacaggtgaacctgcatatgtatatgcaggtagttgtcaccatggattgagtccagtcgtagtatttaa

SEQ ID NO: 221901 - DNA, 1000 bp, Homo Sapiens
ctgaatgtgggatactatcggaagaactgaaaaacctggtcatgaacactggaccctattactttgtgaagaatttacctcttcatgaattaattacacctgaattcatcagtacctttataaagaaaggttcttgctatgcactaacatacaatacacatattgatgaagataatactgttgccctgctaccaaatgggaaattaattttgtcactggataaagacacttatgaagaaactggacttcagggtcatccatctcagttttctggcagaaaaattatgaaatttattgtttccattgatttgatggaattatccttaaacttggattctaagaagtatgaaagaatatcttggtctttcaaagaaaagaagccattgaaatttgattttcttttggcttggcataaaacaggttcagaagaatcgacaatgatgtcatatttttccaagtaccaaattcaggagcatcagccaaaagtagcactgagcacgttgagagatctccagtgcccagtgctgcagagcagcgagctggagggaacgccagaggtgtcctgccgggctctggagctcttcgactggctcggcgccgtcttcagtaatgtcgacctaaataatgagcctaataatttcatatcaacctattgctgtcctgagccaagcacagtggtggcaaaagcttatttgtgtacaatcactggcttcatacttccagagaagatctgtctcctattggaacatctctgtcactactttgatgaaccgaagttagctccatgggttacactgtccgttcaaggctttgcagacagccctgtttcttgggaaaaaaatgaacatggttttcgaaaaggaggagaacatttatataactttgtgatttttaataatcaggactattggcttcagatggctgttggggcaaatgatcactgtccaccataaaaaataaaaattaaaaatcgtgtttacttacaaaaaaaaaaaaaaaa

SEQ ID NO: 221902 - DNA, 1000 bp, Homo Sapiens
tgtcctcataaaaacctatcacaagaagtcagccttccaagtatacatgattaatttagcagtagcagatctactttgtgtgtgcacactgcctctccgtgtggtctattatgttcacaaaggcatttggctctttggtgacttcttgtgccgcctcagcacctatgctttgtatgtcaacctctattgtagcatcttctttatgacagccatgagctttttccggtgcattgcaattgtttttccagtccagaacattaatttggttacacagaaaaaagccaggtttgtgtgtgtaggtatttggatttttgtgattttgaccagttctccatttctaatggccaaaccacaaaaagatgagaaaaataataccaagtgctttgagcccccacaagacaatcaaactaaaaatcatgttttggtcttgcattatgtgtcattgtttgttggctttatcatcccttttgttattataattgtctgttacacaatgatcattttgaccttactaaaaaaatcaatgaaaaaaaatctgtcaagtcataaaaaggctataggaatgatcatggtcgtgaccgctgcctttttagtcagtttcatgccatatcatattcaacgtaccattcaccttcattttttacacaatgaaactaaaccctgtgattctgtccttagaatgcagaagtccgtggtcataaccttgtctctggctgcatccaattgttgctttgaccctctcctatatttcttttctgggggtaactttaggaaaaggctgtctacattcagaaagcattctttgtccagcgtgacttatgtacccagaaagaaggcctctttgccagaaaaaggagaagaaatatgtaaagtatagtttaaacccatttccagtccaaaccaatgaaaatagtttcccaaataagtattttgtcaaatcatttacaaaaaaaataaaaattttacttaatattttaaaaaaaaaaaaaaaaaaaaaaaa

SEQ ID NO: 221903 - DNA, 1000 bp, Homo Sapiens
tcagcaagagaaaagggccattgagaaagacatgatgaaaaaggaaataacgaaagaaagggagtacatgggatcaaagatgttgatcttgtctcagaatattgcccaactggaggcccaggtggaaaaggttacaaaggaaaagatttcagctattaatcaactggaggaaattcaaagccagctggcttctcgggaaatggatgtcacaaaggtgtgtggagaaatgcgctatcagctgaataaaaccaacatggagaaggatgaggcagaaaaggagcacagagagttcagagcaaaaactaacagggatcttgaaattaaagatcaggaaatagagaaattgagaatagaactggatgaaagcaaacaacacttggaacaggagcagcagaaggcagccctggccagagaggagtgcctgagactaacagaactgctgggcgaatctgagcaccaactgcacctcaccagacaggaaaaagatagcattcagcagagctttagcaaggaagcaaaggcccaagcccttcaggcccagcaaagagagcaggagctgacacagaagatacagcaaatggaagcccagcatgacaaaactgaaaatgaacagtatttgttgctgacctcccagaatacatttttgacaaagttaaaggaagaatgctgtacattagccaagaaactggaacaaatctctcaaaaaaccagatctgaaatagctcaactcagtcaagaaaaaaggtatacatatgataaattgggaaagttacagagaagaaatgaagaattggaggaacagtgtgtccagcatgggagagtacatgagacgatgaagcaaaggctaaggcagctggataagcacagccaggccacagcccagcagctggtgcagctcctcagcaagcagaaccagcttctcctggagaggcagagcctgtcggaagaggtggaccggctgcggacccagttacccagcatgccacaatctgattgctga

SEQ ID NO: 221904 - DNA, 1000 bp, Homo Sapiens
attacaataaaattagtggcactttattcataaatattcatgagcctgttaattgttagttgtcttcctgtagctgaatcaacaagttattttcaactcaattttatgacttgcgaaaaagcttttgccctgttgtgtaccataacatttaaaagaatggaaaatgactgaaatccaatttagattatttttagagtatttttccagcaaattcaatttattctgaaatttaaatccagatcttttctaatatggtattacaatgaaaagaataaagagaagatttgaattttcagtttcattttcaaaaactatttaccaaaacaaatggagaagaaacatccaaaagcacatttcatttctccaaactttgtgttttaaattatagttataaattgtaaggtaattttaaattgtccctcgtattatttctccacgtctgttttagtttaatgtctcctaagcttttctctcatagcgtagacctagggaagggatgggaagattgcccagtccccgatggctgcgcacacaggaggcggcggagcacaaggcaagtgagtttgcactgtcagccccagaccgtaagcttggctacactgatgtttttctttactaaggatactattcaaaaattaacattttcatctcagtaagtttttagaacatcaaaatgttttctgagctccaagtggctaggttgtaaaagttttataataatttgcaattaaaatacatgatacatattaatccattaaagactagtgggaatgtatcagccagagtagcaagtaatttttgttttataaatcatagtatctgtcatcttgcagtattaccaatgctgttgtaaattgaatttaaagtggtattaaaaaaaactgttaaacaatttttatctgtttgtatatcttactatagattatgtacaagtaacatctaaataaaattacacttttaaccctaagaggttttgcttattaaaaaaaaaaaaaaaaaa

SEQ ID NO: 221905 - DNA, 1000 bp, Homo Sapiens
ccggagaaaaaccagcaagagcaagctgaaggcaggcaagctgctaaatcccctggtgcggcagctcaaggtcgtggcctccagcacaggtcacttggctgactccagcagaggccctcccgctaaggaccctgcccaagccagtgtggggctcactgcagacagcacgggcctgagcgggaaggcagtgcagacccagcagccctgctccgtccgggcctccctgtcttcggacatctgctccggcttagccagtgatggaggcggagcgcgtggccaaggctggacggtttaccacccaacgtctgagagagtgacctataagtctagtagcaaacctcgtgctcgattcctcagtggacccgtatctgtgtccatctggtctgccctgaagcgtctctgcctaggcaaagaacacagcagtaggtcctccaccagcagcctggccccaggccctgagccaggcccccagcccgccctgcacgtccaggcgcaggtgaacaacagcaacaacaagaagggtaccttcacggacgacctgcacaagctggtggacgagtggacgagcaagacggtgggggccgcgcagctgaagcccacgctcaaccagctgaagcagacccagaagctgcaagacatggaggcccaggcaggctgggctgcccctggcgaggcgcgggctatgaccgcacctcgagcaggagtggggatgccacgtctgcccccagcgcccggccctctgtccaccacggtcattcccggagccgccccgaccctgtccgtgcccacaccagatcctgagagtgagaagcctgactgaccccgcctagacgccaggcccacttcacgccgtctaagtggagaagtgacggaccctcagggccagctgctcctcctgtccagttcacgctgttttgtaaccactttctaagcattttttattcacaattggaaacacaaatgtaatgcaagaataaaaaatattttggggcagaaagga

SEQ ID NO: 221906 - DNA, 1000 bp, Homo Sapiens
ttgcttttggaccttggatgtgtcacctgaactctctggacctcaggtttccatctgtaaaatgagagtattggttctaagatttctcatcttctcatccctaggacaagcatagtgcctgcatgcttcatgatcagtaagtcctggctgcataaaggactctgatgtcaaaatggaaaccaggggacttaccttttcacatgacttacccctcatccgagtgtgaggttacaagcaggtgtcatggcaggaaggaagaccagatctgtatgatttgttccatttttaataacaaaaatatccacacccttttaataatgctcagagttctgtaggctctctatcctagaggaattgagcaaaacagaagaatcatgaagtctcctaccttctacagccttgtagttctgcttaccttctcttcctcatccagaaagcatcattttctagggagaacaatgagaatctcaatgccagtagtactggataatagtgcgtattgcttctggtggcattaccctgatgatgggctgaagttcatttattagggtggttcctgatgggaaaaggacatggattaggactttaaaacactggacagaatttcccacagtctttgccctcaaggagttcaccagtttatggggctagaagagcgagaaaattcaagaaaataaatgtagctggtgggagactttgtagatgttgggctatatgttggggtgatggtagctcctgatgtaattttcttagttgcatcttcaatatgcctggagtcgtctgtccaaggcttgtccaggcttctgggtttctctcaagtttgtttttctcaggatattgtcctggcccagctactcctttacctgtgagaagatcttcaccattaggaagatctctagacccccagatctcagaatcaggcctatttgtgtaggcccatggaaatcactacttgtgaagtagagatgcctttttgtctaaaaaaaaaaaaaaaaaaaaa

SEQ ID NO: 221907 - DNA, 1000 bp, Homo Sapiens
cagttctcttttaaacatcaaaccataaaaagtgtattttgtaattttactctgacctgccgcagtcacctctcacttatctcttccacgtactgcacggtcgtatttcatgagctttctgtccatagcacagaaacagagcagaaagtagtacaatcatgttggaccttctttctgttctctttactcttctcacagatcagatcactccatagaagcctgtgggtttcgatggtttcttctatacacctttttggttgaccagtattactatacaatgtaagtgttttaaaaaatacgaaagtaatactctgcaccccttcctacaaagatgataaagcagtcacttctggcgcattttaataatttaaagatttttagtgcaatggcacggtaacctccaaacctgaattagacagagactcactcaggaagtgacaggcccatcatatcaaataacttattcacttttcatgtggcaggaaactggaatatcgcttttaataaaatggaaaaatatgcttctacatatttaccaccataggcgttttgttcatatgagcctggtttgtgcaaaattaaatcagaggcttctacaacatggtttatttatgttgtagcaaagttggctctacataaacattgttcttattttaaaattaacactatgtgttcagttttcttgtgggcttctgaaagttgccatcttccctccgtggagctccatttgctattttcattatacactatgaggtaaaatgtaataacaaaagagagagaagtaccactgtggctagatatatacacacacatatatatatggatggatgtaatatatgtagcacacacacatagatgtatataggatacacactcatgtatgtaaacgtatacatatgtgtatatatgatacatacacatacacacacacgagagacagaaggaaagagaggaagagagaagcaaacatgtaggaaaaaatataaatcagccggaattc

SEQ ID NO: 221908 - DNA, 1000 bp, Homo Sapiens
cctggcaaagaggggctgtcagtgaaagagccccagctggtgtggggcggagacgctaaccgcccttctgcgttccataaaggtggctccagaaagggcatcctctaccccaagcccaaagcctgctgggtgtcccccatggccaaggtcccagccgagagccccacgctcccgcccaccttccccagtagcccaggcctgggcagcaagcgcagcctggaggaagagggtgctgcccacagtgggaagagactgcgggccgtgtctccctttcttaaggaggcggatgccaagaagtgtggggccaaacctgcagggtccggcctggtctcctgccttctgggcccagccctggggcctgtgcccccagaggcctacaggggcaccatgctgcactgcccgctgaacttcactggcaccccgggccccttgaagggccaggctgcactccccttcagccccctggtcatcccggccttcccggcccacttcctggccaccgcaggcccctcgcccatggccgctggcctgatgcacttccccccaacgtccttcgacagtgccctccgccacagactttgcccggcctcatctgcctggcacgcaccaccagtcacaacctatgcagcgccccacttcttccacctcaacaccaagctgtaggccagcccatggtgttgtgtacactgtggagtcgacaggggcctacaacaggcaggtactgctgccagggggctctgaactagtgcctgctacccaggacacccgggccatgcccctggctgggcagcctggcacaagtgaagaagaaggcagtgggaaaactgggtttatctcaaggcagcagcctgagcccaggagcagaggacccagttgttataaggcgctgggagaggatgggcagctcccactgccccagagcggagctcgaagcacccaggttgcccacggaaaatccaataaaaagacaccagtgtgaaaaaaaaaaaaaaaaaaaaaa

SEQ ID NO: 221909 - DNA, 1000 bp, Homo Sapiens
gggccggtgagcgcagccagaagccctggccagtgaggagctcacaggtcctccctggtggtcccgccgcacctctgcatctcctgggcgtcaccaggaaggctctgaagtcccgggctgctctcagcacttctcctgcagactgaagactctggactcattgctgattggaacaccaggaggaggttggatttctgccagtgggggatgtttctggaggcagctggtcccccacaccgcgtcctgctgagcctgccccctggattggctgtaatttgcctcgaagttcagcagttcatcttcatgggaaatttgctgagcccccaccagggaaccggatgatgaaacagggatacctcacagcttggccatttgaggcaaaggcagcttcccgagctgatgctaaagaagacagactttcccttcctcccagcagcagcagtgcagagcccgcctggagggatgtgggggctgtgcagggtgcagcgctcaggtggatcctgggaagcagcctctggatgctgagtggagggagccactgagcacagcaaggcaccaaagcccctggagaaaccgccagggcgaggtgcgaccatcatcaggatcaaagcagacggggcgtgggtggggaaggggctctgggaccagaccccccacactactgcgtctttgtttctatcagtctttgtagaagcaggtggtggtggaaattccagcaggtgggtcccgcagaggccctgaggcctcacttttcggatcttctgtcccagatcctgctccctccctgctgagcctggggttcccctggcattggccccagccttctgaaagccggcgctgcagccagaggccgcacgctgcactgtcgcgacgcagagaggcttctgtgcaggctgggatcgggccccatgtctgtgctgtctagtttgtgttcaaaatgtcagaataaacacagaataaatgttaaaaaaaaaaaaaaaaaaaaaaaaaaaaaaaaaaa

SEQ ID NO: 221910 - DNA, 1000 bp, Homo Sapiens
tgcccacagtgcaaacagcaccgtgaggcctccaagcagctgttgctatggcgcctgccaaatgttctcatcgtgcagctcaagcgcttctcctttcgtagttttatctggcgtgacaagatcaatgacttggtggagttccctgttaggaacctggacctgagcaagttctgcattggtcagaaagaggagcagctgcccagctacgatctatatgctgtcatcaaccactatggaggcatgattggtggccactacactgcctgtgcacgcctgcccaatgatcgtagcagtcagcgcagtgacgtgggctggcgcttgtttgatgacagcacagtgacaacggtagacgagagccaggttgtgacgcgttatgcctatgtactcttctaccgccggcggaactctcctgtggagaggccccccagggcaggtcactctgagcaccacccagacctaggccctgcagctgaggctgctgccagccaggcttcccggatttggcaggagctggaggctgaggaggagccggtgcctgaggggtctgggcccctgggtccctgggggccccaagactgggtgggccccctaccacgtggccctaccacaccagatgagggctgcctccggtactttgtcctgggcaccgtggcggctttggtggccctcgtgctcaacgtgttctatcctctggtatcccagagtcgctggagatgagctcgcctgcaggcagctgctgtgagctggcctacctgcctgccccaggccatgcctgcctttgttgtggggaacacctctgggctttgggcctcagcttatgcatctggtgggagagggtggggaggttgtggcccctgcaggggcagagtatcctagggtgtgtatccatctggctgtctgtccattcatcctgctgctctgacccttggcctcaggcttggccctgcccaagctacttcctgtacttaaaagtgttaataaaaccagactattcaggccc

SEQ ID NO: 221911 - DNA, 1000 bp, Homo Sapiens
atggtcgcctggagaagctgaatcttgtaaatatgaacaacatagaaaattatgttgacagcaaagtggcaaatctaacatttgttgtcaatagtttggatggcaaatgttcaaagtgtcccagccaagaacaaatacagtcacgtccagttcaacatctaatatataaagattgctctgactactacgcaataggcaaaagaagcagtgagacctacagagttacacctgatcccaaaaatagtagctttgaagtttactgtgacatggagaccatggggggaggctggacagtgctgcaggcacgtctcgatgggagcaccaacttcaccagaacatggcaagactacaaagcaggctttggaaacctcagaagggaattttggctggggaacgataaaattcatcttctgaccaagagtaaggaaatgattctgagaatagatcttgaagactttaatggtgtcgaactatatgccttgtatgatcagttttatgtggctaatgagtttctcaaatatcgtttacacgttggtaactataatggcacagctggagatgcattacgtttcaacaaacattacaaccacgatctgaagtttttcaccactccagataaagacaatgatcgatatccttctgggaactgtgggctgtactacagttcaggctggtggtttgatgcatgtctttctgcaaacttaaatggcaaatattatcaccaaaaatacagaggtgtccgtaatgggattttctggggtacctggcctggtgtaagtgaggcacaccctggtggctacaagtcctccttcaaagaggctaagatgatgatcagacccaagcactttaagccataaatcactctgttcattcctccaggtattcgttatctaatagggcaattaattccttcagcactttagaatatgccttgtttcatatttttcatagctaaaaaatgtttgacatcctttgagatattttattactaaaatctgcc

SEQ ID NO: 221912 - DNA, 1000 bp, Homo Sapiens; identical to SEQ ID NO: 116673

SEQ ID NO: 221913 - DNA, 1000 bp, Homo Sapiens; identical to SEQ ID NO: 116676

SEQ ID NO: 221914 - DNA, 1000 bp, Homo Sapiens; identical to SEQ ID NO: 116679

SEQ ID NO: 221915 - DNA, 1000 bp, Homo Sapiens
taaatttcatacagaaaggaaaaatacatttctatgcttgaattctggaaatcatcagaaatattgacacttgagggtcactggtggaccatgctagtattttggtgctgagtaattagattatgtataggggtaactggaagccatgaaggaaggacttaaccaggctaccaagtggaatataatttatctgctatttttaattacttaccttgtaaataactttaataatattcaaaagttgactctcctgtggctcatgccacaggatcccagcactttgggaggccgaggcaggctgatcacgaggtcagaagatcaagaccatcctggccaacatggtgaaaccttgtctactaaaaatacaaaaaattagctgggcatggcggcatgcgcctgtagtcccagctactccctccagaggctgagaattgcttgaacctgggaagtgcaggttgcagtgagccaagattgtgccactgtattccagactgggtgacagagtgagactccatctcaaaaaaaaaaaagttgactctaccccctaatttggtaggagatgaaggagaaaaggatggcattgaattatagatacagttttgggatatatacaaggattgccttgatctggcacttactgatacaagcatttggagaagagaaaattcaaatataagaaatttcaatttgaatctgtggatataaggcatttgcctttgagtatgttcttgtaggagtaagactaccaccagtgacattcaattggttctattgcatagtacatgaatctattgtcactaaaaattaggttactaatcttaatttttttgaaatatatgattctcagtacaggactaattcatatgcttttcctgcatacattattttgatcatttggataacatcaatgaacactggctttttaacacctttgtttttcataccagtacctgaagtaggctcaataaaagagtctttacagtgaaaaaaaaaaaaaaaa

SEQ ID NO: 221916 - DNA, 1000 bp, Homo Sapiens; identical to SEQ ID NO: 116683

SEQ ID NO: 221917 - DNA, 1000 bp, Homo Sapiens
accctcccagctcacctccccatggagctgagaggcctcccttggagagatggaaggaaacgttataccttgtacccctcggtctccatccatcaagccaaacctgctgccacagccctcccccggccccagatagcagccccagggaggatgctgcctccaagaggtgtgagccctctgtctcggggatgaacaagcagagtctgggctacctcttgacagctggtggaggggagttggggagctggactggatgactctggaggccccttccaaacctcaagtgtccggcgctttgattgcctgagtttctgacacttcagggcccagaggtcctgcgaggggcagaactggacccccatgccagtgctgctgcaggagggcccatatactagggtctgctgagctgttgtcactgatcggtgggcgctgggggggtagggtagcacaccagctgtcccaggctttgctccgggcggtaactgcacttgggcagggaatatagccttcctgggcacaactagctgacaatgacaggttgactgtgtacccccaaccaaggagctggggcccaaggccagtcctgccccagagacactccaagtccgccaggggcacagaccagttctgcagtgactgtccctggacaatgggtctttattctgagtttcctatggtttacaaagagggccccagcccagccccaccacagatcccagagataggggcccagtctccatgggggcaaggagcatagagatgttttccaggaaggggctcagaagctgcactaggccccgagtccccatgtgtctccttgaattgatgaggatgctcctgggagggatgcgtgactatgtggtgttgcacccggggctgcaaacgtctccgtgcagcccccagagagaggcccatgggctcagaccaggctttgttgtcctgctctgagtatcctgagattaaactgaattgctgaatgaaaaaaaaaaaaaaaaaaaaa

SEQ ID NO: 221918 - DNA, 1000 bp, Homo Sapiens
atcttgtcaaaagaagatatcagagacaacattgtgagctataacgatgagggtggtggagaggaggacacccaggcctttgatatcggcaccctgaggaatcctgcagccattgaggaaaaaaagctccggcgagatattattccagaaacgttatttattcctcggaggactcctacagctccagataacacggacgtccgggatttcattaatgaaaggctaaaagagcatgatcttgaccccaccgcacccccctacgactcacttgcaacctatgcctatgaaggaaatgattccattgctgaatctctgagttcattagaatcaggtactactgaaggagaccaaaactacgattacctccgagaatggggccctcggtttaataagctagcagaaatgtatggtggtggggaaagtgacaaagactcttaacgtaggatatatgttctgttcaaacaagagaaagtaactctacccatgctgtctccacttcacaatatttgatattcaggagcattttcctgccagtcagcacaattttttttctcatttacttcttaatttgttcattaattacattaattctttcctgtaggatgtctcatggaatatatatgacattttatttaatcacttccaagagccaaagctatggaaatacagtgttgtccatcttagtaaataaaagataatttcagaaacatgaacaggatagttctcccttaagcaacctcacaaacaagccgcttctgttaggtacatgtcctgcccttgcaaatgaagcttttaaaaaggtgaagaaaaattttacagtatatcctgttctgtacattaaattaaaaaaacaaaaatgtacatgtgatgttagtaggtgtgatatgcaacctggtatacagacatttgtgcaatttcatttcatcaaattctatctgctaatgttttatatttatatttttgtatttatttttaaaaaaataaaccagtttttacaact

SEQ ID NO: 221919 - DNA, 1000 bp, Homo Sapiens; identical to SEQ ID NO: 116684

SEQ ID NO: 221920 - DNA, 1000 bp, Homo Sapiens
tgcatgatgccattttaagctgcttcacatcagactgaaatcctaattacagttcataagtgaaacagactaattcaatggcaataccttttgtataggtcctgtgcttaaaggaggcaagtataaattttctaataagaaatccctgcttcttttgggtgcagtggctcacacctgtaataccagcagtttgagaagctaaggcaggtggatcacttgaggccaggagttcgagaccagcctggccaacatagtgaaaccccgtctcttctaaaaatacaaaaaaattagctgggcatggtggtgcacgcctatagtcccagctacacaggaggctgaggcaggagaatcacttgaacccgggaagcagagtctgcagtgagccaagatcgcggcattgcacttcagcctgggcgatagagcaagactctgtctcagaaaaaaaaaaaaggaaagaaagaaatctctgcttccgtactatcaaaacttctaccctagaataccccctggcaccttctaacccaacctaatacagagattttgtagggacccattaacaagctcctatataattataagcagctctcacagtagggttgaaagagaatataaggaaaattagaagtactgtatttttgctattggaaatgaaatattgtttcatgcacctttgaaaaaaataacaggattttacagccttctgatgattcattcaaagcatggggaatagttcatatgtttgttaaatgaaaatcttatgtagcaatttgtgtgtccctcccacttcataactacaaaaacatatatatgaatttctaaacaaagtgatattttaaagatgaattgattcaatgtgtacttaccagtttactgtgtggttttatcttcaggtacagatagtttgtggtactacttgaaaatacctttaatattattttcatcagaatttgtaatatataatccagtttgggatgatgaataaaatttttctaatctcttg

SEQ ID NO: 221921 - DNA, 1000 bp, Homo Sapiens
atgtatcagtcagttcttaactcttgtatatttttttgtctcttgtttgctggattgactataacttaagtgctgattgtgattttaaaatgatagtaccgtaaagcattaaagtaaacaatgtgctattgtgagttttttcaaagctttataaatcagttataaataatattaaaagtatttggtcttatgtgaacatgttgatctatatactcatctaaaaatatgggaaaacattccaccccatgtaaatatgtacaagtgcatcactggtacaattttatgtaactcagttggacactaggttgccacagacctatgctaggtgtctttaaaaaattaaggtgacaaagcacatgggactgtgtagagcttggttatcggccggcccggtggcttggcaggcagtctgtcgctgctcatggagaagacctgggcttagcaatctccttagttcttgctacacaggatggtgactggaactaaggctacacagagggtcgcacttggactctgagggttgggtgtggaagggggaaaaggggatggagacctgctccccagctcttcctgtcagccggtttacatgggaacagggttaacatctgtgttaggggaggtcaccttaccctttttcataggggaagagtgtcacactcctggctatctcagggggaatggggaaaagaatctttcaagggcaaagaactcgtgggaggatgtctgttgtatgtaatactcacaatggcttttggttagtgttgaaggtgggaagagcatttgtaggtccagaagagtgaaagagagggaggggtgcagcaacatgtgcacaggcacgcacatgtgtgcacgcacacatacaatctgggttatctttgtgctatatagtggattataattctgtgaaaccaagtttgtatattgaattacattaaggagtgttctttaaaaagagaaataaatatacaattacatgcttaaaaaaaaaaaaaaaaaaaaa

SEQ ID NO: 221922 - DNA, 1000 bp, Homo Sapiens; identical to SEQ ID NO: 116689

SEQ ID NO: 221923 - DNA, 1000 bp, Homo Sapiens; identical to SEQ ID NO: 116691

SEQ ID NO: 221924 - DNA, 1000 bp, Homo Sapiens; identical to SEQ ID NO: 116693

SEQ ID NO: 221925 - DNA, 1000 bp, Homo Sapiens
atcgctgccggtgaaaccattgcactgctctttgagcttgcccgggaccttgaggaggagtttgtttacgaggacatggaggccctctgcagtgtcctgcgcactctggccactgacagtaacaagtaccgtgccaaggctgatcgtcggcgccagcgctctactttccgcgccgtgctgcactccgtggagggcggtgaatgcgaagaagagatagtgcgcttcggctttgaggtgctctacatggacagctgggctcggcaccggatctacgctgccttcaaggaagtgctgggttcgggcatgcaccaccacctccagaacaatgagctactccgtgacatctttggcctgggccctgtgctgttgctggatgccactgccctgaaggcctgcaaggttccacgctttgagaagcacctgtacaatgctgctgccttcaaagcccggaccaaggctcgaagccgtgtgcgggacaagcgggcagacatcctgtgaagcaggacctgctgaagaggagactttctatgcccttggtccgtatttttaacagaagacagtgcaacaactggtctccaccagtatttgtcactttattttttttaatgacaaaaccaaaaacagacatggggtgggtagctgggggcccggacacttgggaccctgacccctttgtccctgcactcagccctgtggccccttcctgtcctgtctcaggccaggctaaatatgtgccttcctcagggctgtggggcaggcactagggggcctttcccttcctttcctttctcaggccttgctcccccaggatgacccactcttaggggggtggtggcatctggacaaatgccaccacagcaggtggggtggcaaagctacctggaatggatttgtgtgctgatttttaaggattattacagataattaaacagaacggtcagccttctgtggtcttaacccctgggtatttttctgttctccctccccatctactatccca

SEQ ID NO: 221926 - DNA, 1000 bp, Homo Sapiens
gtgtcccttgctgagtattctgtcacagacaagcctccattaaagccacagcagtgctacccaccacacacaccttgctggcccggccaccactgctggcttcagccccttgagcagcccatggcttagcagacccccagatgtaggtcagtggccttacctgtctctatccatgctgtcaactcctgcctccacctggggtcacccagtcacattgggaagggctgtgaaggcctccaggctggccccttccaggggaatcctggaggcctggggtgggctcctgccccttctgccctgccttgcccctgcactatgctcttggctcctgtggaaggagggctgccctcttgccctagtgagggccccatgtggatccactctagtgctgggagccagcgctcccttactgggaacaggattccaggacccctttcttgttgtggctgccatgaagccacagctccttggggaagtgacctgctctcctttgggtgtatgcaggtgtgtggggggccctgagtggcaagttgcttagctaacaggagatccataggcagcctgcaggctaggaagtggcctagtgcaagatgagctgggaacaagggaggagagagcaggagctggggcagaggctgagccgggaggcccttgaggtgaggacacagcaggcccaggaccatggctggggaggatatgtcagcacctggaagtggagtgcaggctgcagcgcccagccatgtgggccaggtgcattcactcagagtggggccacacacccatctacccagtttccacaagatgtggctcctgccacacccacagggcagcctcctccaaatccctcctggaggggcctacccagaagcctccttgaaccagtctgcaaccctgctctatgctgacccttgtcactgaaccctgatctagacttatatgaataaatgaaattacatgccaagggccctaaaaagcaaattttaaaaaaaaaaaaaaaaaa

SEQ ID NO: 221927 - DNA, 1000 bp, Homo Sapiens
cccgagccagtagaagaaaataagtgttttgagtgtggtgttcaggaaaatctttggatttgtttaatatgcggccacataggatgtggacggtatgtcagtcgacatgcttataagcactttgaggaaacgcagcacacgtatgccatgcagcttaccaaccatcgagtctgggactatgctggagataactatgttcatcgactggttgcaagtaaaacagatggaaaaatagtacagtatgaatgtgagggggatacttgccaggaagagaaaatagatgccttacagttagagtattcatatttactaacaagccagctggaatctcagcgaatctactgggaaaacaagatagttcggatagagaaggacacagcagaggaaattaacaacatgaagaccaagtttaaagaaacaattgagaagtgtgataatctagagcacaaactaaatgatctcctaaaagaaaagcagtctgtggaaagaaagtgcactcagctaaacacaaaagtggccaaactcaccaacgagctcaaagaggagcaggaaatgaacaagtgtttgcgagccaaccaagtcctcctgcagaacaagctaaaagaggaggagagggtgctgaaggagacctgtgaccaaaaagatctgcagatcaccgagatccaggagcagctgcgtgacgtcatgttctacctggagacacagcagaagatcaaccatctgcctgccgagacccggcaggaaatccaggagggacagatcaacatcgccatggcctcggcctcgagccctgcctcttcggggggcagtgggaagttgccctccaggaagggccgcagcaagaggggcaagtgaccttcagagcaacagacatccctgagactgttctccctgacactgtgagagtgtgctgggaccttcagctaaatgtgagggtgggccctaataagtacaagtgaggacgaaggccggccttcgtggccttagagatggatgaggc

SEQ ID NO: 221928 - DNA, 1000 bp, Homo Sapiens; identical to SEQ ID NO: 116697

SEQ ID NO: 221929 - DNA, 1000 bp, Homo Sapiens
aaagagagatgcttgttatacctttagaaaatctggcttctaactttctgtatgtataggcctgtccaaaggctatgagataccagggacagtggaatcttgatggaaatccttcctttcctgctcttggttttcccaggtgagctctatgccctcagtggctggattgcagccacccatggtggctcagaatatctggattggagaggcataaggttgaaaagcattttggagtaggaacacggcatgatttaaaattgcacttgcacttcaagaacaccaactttaacttgaaatttttatagtttatgacaaaggaagtgaagaacagacttcactgtctgagatttcccacatttcttgggttgtttctaacattggcagcctggattatggccctagggagagggaaatagaatcagaattgtacctgaccctgtcttttctaattcccttctcctatcctcctgcctccctatcttggaaactgattaagtggaaactttccttgtatcaaatcctgagttttctctacttcagggtttctagctttgacaaaggaccaggcttgccttttctgtggcaacacagcctcttacatatggcttccatagcttcttgctatgtgaaaggaactttcagattaagaaatttctctcttttttctctataaattctgactctccagacttgtctggctataacccctgtccctgtctaattctcccagtctaaaatctaaacaatgacttcatttttttctagtactttctcctgaagtattgaaacctattgattcaatgggtagagatttgctaagtatgatgtgcttccacctcttctcttcatactctctaccttccttaccatgattcagccacactggcctttctgttccttggacatgcctggagacctgtccctgctcttccttctctctggggtgctcttccccctccttataaatgttcaggtcagcggaaatgttccttcctctgag

SEQ ID NO: 221930 - DNA, 1000 bp, Homo Sapiens; identical to SEQ ID NO: 116699

SEQ ID NO: 221931 - DNA, 1000 bp, Homo Sapiens
gggagaagttgattctaacgttgacttagaactgaaatgtggtatcttttttttttcaactttttcctttaaaggactcctaaactaagcacagaagagttggcgtcatcttaaaaataccaaataacagaagatcgcattgcagatgatatcaggatgtggtttccagctttgcctgatggaattccaacatgagattatgggctgggctccatttcttggacttaaaatgcattattagtttaaaaactttctgtgctctcaaagcttgagccttgcagctcaagcttgttgttccctttatattctagcagggaataaataattgttttaattaggtatttgtttcattggagttgaaattaacatttcaaaagtttttcgtatttttttatggcagatgatttgtcatttatttatattaggttttactgcctattgagacaaccaggtgcataattgattgccctttggccataaaaatgcagtgtcatggatcttagagctaaaaaggactgtaaaaattacccagaacagcgtcctcagacttaaccttctgcaagttatgtctgtatataagaagattctaattgctaactgtttatacttttctgaataaaatagttgtttctaattaaaaagtagccaagctaagatgcctggctgggcttctgaggaattaatacacttcgtgtgtgtgtgtgtgtgtgtgtgtgtgtgtgtgtgtatgtgtatgtacacatacatatatatagttgacacttgaaaaatgcaggtggtaggggcactgacccacccctacgccccgcacagtcaaaaatctgcatataacttttgattccccaaagtcttaagtactagtagcctgttattgactgggagcctgactgatgtattatatatattgtatactgtattcttaaagtaagctagagaaaagaaaatgttacttagaaaatcataaggaagagaaaatatatttactgtgtttatcaatact

SEQ ID NO: 221932 - DNA, 1000 bp, Homo Sapiens; identical to SEQ ID NO: 116701

SEQ ID NO: 221933 - DNA, 1000 bp, Homo Sapiens
acgttcagacccgtggatataccaagagtcccaaccaactggtcacccctgcagcaagccgactccagctcgtatcagccatcaacctctccactgccaaggattccaaagccgtggtcacctgtgtgatcattgtgctgtcagtcctggtgtgctgtcttccactggggatttccttggtacaggtggttctctccagcaatgggagcttcattctttaccagtttgaattgtttggatttactcttatatttttcaagtcaggattaaacccttttatatattctcggaacagtgcagggctgagaaggaaagtgctctggtgcctccaatacataggcctgggttttttctgctgcaaacaaaagactcgacttcgagccatgggaaaagggaacctcgaagtcaacagaaacaaatcctcccatcatgaaacaaactctgcctacatgttatctccaaagccacagaagaaatttgtggaccaggcttgtggcccaagtcattcaaaagaaagtatggtgagtcccaagatctctgctggacatcaacactgtggtcagagcagctcgacccccatcaacactcggattgaaccttactacagcatctataacagcagcccttcccaggaggagagcagcccatgtaacttacagccagtaaactcttttggatttgccaattcatatattgccatgcattatcacaccactaatgacttagtgcaggaatatgacagcacttcagccaagcagattccagtcccctccgtttaaagtcatggaggctataggatcttatgtaaacagtttttgtttctgatagtaatggactttattctaacttgagatcagtggcggatcaaaacctacaagattcaactgaaaagttggcagttatggttttctttcatctgatgtgtcagtatctgttgatttgctttgtagtttgttgacatcttaagatttgatgtgaaagttttagattttttaccctg

SEQ ID NO: 221934 - DNA, 1000 bp, Homo Sapiens; identical to SEQ ID NO: 116703

SEQ ID NO: 221935 - DNA, 1000 bp, Homo Sapiens
ccatcgagggtgtggttgatccttgaagctgcttggtaaagttatcatttcctcagtcttttcttttgtactcctatcatgtattcattaatatctaccagtcccttttcattctaagacaaaacatttctcctaaatctctgaataaaatcagtgctgtaggaagatggactgtgttgatcatgggtgtaagcaacccagtttaagaaacatggcaactaaagggatacctcaggctttctttcccagtgggtcatttttgtcctagttcagtgtgtctgttactatttaaatatttatacaaaagggtttttgtttatagcttaaggaatgatactgtgctctgcttggtgcatggagaaaaaggaagacccgtactctccacaccctagagcttttctctaaatattgtgcaaagtttttgctagttttatcttctgactttgggactagtttttgctgcagagttgtgttgctttgtgattttcctctgggatagtgtactgtacacaaccagatgtgttccacactccgtgactccgcagtttgtcctggagtgacatacacatccaccatggaaagggaagcatctctgcctgtggattctcaagtacttggaagcacctctcctgaggaacctacaggattctaaggtttcctaggtcactgaacaactaatcttggtccctgaatatttctaggtttgtaagtgcagcagttttatttcctctagaactcatcctgtttcaagggaagtacctaagaagatatagagtgtttctagggtaagggacctgcaggtgtaagcatagatgaaataactgtcctgtcacatgtgcagcaggccatggagtgtagcgggcatcgctgccgccattcctgcagcatcaccataagcagtgcagggtgtctccatcgagctgtttggttccatgtgtgtttaacatgtgcagaagtagcttctctgtttaagtttaataaagttgagtttcaaccagtc

SEQ ID NO: 221936 - DNA, 1000 bp, Homo Sapiens; identical to SEQ ID NO: 116704

SEQ ID NO: 221937 - DNA, 1000 bp, Homo Sapiens; identical to SEQ ID NO: 116706

SEQ ID NO: 221938 - DNA, 1000 bp, Homo Sapiens; identical to SEQ ID NO: 116716

SEQ ID NO: 221939 - DNA, 1000 bp, Homo Sapiens
cttttgttgcttgtgttttcagggccatatccaaaaaaaccttgcccggaccaacgtcttgaagcttttctcacacccatttttgtatatgggataagggttcaatttcattcttcttcatatgaatatccccaggatgtgtcatatgcccagctgcacagcttaccctcaaacagaaaataatgaagccttcttcctcccaggaaaggggacgttcagctgagccgagtgtgtatactgctctggccatccactagcccagggaggacccagacctccacactccatggagactcagttctcctaggaccatttattcaaaaggactgccctctcttgttcttggaaactttgttgaggatcaattcaccataaatatgtgtgtttccttctttgctttcatccctgttgcactgatcactatacctgtttctattccagttccatgatgtcttcctggctgtagctttgtaggatatttggggattccatagtgtgatatccccttcttccctttgctcaagattgttttggctatttggggtccttttgtagtcccattcaaattttaggattgtttttctatttctgtggaaaacgaccttggaattttgttaggaattgcattgagtctgcaggtatgaacttttttttaaagttccagggcacatgtacaggacctgcagctttgttacataggtaggcttgtgccatggtggtttgctgcacctatcaacccattacctagttattaagcccagcatgcattagctctttttcctgatgctctccctcccttcatcatccgccctcccactacaagccccagtgtgtgttgttcccctccctgtgtccatgtgttctcattgttatacgaacattttaacaatgttaattcttgcagaccatgaacataagctaccttcccatttatatgcgtcttgttcaatttcattcatcaatgttataaagattttagtgcagaaaaaaaaaaaaaaaa

SEQ ID NO: 221940 - DNA, 1000 bp, Homo Sapiens
gaagtttgatgaggggcgggcagacttccccgtggacgaggagcttggcctggacctgggggatctgtcgcgcttcctggtcacacacagcatgcgcctggtcacggagttcaacagccagacgtctgccaagatcttcgcggccaggatcctcaaccacctgctgctgtttgtcaaccagacgctggctgcgcaccgggagctcctagcgggctttggggaggcagctccccgcttccgggggcaggtgctgttcgtggtggtggacgtggcggccgacaatgagcacgtgctgcagtactttggactcaaggctgaggcagcccccactctgcgcttggtcaaccttgaaaccactaagaagtatgcgcctgtggatgggggccctgtcaccgcagcgtccatcactgctttctgccatgcagtcctcaacggccaagtcaagccctatctcctgagccaggagataccccctgattgggatcagcggccagttaagaccctcgtgggcaagaattttgagcaggtggcttttgacgaaaccaagaatgtgtttgtcaagttctatgccccgtggtgcacccactgcaaggagatggcccctgcctgggaggcattggctgagaagtaccaagaccacgaggacatcatcattgctgagctggatgccacggccaacgagctggatgccttcgctgtgcacggcttccctactctcaagtacttcccagcagggccaggtcggaaggtgattgaatacaaaagcaccagggacctggagactttctccaagttcctggacaacgggggcgtgctgcccacggaggagtccccggaggagccagcagccccgttcccggagccaccggccaactccactatggggtccaaggaggaactgtagctgcccccgtgtcacccccgccatcactgctggacaggagccacccccttgggtaccagagggagctgtgcattgtgaataaagagtgagcttggt

SEQ ID NO: 221941 - DNA, 1000 bp, Homo Sapiens
aatcacactctcagaaactgcggcggctctggactgcagcctcccaaggctccatgccagacaaagcatgcgtgtcacacttgctacaatagcctggatggtttcttttgtctccaattattcacacacagcaaatattttgccagatatcgaaaatgaagatttcatcaaagactgcgttcgaatccataacaagttccgatcagaggtgaaaccaacagccagtgatatgctatacatgacttgggacccagcactagcccaaattgcaaaagcatgggccagcaattgccagttttcacataatacacggctgaagccaccccacaagctgcacccaaacttcacttcactgggagagaacatctggactgggtctgtgcccattttttctgtgtcttccgccatcacaaactggtatgacgaaatccaggactatgacttcaagactcggatatgcaaaaaagtctgtggccactacactcaggttgtttgggcagatagttacaaagttggctgcgcagttcaattttgccctaaagtttctggctttgacgctctttccaatggagcacattttatatgcaactacggaccaggagggaattacccaacttggccatataagagaggagccacctgcagtgcctgccccaataatgacaagtgtttggacaatctctgtgttaaccgacagcgagaccaagtgaaacgttactactctgttgtatatccaggctggcccatatatccacgtaacagatacacttctctctttctcattgttaattcagtaattctaatactgtctgttataattaccattttggtacagctcaagtaccctaatttagttcttttggactaatacaattcaggaaagaaaaaacccaaaaaccaacctcattcacatatggcttttttttaaccaataacaattaggtgtacttctattttaaaacatttcagaaaaaaatatatgttatagcaatactcttac

SEQ ID NO: 221942 - DNA, 1000 bp, Homo Sapiens
gcttttattttcttgcttttttcccatccatagagcatgacagcatcgattctcattgaggagaaaccttgggcagctccggccaggccttgtaggaaaaggccccgcccgaggttccagcgtcaacggccactgtgtgtggctgctctgagtgaggaaaaaattaaaaagaaaaactggttccatgtactgtgaacttgaaaacttgcagactcaggggggtccctgatgcagtgcttcagatgaagaatgtggacttgaaaatacagactgggctagtccagtgtctatatttaaacttgttcttttcttttaataaagtttaggtaacatctcctgaaaagcttgtagcacaaaggctcagctggggatggtgtttgacttcggaggaaaaaagttgctattgcccgttaaaggcactagagttagtgttttatccctaaataatttcaatttttaaaaacatgcagcttccctctccccttttttatttttgaaagaatacatttggtcataaagtgaaacccgtattagcaagtacgtggcaatgttcattccaatcagatgcagctttctcctccgtctggtctcctgtttgcaattgcttccctcatctcagtagggaaaaaattgagtgggagtactgagatgtgtgggtttttgccattggacaaagaatgaggttagaagactgcagcttggagtctctctaggttttcaactatttcttcacaatttgaacacttgacggttgtcccttttaatttatttgaagtgctatttttttaaataaaggttcatctgtccatgcagtcctcttggattctctgaatgtagtaactatgaagctatgccaaaggtaggcagaaaatgggcttgggagccagacactccagggatcagtagttcctacccatagtctttgtgtgcttgctaaatggtgtacatttcttgttaaccacgttattaaaacttgatcagcacataaaaaaaaaaaaaa

SEQ ID NO: 221943 - DNA, 1000 bp, Homo Sapiens
ggatttcctggcgggtgggaaggaatggctggggcggccagttttgacacgccccagtgccctggagaacaaccagggtcatctgcacttgatgactgctccccgacccccagcccggacacctcattcccctcccactacagggatcaagtgacctgggaagaaccgagtttaacaccaggatgtgtttccttagatttcctttcctaggcgatttccagggagagccctgattggacaatcacatcacagatcacactgcagtttccatgttagcactgtggatgggtttttaatcaataaaaactgggggtttcttctcaccgactctccacttgcccaaactgccaaaagctggtgattctgggacaggccttcactttggagccacgggatggggtgggggagccccatgggcctgggaaggagggtgctgtggagggggctgcagggctgaccagcaggcagcctcatctggtcgggggcgggggcggcaggagcagaagcggggtctccgtccttgggactgtcctggttggccacgggccctgaggatgcacggtgcctggggctcctgtgccggtgggcggggggcatgctggcctctgagcgatcaggcgaggccagcgagggtgtgcttgcaaattcaagcaataagaggggggttcctgggggcttccagcccaggctagaagcccccatggcttctggcagctggacatcagccccaggtattggggtgattttggtcatgacagtgtgcctgtcccactgttacacgcatgaatgggggttatggggtgggggtggggactcagggctggaccgacgtcctagtggacctgatgtgaaattcctgtcaaacaaacaccacttttcaatggtttgctaggagtatttctgtattgaaagtttctaattatgctttttaaaaaaatactaaaaataaaggttcaagctgccaaaaaaaaaaaaaaaaaaaaaaaaaaaaaaaaaaaaa

SEQ ID NO: 221944 - DNA, 1000 bp, Homo Sapiens
tcataagtaccaggctgaattccccatgagtcctgtgacctcagcccacgcggggacctacaggtgctacggctcatacagctccaacccccacctgctgtctttccccagtgagcccctggaactcatggtctcaggacactctggaggctccagcctcccacccacagggccgccctccacacctggtctgggaagatacctggaggttttgattggggtctcggtggccttcgtcctgctgctcttcctcctcctcttcctcctcctccgacgtcagcgtcacagcaaacacaggacatctgaccagagaaagactgatttccagcgtcctgcaggggctgcggagacagagcccaaggacaggggcctgctgaggaggtccagcccagctgctgacgtccaggaagaaaacctctatgctgccgtgaaggacacacagtctgaggacagggtggagctggacagtcagagcccacacgatgaagacccccaggcagtgacgtatgccccggtgaaacactccagtcctaggagagaaatggcctctcctccctcctcactgtctggggaattcctggacacaaaggacagacaggtggaagaggacaggcagatggacactgaggctgctgcatctgaagcctcccaggatgtgacctacgcccagctgcacagcttgacccttagacggaaggcaactgagcctcctccatcccaggaaggggaacctccagctgagcccagcatctacgccactctggccatccactagcccggggggtacgcagaccccacactcagcagaaggagactcaggactgctgaaggcacgggagctgcccccagtggacaccagtgaaccccagtcagcctggacccctaacacagaccatgaggagacgctgggaacttgtgggactcacctgactcaaagatgactaatatcgtcccattttggaaataaagcaacagacttctcaacaatcaatgagttaat

SEQ ID NO: 221945 - DNA, 1000 bp, Homo Sapiens
cccaagccgggcctgagactcccggcttagaaggactgaaggagctaatgcagctctgctggagcagtgagcccaaggacagaccctccttccaggaatgcctaccaaaaactgatgaagtcttccagatggtggagaacaatatgaatgctgctgtctccacggtaaaggatttcctgtctcagctcaggagcagcaataggagattttctatcccagagtcaggccaaggagggacagaaatggatggctttaggagaaccatagaaaaccagcactctcgtaatgatgtcatggtttctgagtggctaaacaaactgaatctagaggagcctcccagctctgttcctaaaaaatgcccgagccttaccaagaggagcagggcacaagaggagcaggttccacaagcctggacagcaggcacatcttcagattcgatggcccaacctccccagactccagagacctcaactttcagaaaccagatgcccagccctacctcaactggaacaccaagtcctggaccccgagggaatcagggggctgagagacaaggcatgaactggtcctgcaggaccccggagccaaatccagtaacagggcgaccgctcgttaacatatacaactgctctggggtgcaagttggagacaacaactacttgactatgcaacagacaactgccttgcccacatggggcttggcaccttcgggcaaggggaggggcttgcagcaccccccaccagtaggttcgcaagaaggccctaaagatcctgaagcctggagcaggccacagggttggtataatcatagcgggaaataaagcaccttccaagcttgcctccaagagttacgagttaaggaagagtgccaccccttgaggcccctgacttccttctagggcagtctggcctgcccacaaactgactttgtgacctgtcccccaggagtcaataaacatgatggaatgctaaaaaaaaaaaaaaaaaaaaaaaaaaaaaa

SEQ ID NO: 221946 - DNA, 1000 bp, Homo Sapiens
gatcttcaaaaaacccttgcttttaggggagggaagcggggaaggaaaggaatgagggaggaaatattcctttctagcattcattttgcttagatcactccattgtgagtttgaccattttggagtcaaatgagcagacttccaaggagttgaccagtttgtgactagtctggtcacctttccagttacaggatcatattaactgtgtaaatgaattcatgggtagatgatttgtgcagatctgaatttaagaacatttcctttttctgtgggaatcacaagagtttatccactaaaaaaagatatgtaaaaaagatactttccagcacataaataaaggctggaattttacaacctgatgtatatattagacagttctaggatgttagttcccttcattccagagctatgcttgtgatacagccccttttcttataaagtcagttagaaggacttccttaacaatgactattataatgtcttacttaaaatacagttttgtattctgtcaatgcaaatataagacaggttgagccttaatcatgtaacaaaatattttgtagattacatattgatttttcaaaaattaaaaatgtatttcaaactattcttactgtgctgtgaatttatatcttcttctgcaagacctggggctatttttttttcttaaggtatgaaatcaatttcaataaccttaaacaattgaccctctgtcaggcatatgtcaggctccactcttaaggagtcagtgaccatgacctctttgcatatcctggaaaaatgacatcatcaaagtatagttgataatgttataaaggatgattttaaaaatagggtataatcatgactcacaaagatatgaggctgggtgtggtggctcacgcctgtaatcccagctctttgggaggctgaagcgggtggatcatgaggtcagaagatcaagaccatactggctaacacggtgaaaccccgtctctactaaaaatacaaaaaaaaaaaa

SEQ ID NO: 221947 - DNA, 1000 bp, Homo Sapiens
cttggtagtagtcaatcagcaggaatcatcggactcaggtacatctgtgagtgagaacaggtgtcaccttgaaggtgggagtgatcaaaaggaccttgtacaagagcttcaggaagagaaaccttcatcttcacatttggtttctagaccatctacctcatctagaaggagagcaattagtgagacagaagaaacccaagacaaagaagagagtgtggaatctagtttgccccttaatgccattgaaccttgtgtgatttgtcaaggtcgacctaaaaatggttgcattgtccatggcaaaacaggacatcttatggcctgctttacatgtgcaaagaagctaaagaaaaggaataagccctgcccagtatgtagacaaccaattcaaatgattgtgctaacttatttcccctagttgacctgtctataagagaattatatatttctaactatataaccctaggaatttagacaacctgaaatttattcacatatatcaaagtgagaaaatgcctcaattcacatagatttcttctctttagtataattgacctactttggtagtggaatagtgaatacttactataatttgacttgaatatgtagctcatcctttacaccaactcctaattttaaataatttctactctgtcttaaatgagaagtacttggtttttttttttcttaaatatgtatatgacatttaaatgtaacttattattttttttgagaccgagtcttgctctgttacccaggctggagtgcagtggcgtgatcttggctcactgcaagctctgcctcccgggttcgcaccattctcctgcctcagcctcccaattagcttggcctacagtcatctgccaccacacctggctaattttttgtacttttagtagagacagggtttcaccgtgttagccaggatggtctcgatctcctgacctcgtgatccgcccacctcggcctcccaaagtgctgggattacaggcatgagccaccg

SEQ ID NO: 221948 - DNA, 1000 bp, Homo Sapiens
tccttccccagacaaagaccctgccaaagaatcccccaaaccagaagaacagaaaaacaccccccgtgaggtgtcccccctcctgccgaaactccctgaagagccagaagcagaaagcaaaagtgcggactccctctacgaccccttcattgttccaaaggtgcagtacaagttggtctgccgcaagtgccaggcgggcttcagcgacgaggaggcagcgaggagccacctgaagtccctctgcttcttcggccagtctgtggtgaacctgcaagagatggtgcttcacgtccccaccggcggcggcggcggtggcagtggcggcggcggcggcggtggcggcggcggcggcggcggcggctcgtaccactgcctggcgtgcgagagcgcgctctgtggggaggaagctctgagtcaacatctcgagtcggccttgcacaaacacagaacaatcacgagagcagcaagaaacgccaaagagcaccctagtttattacctcactctgcctgcttccccgatcctagcaccgcatctacctcgcagtctgccgctcactcaaacgacagcccccctcccccgtcggccgccgccccctcctccgcttccccccacgcctccaggaagtcttggccgcaagtggtctcccgggcttcggcagcgaagcccccttcttttcctcctctctcctcatcttcaacggttacctcaagttcatgcagcacctcaggggttcagccctcgatgccaacagacgactattcggaggagtctgacacggatctcagccaaaagtccgacggaccggcgagcccggtggagggtcccaaagaccccagctgccccaaggacagtggtctgaccagtgtaggaacggacaccttcagattgtaagctttgaagatgaacaatacaaacaaatgaatttaaatacaaaaattaataacaaaccaatttcaaaaatagactaactgcaattccaaagcttctaaccaaaaaaca

SEQ ID NO: 221949 - DNA, 1000 bp, Homo Sapiens
tgtgatactcactctttcatgcaatagggcttccatgtaatgttgccgtataatcactttaaaaagttaaacgacccatctcaatcacctagtttatccccagggaatacactggcatagagagcctatttacactaataaactaccaagctttgttgttcataataagtaaaatggacttgcattgctctcttttttggacaacttcatcaatgctttttgaattatatgtttcaacaaatgaaacgacagttatccaatcagattcctgaaaatgaacactgaaccgttaatcatactgatatgtactactgacaaaggaaatctgtgaggcacacatgattgatgggtatggggccatgaagaccttgaagagcttcaccagaagtatggaaatcaagactttacagagtcttttgtataaagcacacgtgcaaaaacaaacaaaattagaactaacaatgctattgaaagatacaaaagaattgcagtccatagattggtgtttgtaaatatggcctttttctcgtccttattaaacccttagtatacaaggataaataaattctcacctgcttaattttagtgcaattgaaacacataagcctttttaaagagagaaattcccatgaaaacctactagtcagcaatgggaagttgtataaattcaagggataaacctatccctgttttcttcctgcactgtatgataataccaaaatttgggacagtcacatactaacttttcagatttgttcttgtgtttcagaaaaaagtgctcagcatgaatttggaatgttgttttatgtattgttgtggatctctcagtgtttaacatggtgccttgcatatggtaaatgctaagtaaagcgggatcaatgaattatttccttctcaaacatttatcttataccttgtgtgttcatattattattataaacagagctcaagaaacccaataaagttatgtgttgccagtgtaaaccttaacttaaaaaaa

SEQ ID NO: 221950 - DNA, 1000 bp, Homo Sapiens
ccgtggccaactggattcacgcccgctccacgaggaagaagcgctgcccctacaccaagtaccagacgctggaactggagaaggagtttctcttcaatatgtatttaaccagggaccgtcggtatgaggtggcccgggttctcaatctcaccgagcggcaggtcaaaatctggtttcagaatcgaaggatgaagatgaaaaagatgaataaagagaaaaccgacaaggagcagtcctaaaccctacccagcctgctgcctcagcacagccaagggaaaaacaaaaaccccacaaaataccccaacacaggcgggggagagacgaaaaagaaaaggaaagagcaagatagacaaaagccaatcagcttaaaaagaaaaacaaggaaggggaaaagaaaactcttgcgatttgggagggttcagtgttgagatattggtgttttagagttagttctacccagcgaggaggaggcggggagagaaactgcgttctctttccccagcgcaaccgaaataaatgacacatacaaatgtgatttttttcctcctttcttcagagaagccagtacttgaatcgctatatttctatttttttttccctgtatcgtatttggtccaggtcatccctccccgggcctggggcgctctgcgtgcagattttgtacaaaaaaaaaaaagacacacacacatacatgataatgattcccagcccaggagctgaggggtgagggctggggaccatgccgcgggctaggtcgggcccgtgcaggccggcgccttgggctgtacatagtgttccctctcatccccagggttcgtccccagcgtccgtcctgtaacgtgcttctgtttgttatggtagaacagccctgtgttaatatattgaagtcacttaaccagaaaaaaaaaaaaaaaaaaaaaaaaaaaaaaaaaaaaaaaaaaaaaaaaaaaaaaaaaaaaaaaaaaaaaaaaaaaaaaaaaaaaaaaaaaaaaaaaaaaaa

SEQ ID NO: 221951 - DNA, 1000 bp, Homo Sapiens
ctcggggcaacccaggaaggccccaagaggacaatggattctggaactcgcccagttggtagctgctgtagcagccccgctgggctctcacgggagtacaaactagtgatgctgggtgctggtggtgtagggaagagtgccatgaccatgcagttcatcagccaccgattcccagaagatcatgatcccaccattgaagatgcttataagatcaggatccgtattgatgatgagcctgccaatctggacattttggatacagctggacaggcagagtttacagccatgcgggaccagtatatgagggcaggagaagggtttatcatctgttactctatcacggatcgtcgaagtttccatgaagttcgwgagtttaaacagcttatttatcgagtccgacgtactgacgatacacctgtggttcttgtgggaaacaagtcagacctcaaacagctaagacaggtcaccaaggaagaaggattggccttggcccgagaattcagctgtcccttttttgagacatctgctgcataccgctactatattgatgatgttttccatgcccttgtacgggagatacgtaggaaagaaaaggaggcagtactggccatggagaaaaaatctaagcccaaaaacagtgtatggaagaggctaaaatcaccattccggaagaagaaagattcagtaacttgaagagaagatgtgaagtgtttatctgtgaactgcagtgctgtatcaaagcagtccagtaacctgcagtactgagtatggtgcttgctctttcacttaactgataagagggacatgcctactaggagtttttaatgatgtggtatttaaagtattgtctcttagttaagtatgatttattaacccagtggagcactgtctgcttttaaattgtcacattagaatttgttctaccaatgttttgggttctgttgcgctattaattaatgtaaatttgtttatacccaggagaaaaaaaaaaaaaaaaaaa

SEQ ID NO: 221952 - DNA, 1000 bp, Homo Sapiens
ctatgatttaccttctgtgttatatgttacctttatgttagacaatcaggattttgttttcccagccagagttttcatctatagtcaatggcaggacggtaccaactcagagttaagtctacaaaggaataaacataatgtgtggcctctatatacaaactctatttctgtcaatgacatcaaagccttgtcaagatggttcatattgggaaggagacagtattttaagccattttcctgtttcaagaattaggccacagataacattgcaaggtccaagacttttttgaccaaacagtagatattttctatttttcaccagaacacataaaaacactttttttcttttggatttctggttgtgaaacaagcttgatttcagtgcttattgtgtcttcaactgaaaaatacaatctgtggattatgactaccagcaatttttttctaggaaagttaaaagaataaatcagaacccagggcaacaatgccatttcatgtaaacattttctctctcaccatgttttggcaagaaaaggtagaaagagaagacccagagtgaagaagtaattctttatattcctttctttaatgtatttgttaggaaaagtggcaataaagggggaggcatattataaaatgctataatataaaaatgtagcaaaaacttgacagactagaaaaaaaaagatctgtgttattctagggaactaatgtaccccaaagccaaaactaattcctgtgaagtttacagttacatcatccatttaccctagaattatttttttagcaacttttagaaataaagaatacaactgtgacattaggatcagagattttagacttccttgtacaaattctcacttctccacctgctcaccaatgaaattaatcataagaaaagcatatattccaagaaatttgttctgcctgtgtcctggaggcctatacctctgttattttctgatacaaaataaaacttaaaaaaaagaaaacaagctaa

SEQ ID NO: 221953 - DNA, 1000 bp, Homo Sapiens
atgatgaggcaatacacatcttttcattttgcctcgctggaggatgtacaggccaaggtcctggaaataccatacaaaggcaaagatctaagcatgattgtgttgctgccaaatgaaatcgatggtctccagaagcttgaagagaaactcactgctgagaaattgatggaatggacaagtttgcagaatatgagagagacacgtgtcgatttacacttacctcggttcaaagtggaagagagctatgacctcaaggacacgttgagaaccatgggaatggtggatatcttcaatggggatgcagacctctcaggcatgaccgggagccgcggtctcgtgctatctggagtcctacacaaggcctttgtggaggttacagaggagggagcagaagctgcagctgccaccgctgtagtaggattcggatcatcacctacttcaactaatgaagagttccattgtaatcaccctttcctattcttcataaggcaaaataagaccaacagcatcctcttctatggcagattctcatccccgtagatgcaattagtctgtcactccatttggaaaatgttcacctgcagatgttctggtaaactgattgctggcaacaacagattctcttggctcatatttcttttctttctcatcttgatgatgatcgtcatcatcaagaatttaatgattaaaatagcatgcctttctctctttctcttaataagcccacatataaatgtactttttcttccagaaaaattctccttgaggaaaaatgtccaaaataagatgaatcacttaataccgtatcttctaaatttgaaatataattctgtttgtgacctgttttaaatgaaccaaaccaaatcatactttttctttgaatttagcaacctagaaacacacatttctttgaatttaggtgatacctaaatccttcttatgtttctaaattttgtgattctataaaacacatcatcaataaaatagtgacataaaatca

SEQ ID NO: 221954 - DNA, 1000 bp, Homo Sapiens
atgatgctgcagccccagttcaagtcacacaacaccaatgaggtgctggagaagctgttccagatagtgcctggcgagaacccctaccgcttccgggacccccaccagtgccggcgctgtgccgtggtggggaactcgggcaacctgcggggctctggctatgggcaggacgtggacgggcacaacttcatcatgaggatgaatcaggcgccaaccgtgggctttgagcaggatgttggcagccgaaccacccaccatttcatgtaccctgagagtgccaagaacctgcccgccaacgtcagcttcgtgctggtgcccttcaaggtcctggaccttctgtggatcgccagcgccttgtccacggggcagatccgattcacctacgccccagtgaagtccttccttcgagtggataaagaaaaggtccagatctacaacccagccttcttcaagtatatccacgacaggtggacagagcatcacgggcggtacccttccacggggatgctggtgcttttctttgccctgcatgtgtgtgatgaggtgaacgtgtacgggttcggggccgacagccggggcaactggcaccactactgggagaacaaccggtacgcgggcgagttccggaagactggcgtgcacgacgcggacttcgaggcccacatcatcgacatgctggccaaggccagcaagatcgaagtctaccggggcaactgagccgggcctcgccgcgacccttccggcccatctatcgggcaccggggctccggcccgggacccaggaccagcaacccgcgaccaatcatgctgcagcccaggggcgtctgctgtgccccgccaatcacgagactgggggaccggccgggcctggcaccaatctgcgctgcggtcgggcggagcttctgtttctcccagccaatcatgtgactcaaggaaaacttccggcgctgtgtccagtctcctccaatcaatggccttcgggggcgggccagcggccgct

SEQ ID NO: 221955 - DNA, 1000 bp, Homo Sapiens
cacaggtatgacacctgagaaggtgccagtttcagaggtcatgggtaccacactggcagagatgtcaactccagaggctacaggtatgacacctgcagaggtatcaattgtggtgctttctggaaccacagctgcacaggtaacaactacagagtgggtggagaccacagctagagagctacctatccctgagcctgaaggtccagatgccagctcaatcatgtctacggaaagtattacaggttccctgggccccctgctggatggtacagccaccttaaggctggtgaagagacaagtccccctggattgtgttctgtatcgatatggttccttttccgtcaccctggacattgtccagggtattgaaagtgccgagatcctgcaggctgtgccgtccggtgagggggatgcatttgagctgactgtgtcctgccaaggcgggctgcccaaggaagcctgcatggagatctcatcgccagggtgccagccccctgcccagcggctgtgccagcctgtgctacccagcccagcctgccagctggttctgcaccagatactgaagggtggctcggggacatactgcctcaatgtgtctctggctgataccaacagcctggcagtggtcagcacccagcttatcatgcctggtcaagaagcaggccttgggcaggttccgctgatcgtgggcatcttgctggtgttgatggctgtggtccttgcatctctgatatataggcgcagacttatgaagcaagacttctccgtaccccagttgccacatagcagcagtcactggctgcgtctaccccgcatcttctgctcttgtcccattggtgagaatagccccctcctcagtgggcagcaggtctgagtactctcatatgatgctgtgattttcctggagttgacagaaacacctatatttcccccagtcttccctgggagactactattaactgaaataaatactcagagcctgaaaaaaaaaaaaaaaaaa

SEQ ID NO: 221956 - DNA, 1000 bp, Homo Sapiens
cagtaccatattcaccctcgatgtgtacaaacttatccgcaagagcgcaagctcccgggagttaatgattgtggggaggatatttgtggcatttatggtggtgatcagcatagcatgggtgccaatcatcgtggagatgcaaggaggccagatgtacctttacattcaggaggtagcagattacctgacacccccagtggcagccttgttcctgctggcaattttctggaagcgctgcaatgaacaaggggctttctatggtggaatggctggctttgttcttggagcagtccgtttgatactggcctttgcctaccgtgccccagaatgtgaccaacctgataataggccgggcttcatcaaagacatccattatatgtatgtggccacaggattgttttgggtcacgggactcattactgtaattgtgagccttctcacaccacctcccacaaaggaacagattcgaaccaccaccttttggtctaagaagaacctggtggtgaaggagaactgctccccaaaagaggaaccatacaaaatgcaagaaaagagcattctgagatgcagtgagaataatgagaccatcaaccacatcattcccaacgggaaatctgaagacagcattaagggccttcagcctgaagatgttaatctgttggtaacctgcagagaggagggcaacccagtggcatccttaggtcattcagaggcagaaacaccagttgacgcttactccaatgggcaagcagctctcatgggtgagaaagagagaaagaaagaaacggatgatggaggtcggtactggaagttcatagactggttttgtggctttaaaagtaagagcctcagcaagaggagtctcagagacctgatggaagaggaggctgtttgtttacagatgctagaagagactcggcaagttaaagtaatactaaatattggactttttgctgtgtgttcacttggaattttcatgtttgtttatttctccttatga

SEQ ID NO: 221957 - DNA, 1000 bp, Homo Sapiens
tccaccactgagcacccgtgtgactctttccatatgtataacgtggggataataataatagctgcttcacaggatgaaatgaagtttgaggtgagaagcattcaccatggtgcccatcgtgttactccattgtcagaggaggaaacggggtcaggcaggaaagcaacttaaaggagggcctgcaagcagccagggtcagagacagggcttggttctgcttcctggtgaagcatggcttcggggtgctgcctctccctccctgtttgaatctgcagattgtgttaggcccccagctgagggcctggagtggtgggattggtcccagtgcctggcgcacattggcctgcagagtagattaactgaatgaccaaagagcaacagaagtctagtgattcttgtctttgaggttctgactggtgttttacaactgagtccaaggcttttccctcctttgtccctctgacacccctccccctaattctcatctgtcagatccagtgtattcctaagctgggacaaagcctctgttttcccagtaggagccagggctgagtgtggaaattacagtgactgcttcttctcagcttctctggttgaaagcaagctggcgaagtaagaggaggtagagttgagaaggtgtggaagatagggacagctgcccccagaactcccttcaagggaggacttccccagctatgggaagtgccatcagggtggccgcagctgcagagagccacttcacctgagaccacgcccttcctggggcagcctgtatctggtgtctgagtgaggcatggtataaacacctggtcatttcaatccaacatgggacggacactgacagacagtactcccagcaggcccaggccagccagggcttcgtcaggcctgcagcacaatttgacttcctatgcccaggcctgcttcctcttcttcctcttcttttcacaggtgcttattcctaataaacatcttgcaacccaaaaaaaaaaaaaaaaaa

SEQ ID NO: 221958 - DNA, 1000 bp, Homo Sapiens; identical to SEQ ID NO: 116730

SEQ ID NO: 221959 - DNA, 1000 bp, Homo Sapiens
ccacacgggagagaagccgtacagatgcagtgtctgtgggaaggccttcagccacagctcagccctcattcagcaccagggcgtgcacacaggcgacaagccctacgcctgccacgagtgtgggaagacctttggtcgcagctccaacctcatccttcaccagcgagtccacactggagagaagccctatgaatgtactgaatgtggaaaaaccttcagccagagctcaaccctcattcagcatcagaggattcataatgggctgaagccccatgaatgtaaccagtgtggtaaagccttcaaccgaagctcaaatctcattcaccaccagaaagttcatactggggaaaaaccctacacctgtgttgaatgtggtaagggcttcagccagagctcacacctcattcagcatcagataatccacacgggcgagcgcccctacaaatgcagtgagtgtgggaaagccttcagtcagcgttcggtcctcatccagcaccagaggattcacactggggtgaagccctatgactgtgctgcttgtgggaaagccttcagccagcgatcaaagttgatcaaacaccagttgattcacaccagggaataggctgttgggctggcaggagtgaaaccgagcatagtttcctctccaactcctctttggccattgtctcagcctctgccacttcccagaccgaaagcctggactcagctcactgcctacatccagtggccacatagcctgggaccctcctttgaaacatcctttacaggctcccttctcactgccactgctcttgcctcttgtgatgtcttgggtttgggcttgtttttacagcttgtgaacggactgcacgtttgttacaagggagaagattatggaggctgcatattcatgaatagagtttattattataatgaaaagttaccaaaaaagtaaagtgacgtttggtttgagataaccatagtagtttgtttgattggtaaaaaaaaaaaaaaaaaa

SEQ ID NO: 221960 - DNA, 1000 bp, Homo Sapiens
agtgaaatgtactgagtggattccgtcttctactcaggaatggaatgtgtgacacaggcctgactcagcctctgatccatccctcaagccacagttaatgattcagatgtcagtagatgaccaaagatggttcaattagagtcccaggattgcaagagctaataggaacaaatactctccccccgcccacccccattggttttaatgctgagaagaagaactagactcttacagaggtgagaatgaagtccacacagcaaaaatgcatctgagaattggagagcagtaaaagactgaagataatgtttgaacagccacatacaccatgcctgaagctaaaaatatatacgggtttttgaattgcagcagccaataaattccatttttgtttggttggttttggctttggcacacctgagttaggttttcttgccttggaacagaattttgacttaaacagtgttgtcattgtagcagttgtttgaagttttcagggataacatacctgatggagaaatgttttgtgtgtatgatatatgggaaagtctttagttatagtcatggcagctcctcaaccccatgattgtgatgagattgggaagcccactgtaacactggagagcccaggttatatcagacaccactagtagatagaagttctaacaacttgagctctgtaacaaaaatctcattgtactacaaaattatgtctgcaccagtgaatccattctcaagaaaagtcttaactaggaaactaaaagctttcactcttaaagctttcattttctgtttattcagttttttatttggaatggatgctactctaggccttaaactgagaaatgccaggctattgtagctattatatcttggtatttgccattttaattcctaggacagcacgcccgctttgcccttgacctggctagggagccaaggaaatgccatggttcttggtcataagacacactgcagagatctctcagtaggaaaacagggc

SEQ ID NO: 221961 - DNA, 1000 bp, Homo Sapiens
ataccccgaggcgcggaaccatagatataacagtggtaacagtgcgtgggcaggtaggaggtaggatgtttcctagaccatttggggtctgaggagaaacaggctggggcctcgagaaggagtcactcagacaagccatatttttagaaagtagtctactgatgggagcaacagttatggcatgctgggggaagagaagggacttttccttgtgaagagccctacagctgcccctatttactgacttgggagaagtaaagtcagaaagaacgaacagctgtggggggaaaaaattctcagttgtcaaaaaaaaaaaaaactgatctgcttagaatgtggccctggtttcttttcccacatgaacctccagcaaatagcaagtccaggaaaaactcttctcattcaaagaggaattattcaaaagtaatcaaaaccacaaatgcatttggtttttgggccagcaattccacttctaggaatgtacatactcacacatgtacaaaatgatgaacatacagtattcattaatgcagcgtttgtgaaaacaaaagattggaagctgtttaaatgacaccatatcagggttctggttccctaaattgtggtatattcatacagcctactcctgggtagacaacaatgaataaataaggagaacttggaaaccatttatgtagtgatgtgggataaccttcagtttatgttattaggtaggaaaaataaggttgaggacagtgactgccatttgtatataaaaaggagaaaaatggtaagtacataattgtgaattcataagttatctctggaaagagacatgagaacctggtaaccctgattaccttgggaggggaaggggcagtggtggctggggggatggaattgagagggagacaactgtatcctttcatagcttttgaaaatgtgggtgtactatgtactatgtggatgtactaccttttcaaaaataaaacatttaaaaagctaaaaaaaaaaaaaaaaa

SEQ ID NO: 221962 - DNA, 1000 bp, Homo Sapiens
tccttgcaagacgcattctctcaaagctcacacaagatagacctcaataggcatatgtatctattaaataaaccaaagcagtaattaataaccttccaaggccaggtacagtggttcatgcctgtaatcccagcacttcactttgggaggctgaggcgggtggatcacaaggtcaggagttcgagaccagcctggtcaacatggtgaaaccccctatctactaaaaatacaaaaaattagctgggcatggtggcatgcgtgtgtagtcgaagctactcaggaggctgaggcagaagaatcacttgaacctgggaggtggatgttgcagtgagctgagattgtgccactgtactgcagcctgggtgacagaatgagactgcatctcaaaaaataataatgaaactttccaaaacaaagtgccaggaccagctgggttcactgatgtgtttttgagatacttaaggtagaaatgataccaagtctctaccatctctttcagaaaataaaagcagagataacacttcccaactcattttgtgaggccagtattaccctaatagcaaaaccaggcaaagatattacaagaaaggaaaactacagatcaatatttccattgaacacagatgcagaaatcctcaaaatattagcaaatcaggaatgcaaggcttgttcaacatttgatattcagtgtaatccattgcatgcattagcagctcaaagatgaaatacgatcatatcaataggtacagaaaaagcatttgacaaaatccaatatccattcatgttaaaacctctcaacacagaaggaatacaggagaacttactcaagttggtaaagaacatactacaaaaaaccctacagctaacattatccttgatgtttccaactagacactttcctactaagatcaggaacatggcaaggaacaccacaccactgcttttcagcattgtactggaagtgctatataatgcagtgttaaaaaaaaaaaaaaaaaaa

SEQ ID NO: 221963 - DNA, 1000 bp, Homo Sapiens
caaggactggaggtcaaagaagctccttccagtaacagtggaaacagagctgctgtccagggtgaccacccccagttgcagttgtctcttgctattggtctggatgatggcactgcagaccagcagagggcctgtcctgccacccaggccctggaggagcaccagaagcccccagtttccatcaagcaggagagatgtgacccagaatctgtgatctcccagagccacccctcaccctcatcagaggtgacaggccccacttttactgaaaacagtgtcaaaatacacttatgccattactgtggggaacgttttgattcccgtagtaacctaaggcaacatctccatacacatgtgtctggatccctgccattcggtgtccctgcttccattctggaaagtaatgaccttggtgaagtgcatccccttaatgaaaacagcgaggcccttgaatgccgcaggctcagctccttcattgttaaggagaatgaacagcagccagaccacaccaaccggggtaccacagagcctttgcagatcagtcaagtatctttgatctccaaagacacagagccagtagaattaaactgtaatttttctttttcaaggaaaagaaaaatgagctgtaccatctgtggtcataaattccctcgaaagagccaattgttggaacacatgtatacacacaaaggtaaatcttacagatataaccgatgccaaaggtttggtaatgcattggcccagagatttcagccatactgtgacagctggtctgatgtctccctgaaaagttctcgcttgtcacaagaacacttagacttgccttgtgccttagagtcagagctcacacaagaaaatgtggatactatcctagttgagtagcagcttctctttcagaatttttataccaattctgaaaaagaaaatttgcgtggcatttttaattcataaattattttcctcctcaaaaaaaaaaaaaaaaaaaaaaaaaaaaaaaaaa

SEQ ID NO: 221964 - DNA, 1000 bp, Homo Sapiens; identical to SEQ ID NO: 116735

SEQ ID NO: 221965 - DNA, 1000 bp, Homo Sapiens
ttgaaaaagcaaagccacaccattctctttgatgtatgcagagagttacgtagcaggggatgttctctgatttattccactggcaccattagtgaatatttagttgttttcataaacgatgctgtgatgaagactcatgtacatatttagcaaattttggtttcttacatgtgcctgtcatgactgtaattcattatgactgctccaggaagggctaatggggccaatatattattgcctgtcatgtggcacatccatgttaaggggctgaggcgtccctggcacggaatgcagagccctgagctagggcatcagcagaagctgagatagagatattggtcatggttgactgaggagccaattaaaacctgtttatgcctagtgttccattattggaacactaagcatgtgggagttatttatatcctactgctcaaggtcatcgccaaggtgtgattggaaaaattcaaaaaattgcaacctcaggcataaatgggttaaggacatcccaagcccaagtggtacgtgcctcactcagaactgacgggccgagttctatctaggtgtgtcttccagaacctgtttacggctaactggataactgagagacttgtcatttctaaagacatttaagttgctccagggatttctgaaaaaagacacaggcttcttcctagagccagccctatataacatgcccacaagggcaacagttatcacagttcatacacacctttcatgtcctgtctcactcactcctcacagccatcctaggagatacatattgttttcatcctgcatttacagaaaaagaaatgaaaacagagagcttaaataatttgccacagtaatgtcgaaactaggcctttgaaccaaggcagtctagggtaaaatatagtttcaaagtatgaataagaattggtatttgtgttatctttgagtaagaaactgtccgatatgaatcacaacgtgggtgaatgtagtattttcctgaagtgtg

SEQ ID NO: 221966 - DNA, 1000 bp, Homo Sapiens
tcttttcttctgccctaactattgtgtagcctcttatgctgaaatcggcttctgctggcttctccggctttcagagccctgaaacaaagagaaacaggatctgtccctacccagcacagcaaatggttgtagtaattgccaaagccctcataaagccctccggcttgaggagagagtgtatagtcatgggttctgcctctgtgcccttgctggccgcttctcctctgccttctttcctggaactcagggtgtggggactgagcctgtaggggacagcatgccgtcttgctgtggccactcccaagtgtgccctcttccctctttacacatcaggtgtctctggcacaggacttggcactaagctccatgctgagacaccaggctatgtgggcccccaccttgtttcccagcctgcaccttagaagccgaaggtgctttcatcagaaccctaaaatggtcgttgaaggcgcctgggccgcagcccagcagtagttggagaggcaggcagagggcagtggttctcccaaataggagacctggggcctggccaggccagggtttgggcctaatggctttgactaaattacccccatcctccttgcccggaaaagggagagctagagccactcactgtcattctgctctgaccttgaagggggcggtgttggcctggcttctggaatggactgagtccatcgtggaaagggctgggggcaggaggaggtggggaggggcactgcctgcggaaggtaggattagatcattagctcagtgacctcctagggtttcgatgtgctatgttctcatcctacagttggtttggtaatgatctgcaagtcccggagagcaacagcacagctctgcctgacgctctcattaaaatctatgcagccaagctcggcactttgtagcagccggccttgcgaagcctcctcagctcggggggccggggacccagtgagccgagaggccctctgggctccacttatgcatatgcacc

SEQ ID NO: 221967 - DNA, 1000 bp, Homo Sapiens
actgttggacaaatgatatatatttcttctaaggaaaaagtttattatttactctttactagacaaatgagtagcatatagaagaaagttaataggccgggcttggtggctcatgcctgtaatcccagcactttgagaggccgaagcgagtggatcacctgaggtcaggattttgagaccagcctgaccaacatggtgaaaccccatctctactaaaatacaaaaattatccgggcatgggggcacacaccggtaatcccagctactcaggaggctgagacaggagagtcgcttgaacctgggagggcggaggttgcagtgagccaggatcgcgccattgcactccagcctgggcaacaagagcgaaactcttgtctgaaaaaataaagttcatcccaactttcaagtctacaaaaacataatccaaatctaataacatagttgtaaatgagagcaacaataaaaagtagacatgggctgggtgcagtggctcactcctgtagtcccaggactttgggaggccgaggtgggaagatcccttgagcccaggagttcgagacaagcctgggtaacacggggagacccgtctttagtaaataaaaataaatttattaataaaactaaaaatttaataataaaaagtggacattgttttttaaaatgtgtatagtatgcattttaaagatagtgtcactgctgtggaaaacctgaacagacagtatgatccagaatgtcaggtgtggagttgggcggacaagagtctgctgatgaggacaacctaaaagagcactggatttggaatcagaagacctacctttgattcctggctttcccttaatggccatgtgatgttattaagtcagcctctaaagctttagtttcctgtcagtcaaatgttgacatgatacctacctcacagggttgttgtgagggttaagtgaaaggatctttgtgaaagtactttttgaaatcattcagttgtcaataaagttggataaaa

SEQ ID NO: 221968 - DNA, 1000 bp, Homo Sapiens
gtttttatattaatttgtttttcttatccaagtaaagatgtcaataggaattgcattagtccaaggcctttttcataaactgagcctcttttcaattatttcaatgggacaggaactaggatagatgtgattcctgcatttttttaccttaaatctgcctttgtttctaaaggtagatcatcttgaatatttgcttaaaattgctagtgatttcattaccaagttacttgaaaaaatgttctatatgcatttaattctgaaatcagtctaccaaggggctgctagtatatgtcagacatgaaaactattttaaagctgactttgttgccttatcttgaaaagaatctagataggtgcttttaactggggtattaacttttttagaatgacacagctgaacagtgttaataatagtgtgtcaagattgcaaagtcgacatactcatttggtttaagcaggaatcctagaagcaaatggatggggataagaataggtcattttctattcaccatcctttactattaagggaaaggaaaagaacactagctaaggaagggaaagggaagtgatatcataaaagtagcaaccttcattttacattctgtctgtttttctttttttgctttgttttgtttgtgctaatttgggaattgtgtactccgaaacaagtagaaaagtgctgtttgagggattttattaaatctttttttaatggaatgtggtacaaattgttcatgttaccaaagcaatatttccctggaatttaattcaaagtttgtggcatacaacctgagccttttcttatataagacaagaatatgttcacatcttggtatgtggccatatttatagaatgctgaactcaatgtgcaagttgtactgtatgcagttttgtaaataagtgaaaataatttgttgtactttttattcaattctgtatagattataaaattatttttattaaataaatattttacagtataaaaaaaaaaaaaaaaaa

SEQ ID NO: 221969 - DNA, 1000 bp, Homo Sapiens; identical to SEQ ID NO: 116742

SEQ ID NO: 221970 - DNA, 1000 bp, Homo Sapiens
gagctcaagaaacagatggcaaaccaaaaagatttggagagaagacaaatggaaatcagtgatgcaatgaggacacttaaatctgaggtgaaggatgaaatcagaaccagcttgaagaatcttaatcagtttcttccagaactaccagcagatctagaagctattttggaaagaaacgaaaacctagaaggagaattggaaagcttgaaagagaaccttccatttaccatgaatgagggaccttttgaagaaaaactgaacttttcccaagttcacataatggatgaacactggcgtggagaagcactccgggagaaactgcgtcaccgggaagaccgactcaaggcccaactccgacactgtatgtccaagcaagcagaagtattaattaaaggaaagcggcagacagagggcactttacacagtttgaggagacaagtagatgctttaggggaattggtcaccagcacctctgcagattcagcgtcatcacccagtctgtctcagctggagtcttccctcacagaggactctcaacttggacaaaatcaggaaaagaatgcctcagccagatgaggaatactgtcttgtgtaaatatattcaaggaaaacacctccactacctcactgacttcataattggaatgtcacatggtttttttaatcaagatgcagtgaactgagattctgaaactccactgtagtttactttgcctgtaccattaatgccaatgtttttataaatcacttgtacatagtacatatgggaatagttgcatatgggaatttaaaccaacatgtggctgagcctttttttttttaatcttcgtaacatgtttaaaaaaaaacagtgattttaactgcatatttgaacctacaaactggtaaatcttattaacaaaaagaatgtacttaaggccctctttatttatagtgtcgagttatttttgaattttgcttaaaatctatttttcatatgaaaataaaagataacaatcaa

SEQ ID NO: 221971 - DNA, 1000 bp, Homo Sapiens; identical to SEQ ID NO: 116746

SEQ ID NO: 221972 - DNA, 1000 bp, Homo Sapiens
tatagcatgtggtcgtgaattcttggttaattcaagccgggtgctcttggacaccatattgcagcttctgggagacttgaagccaggacagtgtaccaaactcaaagtgctaatgctgatgtccctatacaatgtaagcatcaatttgaaaggcttgaaatacatcagcgagagtccaggattcatccctttgctgtggtggcttttgagtgatccagatgcagaggtgtgccttcatgtactgaggcttgtccagtctgtggttctggaacctgaagtcttctccaagtcggcctctgagttccggagctccctgcccctgcaacgcatcctggcaatgtccaagagccgcaacccccgcctgcaaaccgcagcccaggagctcctggaagatctccgcactctggagcataatgtgtaggtgtgctcggccaccagggttttggtgaaaatgccggtgtcccttctccccagatccctcatttgatactccaaaaccatcaccatgtaccatgtgttagagttggcaaaatgtgattgactagagatggacatgaattgatatgtatcccacataactttgtcttggaagtgagagtgcttgtaggtggttggttaagcttgccaaaggagaggccatgaaagaacctgtccttctggaaaagtggtccatgtctgtgctggctggaagagggcttgcttagggcagcttcttgctgctcagcagaccatgacctgtaggttcacctataaaacagggaaattgaataaccatctaccccattagtcagcattttcttgagatacatttctttgaaaagcaattcattctctctctagtaattgtaattaatccccccaaaatgcaagtttacttttataaccttttggtgaacctgctatttcggatgacattgggcattttagttctatattttttgtgcctcttttatttttgaataaagaaaatcagaagagttgtaaaaaaaaaaaaaaaaaa

SEQ ID NO: 221973 - DNA, 1000 bp, Homo Sapiens
ttgccacacagggaccattacagaatacctgtcaagatttttggcagatggtatgggaacagggaattgcaattatagcaatggtgacagcagaagaggagggtggaagggagaagagctttaggtactggccacgacttggttccaggcacaacactgtcacctatggaaggtttaagatcacgacccggttccgcacagactctggctgctatgccaccacaggcctgaagatgaagcacctccttaccgggcaagagaggaccgtctggcacctccaatacacagactggcctgaacatggctgtccagaagacctcaagggatttttatcatatcttgaagagatccagtctgttcgacgccatacaaatagcacaagtgatccccaaagccccaaccctccgttgttggtccactgcagtgctggggtaggaaggactggcgtggtgattttgtcggagatcatgatcgcctgcctggaacacaatgaggtgctggacatcccgagagtgctggacatgctgaggcaacagagaatgatgctggtgcagactctctgccagtacacatttgtgtacagagtcctcatccagttcctgaaaagctccaggctcatctaagctcccacaatttcttacggggccagtcatgtgaagcgtttacagcttaaaaaaaaagcgcttgcctaactcatactttcccgttgacacttgatccacgcagcgtggcactgggacgtaagtggcgcagtctgaatggcggcacgctgaaggaaacgtgcgaagcacaggctgaagaggggtttctaacctgggaaaggtgctcaaggaggacttggtttcaagggccttgccctgccccggtctgtccggtttgcagtacttgcacacattttggagattgtattttctagacaattctctattttactgaagctatgctgggcaattctggcaatcattaaagtgcatagatttctatcttaaaaaaaaaaaaa

SEQ ID NO: 221974 - DNA, 1000 bp, Homo Sapiens
acgttcatccactctcatatttattttttcggtgcctgcatgtttgaagactgaagcaggctaaaagctcttgatgaaatttgagggtgctgaagatgttcccactaatttccagccatcacctttggtggggtgggcttcggaggacagtctgtctgaacctgccagtgctgaccctgcagcactttcagcatatgcacatcaaagttggagaccgcgctgaacttaggagggccttcacacagactgatgtggctaccttctcagaattaacaggggatgttaatcctttgcatttgaatgaagactttgcaaaacacaccaagtttggaaatacaattgtacatggagttttgatcaacggacttatctcagctctcctaggaactaaaatgccagggccaggctgtgtatttctttcccaggaaattagctttccagcccctttatatattggagaagttgttttagcttctgcagaagtgaaaaagctgaagcggttcattgctattattgcagtgtcatgttctgtaatagaaagtaaaaagactgttatggaaggctgggttaaagttatggttccagaagcttccaaatcctgaaatagatgttttaaagatgcaacctcaaacaccaatgctgttgttaaagagcctatggggaattgctgctctttaccaaagaatggttgataggcccagaagcccatgttagttaggggaagggagcaggaagagggttgttcaaatgcccactttccagtttggccttatgctttatgcagacttgagtgtatgcaggatttcattatctgcctgggtttttttgtttgttttttgttttttaattcaagaagtaggctgggcccggtggctcatgcctgtaatcctggcactttgggaggctgcggcaggcggatcacttgaggtcaggagtccaagaccagcctggccaacatggtgaaaccccatctctaccaaaaaaaaaaaaaaaaaaaaaa

SEQ ID NO: 221975 - DNA, 1000 bp, Homo Sapiens
cctgctctcccacccaagtgcccccactgagcaggccaacatgctgttgtggccacatatactgggctgatccaggctggttatcaccaaacagcaaaccatagggaacagctgctttgccatagacccaatacccatgtagatctctcatgagagcagccataactcagacccactgaccaacagggccatgagtgacagccagaaccagtgaaggtccaagtaggacacagagcagggcttttcttaccatacacattatctccagaggttatttctaccccactccctattcaaggcctgttggagcacactgcaaaagcaaaagcacagtaactcaatttacacatgattataatcatttccagtgcacacatttcatcaccaggtggatcctgagctagcccatgtaaatccgggttaacccatattggtaatcatactcaaaagcacttttcaccctacattctactagccaatcaaagacaaagagttgtggcctctaccattgccttggcttctggacaccctcacaagctatcccaaggttcccgctcaactccagggaggctgacatcttcacatccactgggcatataatattgcatgagaccaaagtctccacactctttgcagcctcctccatgaatcccaatggcctgcacttgtacagtttgggtgtttgatagataaagcacgtatgagaagagaaaacaaaataaatcaactttttaaaaaagccagcactgtgctgtcaatgttttttttttcttttcaattctagctcagaaaagcagaaggtaaataatgtcaggtcaatgaatatcagatatattttttgactgtacattacagtgaagtgtaatctttttacacctgcaagtccatcttatttattcttgtaaatgttccctgacaatgtttgtaatatggctgtgttaaaaaatctatacaataaagctgtgaccctgagattcatgttttcctaagataaaaaaaa

SEQ ID NO: 221976 - DNA, 1000 bp, Homo Sapiens
ctaccgtctcttcctcaccggatgggacagcaatattgttggtcatgcagcattaaactttgacaaggccactgacatcgtgacaggtctgaaacagaaaacctcctttgggagaccaatgtgggacaatgagttttctacaatagctacctcccaccccaagtctgtagtgggagttttcttatgtggccctcggactttggcaaagagcctgcgcaaatgctgtcaccgatattccagtctggatcctagaaaggttcaattctacttcaacaaagaaaatttttgagttataggaataaggacggtaatctgcattttgtctctttgtatcttcagtaattgagttataggaataaggacggtaatctgcattttgtctctttgtatcttcagtaatttacttggtctcgtcaggtttgagcagtcactttaggataagaatgtgcctctcaagccttgactccctggtattctttttttgattgcattcaacttcgttacttgagcttcagcaacttaagaacttctgaagttcttaaagttctgaagttcttaaagcccatggatcctttctcagaaaaataactgtaaatctttctggacagccatgactgtagcaaggcttgatagcagaggtttggtggttcagagttatacaactaatcccaggtgattttatcaattccagtgttaccatctcctgagttttggtttgtaatcttttgtccctcccacccccacagaagatttcctaagtagggtgactttttaaataaaaatttattgaataattaatgataaaacataataataaacataaataataaacaaaattaccgagaaccccatccccatataacaccaacagtgtacatgtttactgtcacttttgatatggtcttatccagtgtgaacagcaatttattatttttgctcatcaaaaaataaaggattttttttcacttgaaaaaaaaaaaaaaaaaaaaaaaaaaaaaaa

SEQ ID NO: 221977 - DNA, 1000 bp, Homo Sapiens
ctcctcctcctcctcttctgcctcgaggacctccagctcccgctccagctctcgctccagctcccgctctcgccgtggtgggggctactaccgttccggccgccacgcccgctcccggtcccgctcctggtcccgctcccgctcccgctcccggcgctattcccggtcccgtagccgtggccggcggcactcaggtgggggctcccgagacggacaccggtactcccgctcgcccgcccggcgtggtggttacgggccccggcgcagaagcaggagccgctcccactcaggggaccgctacaggcggggcggccggggcctcaggcaccacagcagtagccgcagccgcagcagctggtccctcagcccgtcccgcagtcgcagcctgactcgcagccgcagccatagccccagccccagccagagccgcagccgcagccgcagccgcagccagagcccctcgccatcacccgcaagagagaagctgaccaggccggccgcgtcccctgctgtgggcgagaagctgaaaaagaccgaacctgccgctggtaaagagacaggagctgccaaacccaagctgacgcctcaggagaagctgaaactgaggatgcagaaggcgctgaacaggcagttcaaggcggataagaaggcggcacaagaaaagatgatccagcaggagcatgagcggcaggagcgggaagacgagcttcgagccatggcccgcaagatccgcatgaaggagcgggaacgccgagagaaggagagagaagagtgggaacgccagtacagccggcagagccgctcaccctccccccgatacagtcgagaatacagctcttctcgaaggcgctcaaggtcccgatcccgaagcccccattaccgacattaggcagaagagtggggggtggggaggacaagggggtgggtaaggggctcaagctgtgatgctgctggttttatctctagtgaaataaagtcaaaagttatttaattcccgtca

SEQ ID NO: 221978 - DNA, 1000 bp, Homo Sapiens
ctggctggacgtccacaacttccccggcacgtcccggcgcctctcagctctgggctgtcagagtggttatgtccgtgtcgcccacgtggaccagcggagtcgagaggttctgcagatgtggtcggtcctgcaggacggtcccatctcccgagtgattgtgttcagcctctcggccgccaaggagaccaaggacaggccactacaagatgagtacagcgtgctcgtggccagcatgttggagccagcagtggtgtatcgggacctgctgaaccggggtcttgaagaccagcttctcctgcccggcagtgaccagtttgacagcgtcctctgcagcctggtcaccgatgtggatttggatgggcggccagaagtcctggtggccacctatggacaggaactgctgtgttataagtaccggggcccagagtcggggcttcctgaggcccagcacgggttccatctgctgtggcagcggagcttctccagtcccctgctggccatggctcacgtggacctgaccggggatgggctgcaggagcttgccgtggtctccctgaagggcgtgcacatcctgcagcacagcctgattcaggcctcagagctggtcttgacccggcttcgaacatcaagtggagcagaggagacgtcggcctacaggggttggaggacggggcaggtgcagggcctgctgagaatgcagcctcttaagcacccatgcacccactcttcccagacctggggcgactcatggcgtgctcacctccagccgctggtggggggtgtcctgaaggacaggatgctctccccagacctccccagggtggtgaagctgtgccctggggccccagctaacccactcctctctctgtacgtcaatgtccctatttgaaagcagggatgatcccattccaccctgtccactctggatgagaattggccacctgatggttatttatacgtccagaagaacatccccaaaaaaaaaaaaaaaaccgaattc

SEQ ID NO: 221979 - DNA, 1000 bp, Homo Sapiens; identical to SEQ ID NO: 115445

SEQ ID NO: 221980 - DNA, 834 bp, Homo Sapiens
cgcctccgaggcagtgtgtttccgcccagagctggagtctcccagctgccagccgaccccgaacccgcactcccgccaaccgcgctttttgtgggcggtcggaaaccacagcctccgttggatatgttcggtgcatgttataaacaaccacttaaaccctccggatctgagcctcccgcagaggaatgcagaatgacgccacggcacgcaggatgtgatgtcaccgagatgcagaggatactcagtcaaccaacatttactgagcatctacttcgtgccgtcttgtcaacggaaaggggtccctatccagaccccaagagagcattcttggatctcttgcaagaaagaatttgaggcgaatccatagagtaagcaaggcaagttacttctatatagaagggtgcacccttacagatcaaacaatgcttagtgatgtgtgtcagacctctgagcccaagcaaagccatcatatcccctgtgacctgcatgtatacatccagatggcctgaagcaagtgaagaatcacaaaagaagtgaaaagggccggttcctgccttaactgatgacattccaccattgtgatttgttcctgccccaccttaactgagcgattaacctgtgaacttccttctcctggctcagaagcttccccactgagcaccttgtgacccccgcccctgcctgccatagaacaaccccctttgattgtaattttcctttacctacccaaatcctataaaacggccccacccctatctcccttcgctgacactctctttggactcagcctgcctgcacctaggtgattaaaaagctttattgtcacgcaaaaaa

SEQ ID NO: 221981 - DNA, 1000 bp, Homo Sapiens
atctatcgatgcctatgacaactttgacaacatcagcctggctcagcagctggagaagcatcagctgatggagttcaggtgcattgcggcctatctgtacaagggcaataactggtgggcccagagcgtggagctctgcaagaaggatcatctctacaaggatgccatgcagcatgctgcagagtcgcgggatgctgagctggcccagaagttgctgcagtggttcctggaggaaggcaagagggagtgcttcgcagcttgtctcttcacctgctatgacctgcttcgcccagacatggtgcttgagctggcctggaggcacaacctcgtggacttggccatgccctacttcatccaggtgatgagggagtacctgagcaaggtggacaaactggatgccttggagagtctgccgccaagcaagaggagcatgtgacagagcctgcccctctcgtgtttgattttgatgggcatgaatgagacccagctgattgcactaagccctgccgtgggcccagcccctgccagcttcccctatggatatgcctctgctcccaacttcgccagcctccagtgtacaacttccgcgtgtagtgggcgttgtcaccacccaccctacctgcagagttactaacttctccaaggagcatgtcactccagcagcacaggggacgcaatgggaggcagggacacctggacaatatttatttttgctgaaacccaatgacggcaacctctgagccatcccagagcctggggaggccagggtagaggctgacggcgcaagaccagctttagccgacaacagagactggactgtgggccctcctgctggagccaggccttcctcctgggcgcctccgactggctggagctgccccctccaggccagtttgaagactacatgaacacgtcttgtttggaggtaccggacctcataaaaggactctcagcctcttggcaatcataaatattaaagtcggtttatccaggcaaaaaa

SEQ ID NO: 221982 - DNA, 368 bp, Homo Sapiens
cgcctttgcctccaaggctttgctggcttgtgcggcatcctgctccgtctgcaggttgtgcttccggtgcggaggtcagggacaagatggtgccaccggtgcaggtctctccgctcatcaagctcggccgctactccgccctgttcctcggtgtggcctacggagccacgcgctacaattacctaaaacctcgggcagaagaggagaggaggatagcagcagaagagaagaagaagcaggatgaactgaaacggattgccagagaattggcagaagatgacagcatattaaagtgagtgaccctgcgacccactctttggaccagcagcggatgaataaagcttcctgtgttgtgtgataaaaaaaaa

SEQ ID NO: 221983 - DNA, 1000 bp, Homo Sapiens
ttgcggctgcagaggacttccccaaattttgccacattaacagctgactgcacacctgagccccgaggtgaagcagggcctcaggtagccagggaactggttgagcagaggaaatcggagagacctttttttttgtcatgaacaggctcagtgtgaatgggggaacttcctggttctgagggaatgtgggaaaattgccctttaggctgggtgaagaagaaagcaagtggaaccctggcacccctggacttcctcctccagaggaagcggctttggttgtgggccagcgagcctgtgcgtccccagccccagggcattcaccgcttcagagaagcaaggcgacagttctgccggatgagaggatccaggctgactggaggaaggaagggctttggctcatctgggctcaggtttgggagagatggcttctcagaggaggtgatgcctcagccagtcttaaaggcaatgcggtgtgcagagggtgcttggtggttctctcctgatggccccgcagggtctgcagcctccatctggccagcagaaggcgcagaaagactgcctgggcagctcggacgtgaccgcctggaagtggtgtacagcgttcctgacaacgttcccggccaaaacgggtcccgccgcccacttgtgtgcaagataactggaaaatgtctttctgtgtgctccgaggagaatgcaaaggctggtggatgtagtgcctttcctctactgctctctcagctgggggcaagaatgacaggacgtgaacatgcacacaagggcccggaactcacgacccccgacagcggtctcccccgcccccccaaccccgcgcttgcaggatttagggcactagcacagcacagtccaccccttgggactagcaccccctccgcagttctgctctctgcagcaacatagagtacaaatattgttccttttgtttcttttttccctttggatacatttttaattacaaaaatagagcttgattgttgcacct

SEQ ID NO: 221984 - DNA, 1000 bp, Homo Sapiens
tgcattattatctaggtgccatcactggataatgtggagtgactagagaagtcacatatcactgtaaggtacagttagggtaacactttagaggtttattatttttaaaaaacttttcttgaactcctggccaacatggtgaaaccccgtctctactaaaaataccaaaattagccaggcgtgatggtgggcgcctgtaatctcagctacttgggaggctgaagcaggagaactgcctgaacccaggaggcagaggttgcggtgagtcgagatcgtgctactactgcctgggtggcaagggtgagactccatctcaaaaaagaaacaaaaaaacccaaaaagttttctttactgttggttaaaaaaaaaagccagaccatagtttgactggtggcatggaatttgtgtatcaaataaatgcatttgcttatttgacaaaccatcagtgtccactatttgttaccagagttgggccactatcttttaaaattgctggtgaaaacttgccactagatggcagtgcctgtatagatggggaaaaaattgccaccattcttggtataatacagtgtagcttagatgaggtggtgaaataggggtatcagccgaatattcctaatatagtttctcttgaattaataaactgaagatttgtaggaaaatgagtgagcaaaatttgtttactgttgtgaatttttcctacagcactgtttttaatcttgatgttttccaactttctgtactaatagatacatttctgtgcataagattataaagcatatactcacagttcagtagttttcgttaaggatttactgtgtgagtactttactgtgaggaattgcagaaccttttcccctctactcttgtctaaaagttctgtgtggcacacagagatgcgacctactcaatctgacttagtaaaaccatgctgtagaatttttgtcttaaaaagaccacatacccagcacccatgaaataaaagattcatctgtaaaaa

SEQ ID NO: 221985 - DNA, 998 bp, Homo Sapiens
gggaacggggcggagcgcggctgcgccggcgcgtcgaggggagaggcagcagccgcgatggacgtgttcctcatgatccggcgccacaagaccaccatcttcacggacgccaaggagtccagcacggtgttcgaactgaagcgcatcgtcgagggcatcctcaagcggcctcctgacgagcagcggctgtacaaggatgaccaactcttggatgatggcaagacactgggcgagtgtggcttcaccagtcaaacagcacggccacaggccccagccacagtggggctggccttccgggcagatgacacctttgaggccctgtgcatcgagccgttttccagcccgccagagctgcccgatgtgatgaagccccaggactcgggaagcagtgccaatgaacaagccgtgcagtgaggacccccaagaggcccatttcccccaataaaagagatttgggagtctgcctggttgctgcctctttttcccgcccctccctgggatgggtcccactccctgtgggctccttttggggcttgtgcttggcagttcctgtgctgtcctgtctcccagatcctgagaccctggctgagaacttggcccagcctgctgcttaaaggcaccatggggacctgggttgccctgagacccaagccattgttagcagctagccagccacaccaaccacgccagggggaggaaagggaaggactgggagagacacaaagaccagagccagcctcagggacaagagattccagttttaggcctttctccttctaagtgccccccacccccatagcctgcatgtccactcccagacgatggccaagagcagaaacacaagctggagccagtgtcctggtttgacagcatgttcaacgagggaaccccaagacggacccacacaggtccacccacgctgggggctgtaatcacggagggaagtggctgcccccttaacacacctttaataaacagtctacagacccaaaaaaaaa

SEQ ID NO: 221986 - DNA, 1000 bp, Homo Sapiens
acagacccatctacctgcagggaatctgatgccagcatggatagtgatgccagcatggatagtgagccaacaccacatctaaagacacggcagcgtagaaagattcactcgggctctgtcacagccctccatgtgctacctgagttgctggtgacagcttcgaaggacagagatgttaagctatgggagagacccagtatgcagctgctgggcctgttccgatgcgaagggtcagtgagctgcctggaaccttggctgggcgctaactccaccctgcagcttgccgtgggagacgtgcagggcaatgtgtactttctgaattgggaatgaagatgtgccactcgggaataatgataccccttgtgctagagatgcaaagcctgaagacactggtagcttttaataattataaaattaataatttcttgataattataaaaatgaagtgtcaaaaaatctcaagtgtaggcctgcctgtgttctcatgtggatttagaacaggaggatattctatgtgtatgtatatgtacattctaatgtgtgtctcttcttattcaacattaatccttactagaaccacaagaaagtgaatgaaatctttagtaggtactcttttgaaactaggttttagaattcttgcatcactcgcgggccctaggaccctaggatgccattcttgccaggaggaggaatgagagtgatgttggccaacattcaatttgaacagagcatggaagacctttcagttcatcgggaaagaatgagggagggagaataagtcagtcatgcatcagggcatttagaaagagctatgtttctgtcacagagacagcccttttctcagaactacccagaggaggccgggcatggtggctcacgcttgtaatcccagcactttgggaggccgaggtgggcagatcacgaggtcaggagatcaagaccatcctggctaacatagtgaaaccctgtctctactaaaaaatacaaaaagttagccagg

SEQ ID NO: 221987 - DNA, 1000 bp, Homo Sapiens
gatgggatgcctattgctacaacccacacgcaaaggagtgtggtggcgtctttacagatccaaagcaaatttttaaatctccaggcttcccaaatgagtacgaagataaccaaatctgctactggcacattagactcaagtatggtcagcgtattcacctgagttttttagattttgaccttgaagatgacccaggttgcttggctgattatgttgaaatatatgacagttacgatgatgtccatggctttgtgggaagatactgtggagatgagcttccagatgacatcatcagtacaggaaatgtcatgaccttgaagtttctaagtgatgcttcagtgacagctggaggtttccaaatcaaatatgttgcaatggatcctgtatccaaatccagtcaaggaaaaaatacaagtactacttctactggaaataaaaactttttagctggaagatttagccacttataaaaaaaaaaaaaaggatgatcaaaacacacagtgtttatgttggaatcttttggaactcctttgatctcactgttattattaacatttatttattatttttctaaatgtgaaagcaatacataatttagggaaaattggaaaatataggaaactttaaacgagaaaatgaaacctctcataatcccactgcatagaaataacaagcgttaacattttcatatttttttctttcagtcatttttctatttgtggtatatgtatatatgtacctatatgtatttgcatttgaaattttggaatcctgctctatgtacagttttgtattatactttttaaatcttgaactttataaacattttctgaaatcattgattattctacaaaaacatgattttaaacagctgtaaaatattctatgatatgaatgttttatgcattatttaagcctgtctctattgttggaatttcaggtcattttcataaatattgttgcaataaatatccttgaacacaaaaaaaaaaaaaaaaaa

SEQ ID NO: 221988 - DNA, 1000 bp, Homo Sapiens
gacaagatcaacaactggatcgtgcagctctccaagataatcccagactgctctatggagagcaccaagtctggccagagtaaaggtgggattctatccaaagcttgtgattatatccaggagcttcggcagagtaaccaccgcttgtctgaagaactgcagggacttgaccaactgcagctggacaatgacgtgcttcgacaacaggtggaagatcttaaaaacaagaatctgctgcttcgagctcagttgcggcaccacggattagaggtcgtcatcaagaatgacagcaactaactatggggattcaggggctttgggcccaagaactgcagatagcccaggagcaacagcctaatcccgtgcccctttccttcactgccccacttctggcatgggacagggggaagttcagaaggtgtgtccttgaactgaggccctgtgatatggcggcctgcagtggtgtgaaacacacaatgtggacgtgcactgacagccttgcccacccccaccatgcagcccctgggcccttgtgctcctctcgcacaatgcatgtgctgtctccatgctggatactggacacactaaactctggggcttgtcctgtgcttgcttagagtgcccagcagaggtttgctgacaggtgatgctctggcttgccccaggactctggcacttccattggttcttcctttccctggagctgaggtttagatgtgcaacctgtggctcaggggagcaagcttacacaagaagtgagggaaggatgtttagcagtggctggtgcccatgaagaggagattggccagtgagaagctgaggcctatgcagacatctctggagccagagagaacaacaggcaggggcccacttggggccttcccccttgtgggggtcgttttttttttttcttttcttttttttttttttttttttttttttttaagataaaattgttcaaagccaaaaaaaaaaaaaaaaaaaaaaaaaaaaaaaaaaa

SEQ ID NO: 221989 - DNA, 1000 bp, Homo Sapiens
ccagaaatcaacactaagcgtgcatcagagaatccatacaggagagaaaccgtacgtttgtcctgaatgcgggaaggcctttatccagaaatcgcacttcattgcgcatcatagaatccatactggagagaagccttatgaatgcagcgactgtgggaaatgcttcactaagaagtcacaactccgtgtgcatcagaaaatccacacaggtgagaagcccaatatatgtgctgaatgtggaaaggccttcactgaccgatcaaatctcataacacatcagaaaatccacactagggagaaaccctatgaatgtggtgactgcgggaaaaccttcacctggaagtcacgcctcaatatacatcagaagtctcatactggagaaagacactatgaatgtagtaaatgtgggaaagctttcatccagaaagccacactaagtatgcatcagataattcatacaggaaagaaaccttatgcttgtacagaatgtcagaaggcctttactgacagatcgaatctcattaaacaccagaaaatgcatagtggagaaaaacgctataaagccagtgactgagaaagtcttcacctggaaatcacaactgggtatgcatcaggtatctaatagcagggaggaggaaggcctgttgctgcaatcattgtacagggggaaatgggtatgagagactgaggcttgagtgaactgaaggcaaacagagccaagtatccttcagtccactggaaagacaagttcctgcatcaccacagtgtatatgcaattctatgcataggaagagcctttagagaaagcatttgagcgaaagtcatgtttggtgacatgattcatacagacctcttgagctcctggaaatagtagaattaagacctgaggagatgactcgtcatctcttatgcttcactttttggataaagaactttttaaattcagtactgattggttcagcatatcctgggacataaaaatactcactactgggaaaaa

SEQ ID NO: 221990 - DNA, 1000 bp, Homo Sapiens
gtacttgggccctcttaagggagctcagagagaattactaaattagggacagtttcaatagttatcattctgtctacatgaacaatcaagaccaggactcagggaactttactctgtaacagaaagagaggattcagtgtttgccctgggagaattgtcccattcttgttgcttctctcctgagtacccactaccacaatgtcttctgtcaaggaattacaagtagcaagggaaggtctgaatgtaaggacaggcctagggaccttgcaagcacttgatatctctcctcttgctgactttgtcaacatagacatatagtgaaatgatgagggaggcagtcttggccctcatccaggtatctggtttttttttgtagaaagcacagataagtggtaaatggtctttttctgactttcattatgtggactggatggaggctttcaaactggtgccatactgctgcaggacctaaagggagccccatctttatggctgatcaactacaaccctatatgcctgaatactctgcaagaaggcctggagattttgcaaaactgatttattgagaatggcaaggagagccttgtgaacttttagctttggtgcacagctgataccaggagggaacatcctgaagtgtcagagaaaagtaaggcatatggctcacagtgatgatgccagtcagagccaggccagatggaaattgttttctgatgttactggttttcttttccctattagccaaagtgactatctcttaagagaagataatgtgacgtcaagggaagttggaaggcatggatttatatctatgtcagatcctggtttataatgttggccaaggcttatttatatatgtttatttagtattccataaaattgtacttcgtaatgaaaatgacacattttatcttaaatttagacaataaacaaaactttgttaccaaatcactcaaaaaaaaaaaaaaaaaaaaaaaaaaaaaaaaaaaaaaaaaaaaaa

SEQ ID NO: 221991 - DNA, 1000 bp, Homo Sapiens
agctctgcaccatcctcgctgtttcccaaggcaggtggtgtgttgggggccccttcagacccaaagctttaggcatgattccaactggctgcatataggagtcagttagaatcgtttctttctctccccgtttctctccccatcttggctgctgtcctgcctctgaccagtggccgccccccacgttgttgaatgtccagaaattgctaagaacagtgccttttacaaatgcagtttatccctggttctgaggagcaagtgcagggtggaggtggcacctgcatcacctcctcctcttgcagtggaaactttgtgcaaagaatagatagttctgcctctttttttttttttcctgtgtgtgtggcctttgcatcatttatcttgtggaaaagaagattcaggccctgagaggtctcagctcttggaggagggctaaggctttagcattgtgaagcgctgcacccccaccaaccttaccctcaccggggaaccctcactagcaggactggtggtggagtctcacctggggcctagagtggaagtgggggtgggttaacctcacacaagcacagatcccagactttgccagaggcaaacagccttccaattgcccctccacccccagctgaggcccggtcacctggtcaggacagagcaactgcatctaaaagcacaagaagacagaaacctgtaagctctgaccccacccccaccccttgagaggtcagcggaccacctccttagggacagaccctggcaggtcgctgcccaccgagatttcctcaagtgtgcatagatctgagaggagtcgggagtcgagactcgagattccatcatagcgtaggtgtgtggggttgggagccccctgatgggcttgtctgtgtttgcaccttgtcctgtgtctgaggtcctgtgactgtaccctcctttgccctgggacatctgtatctcttggctttgtaataaatgctgcatactttctaaaaaaaaaaaaaaaaaa

SEQ ID NO: 221992 - DNA, 1000 bp, Homo Sapiens; identical to SEQ ID NO: 116762

SEQ ID NO: 221993 - DNA, 1000 bp, Homo Sapiens
gcattgagaaaagcctttctgtaaagaatggtacaagacaggttgttactcgattatttatagtaaaatatgtgggaaattatatcaatgataaccctgtttattgtgggatatcaatatttttaaagtgccaacacagtcatgataggacaatattttatgtgtgtgtgtgcgccttatgtatataagcatatatataatatataagcatattattatatacaggttgagtatcccttctccaaaatgcctgggatcagaagcattttggatttcagatacttacagattttggaatatttgcattatatttattggttgagcatccctaatctgaaaatccaagattaaatgctccaattagcatttcctttgagcgtcatgttagagttcaaaaagtttcagattttgggttttcagattaggaatacccaacctgtatgtacgtatatttctgtatctatgtatgtatatatatgcatatgcagacatatgtatatggtctggtcagcatatgtgtatgtatgcgtatgtatgtatgtatgtatgccctcagtgcagtggggtttgctgcagaattcactgcatagcaggagatgtaagcagatgagttattttttaagagaatctaatctaattgtttttataaaaattattccctattgaatatttatataatgaggttgtatcaacaatgattaactcctttattatacatacacatgaatgtgcatttttggtaaatgcataaatgagattctataatgtttactgatctttatattacagattttctcttcttttaggattagctcagcttgccccccctttccatctccaccatctatagtgagcctctccataattagtgccaaccattagtctcgttcatatttttacaccaggagtcaacaaactgtggccattggccaaatatggcctcccaactgtttttttaaaataaagttttattggaacacagccatgttcatttggaaaa

SEQ ID NO: 221994 - DNA, 1000 bp, Homo Sapiens
ctcacacctcagtgaacacaggaggattcacaccggagagaaaccctaccaatgtgaagaatgtgggaaggtcttcagaacttgctcaagcctttctaaccataagagaactcattctgaagaaaaaccctacacgtgtgaagaatgtggcaacatctttaagcagttatcagacctcactaagcataagaaaacccatactggagagaagccctacaaatgtgacgaatgtggaaaaaactttacccagtcctccaaccttattgtacataagagaattcatactggagagaaaccctacaagtgtgaagaatgtggcagagccttcatgtggttctcagacattaccaaacataagcaaacccatactggagagaaaccctacaaatgtgacgaatgtggcaaaaactttacccagtcctcaaaccttattgtacataagagaattcatactggagagaaaccctacaagtgtgaaaagtgtggcaaagccttcacccagttctcacacctgactgtacatgaaagcattcatacttgagaaaaaaataaacaaatataaaaataggcaaagccgttagtatctgctcgcatcccactttacatcagagttcagacttaataaagttatcataaatgtaattactattgaaagacctttcatgaaatataagtctccagagcacacaagagtatttcttctgaaaaaaatgttacaattatactagatggaagacttgcatcagttgcttaaactttcagaaaatttgtagagaaacccaacaaatctcataaatgtggaataacatttgttcaaaaatgatagcttagaaaacactagagttcatactaaaagatattttgcaaatacactaaatggaaaaataagcaaaatccaatttaagtaaacaatggaggatttgaaggagaaaggaatagagcacggacacgttcagaaatgacactgaatccctgtgttgagtctacagagacatctaga

SEQ ID NO: 221995 - DNA, 765 bp, Homo Sapiens
aggctgggggagaagttaaagccagaggaggggcaggaatgtctgaggtggcaacacttctcttcagccagacagcactggccagtttggagtctgtccatcctgcaggccacaagctctggatgaggaacttgaggcaagtcaccagcccctgatcatttcgcctaaaagagcaaggactagagttcctgacctccaggccagtccctgatccctgacctaatgttatcgcggaatgatgatatatgtatctacgggggcctggggctgggcgggctcctgcttctggcagtggtccttctgtccgcctgcctgtgttggctgcatcgaagagtaaagaggctggagaggagctggcccagggctcctcagagcaggaactccactatgcatctctgcagaggctgccagtgcccagcagtgagggacctgacctcaggggcagagacaagagaggcaccaaggaggatccaagagctgactatgcctgcattgctgagaacaaacccacctgagcaccccagacaccttcctcaacccaggcgggtggacagggtccccctgtggtccagccagtaaaaaccatggtccccccacttctgtgtctcagtcctctcagtccatctcgagcctccgttcaaattgatcatcatcaaaacttatgtggctttttgacctttgaatagggaattttttaaattttttaaaaattaaaataaaaaaaacacatggctcacccttccacccaaaaaaaaaaaaaaaaaa

SEQ ID NO: 221996 - DNA, 1000 bp, Homo Sapiens
ccctgcccacccagccaccatccccattccatcacctggacttcagccacagcctgagctttgggggcagggaggacgagggtcccccgggctaccccgaacccctggcgccggggcatggctccccattccccagcctgtccaagaaggatctggacctcatgctcctggacgactcactgctaccgctggcctctgatccacttctgtccaccatgtcccccgaggcctccaaggccagcagccgccggagcagcttcagcatggaggagggcgatgtgctgtgaccctggctgcccctgtgccagggaacaggggccggcctgggggctgggagggccaggggcacctccctcccacccttcaggctgcactgtgtgtgaagtagccacctgccctgcctccctcctccccgttggcccctgtttggacttagtgcctgtctggcagcctgtggggtcaggagaagcacccccagggcagccctcttgactggcgcagtgggaagaggccttcagcccctctcccggagatggaatcgcggggcagggaggggcagggtgttctagaggtgagaagagggcctggtggagattccctgtcttctgagcccgagcccctcattaccagtgaaggacatgcttgaggggttcgggaagctcctcatctgaggcaactggtcctgggggtgctcaggcctgcctttttgggactcagatggcaggaggtccaccccgcagcctggtcctcggctctcccacaggtgggcaccccccactttggtgctaatagctctccaccaggtggtgtgagcgcgggggctgccagaagcgggaggggtcactgccggaagagcagctgccctccgacccctcactttgtgcctttagtaaacactgtgctttgtaaaaaaaaaaaaaaaaaaaaaaaaaaaaaaaaaaaaaaaaaaaaaaaaaaaaaaaaaaaaaaaaaaaaaaaaaaaaaaaaaaaaaaaaaaaaa

SEQ ID NO: 221997 - DNA, 1000 bp, Homo Sapiens
gagagatcgacaaggcggagggcaagttctggacacactggaaccgggagaccaagcagttcttcctccagttccactttaagatggagaagcccccggctccacccagcctccctgctggcccccctggggtgaagcggcctccacccccgctgatgaacggtctgccccctcggccaccgctgcctgagtctttgccaccgcccccgccaggaggcctgcctctgccacccatgccccccacagggcctgcgccctcagggcccccgggaccaccccagctacccccgccagctccaggggtccaccccccggccccagtggtgcatccccctgcatctggggtccatcccccagctcctggcgtccaccccccagctcctggcgtccatcccccagcccctggggtccacccaccaacctctggggtccaccccccagctcctggagtccaccctccagcccccggggttcacccaccagcccccggagtccacccaccagcccctggggttcacccaccagccccaggggtccatcctcccccatcagcgggggttcacccccaggccccgggggtgcacccagcagcccccgccgttcaccctcaggccccaggggtgcacccaccagccccagggatgcaccctcaggccccgggggtccacccccaacctcccggggtccatccgtcggctcctggggtccaccctcagcctccgggagttcacccctcaaatcctggggtgcaccccccaactcccatgcccccaatgctgaggcccccacttccctccgaaggcccagggaacatacctccccctcccccaaccaactgagaagctgctccctcccccagcaagcccagcgccaggtgctcttgccttttcccactgagagaaggctgctcttttgtactgccccccgctcattaaacagcctcccccagccctgagtgcactgatgtccgcaaaaaaaaaaaaaaaaaaaaaaaaaaaaa

SEQ ID NO: 221998 - DNA, 1000 bp, Homo Sapiens
ccacctcaggcataggcctgcaaacccagggaaagcaggatgggtgagggggtttagtccctgcctcaccttggggatggaccttcagctgaaaccatatggccccctaggtgcacagccttgattcttccctggagcctacagagcaggcaggctaggccaagccaggctcaacttctgggctcccagtgcccattggctgtgtatgacgggaggcagcagtgagaggccttcctagttagggccaacagctgataccaagcctctgaaatccagcaaggaggtctgcctcccaccagaccctctccagtgtacttccccagataggaccagaggatgtctagttctaggctgagctggcaggcagctattaccccggttctttccccaccccaggtctgtctcttgccttttcttggggcatataagctactgagtggaacatggagctgatcaagaggccgtaatggtcatggctgtttccagacctgaatattgggtgcttcttgccagtattctaagacatttgagtaattgctgtttgcacttactgcatggtcagaccacgtcactacatttctatgcaaggggacagcaaggcagcgtggtggtcatggctcttagctaacctattcaaagaccttttcctgttgattaatctattttcatatttataaaggagtcttaatgttctgccccataagactttcaaccttgtggttgggagtggggctggttttgtaggccctagggcctgcttctatgtatttatcaacatgtgatacattcaattggttaaatggtttatacagggactgatttgcttcccttcctgccatggctggagctttgggaacagtctgtccttacagagctgcaataagaaataaccaaagatgaagctggtcaaatattttcataacttgcttctgttgattttttttttgtaaaactttcccaagacattttcagacttaaaaataaagtcagtgttacaggt

SEQ ID NO: 221999 - DNA, 1000 bp, Homo Sapiens
aacagcaacacgggaacagtggcaggaattctgaaagtgaatctaacaaagtggcagctgaaacacagtctccttccctttttggctcaacaaaattacagcaagagtcaacgtttttgtttcatggcaacaaaactgaagatacacctgacaagaagatggaggtggcatctgaaaagaaaacggacccatcatcactaggagcgacaagtgcctcatttaatttcggcaagaaagttgatagctctgttttgggctcattaagctctgtccccctgactggattttctttctcccctggaaactccagtttatttggcaaagatactacccagagtaaaccagtctcttcaccatttcccactaaaccattggagggccaagcagaaggtgacagtggtgaatgcaaaggtggagatgaagaagagaatgatgagccacccaaagtagtagttaccgaagtaaaagaagaagatgctttttactccaaaaagtgtaaactgttttacaagaaagacaatgagtttaaagagaaaggcataggtactctgcatttaaaacctacagcaaatcagaagacacagcttttggtgcgggcagacaccaatttaggcaacatattgctgaacgttctgattccacccaatatgccatgtacgcgaacagggaagaataacgttcttatcgtctgtgttccaaatccaccaattgacgagaagaatgccaccatgccagtcaccatgttgattcgggtaaaaaccagcgaggatgcagacgagttgcacaaaattttactggagaaaaaggatgcctgaacacgcaaagtcggctgcagaattattgccaagttgctgctgcttccaccgccccttaaagttagtcagtttttcttctcttctttgacattctaagaacttatagataacttaaaacttttgtgaggaagattaatgtggccaataaaacctttaaatgttaagtgtcaaaaaaaaaaaaaaaa

SEQ ID NO: 222000 - DNA, 1000 bp, Homo Sapiens; identical to SEQ ID NO: 116768

SEQ ID NO: 222001 - DNA, 1000 bp, Homo Sapiens; identical to SEQ ID NO: 116771

SEQ ID NO: 222002 - DNA, 1000 bp, Homo Sapiens; identical to SEQ ID NO: 116772

SEQ ID NO: 222003 - DNA, 1000 bp, Homo Sapiens
gggagacctctgttcaaagcctgtctgcgagcctggctgtggtgcacatggaacctgccatgaacccaacaaatgccaatgtcaagaaggttggcatggaagacactgcaataaaaggtacgaagccagcctcatacatgccctgaggccagcaggcgcccagctcaggcagcacacgccttcacttaaaaaggccgaggagcggcgggatccacctgaatccaattacatctggtgaactccgacatctgaaacgttttaagttacaccaagttcatagcctttgttaacctttcatgtgttgaatgttcaaataatgttcattacacttaagaatactggcctgaattttattagcttcattataaatcactgagctgatatttactcttccttttaagttttctaagtacgtctgtagcatgatggtatagattttcttgtttcagtgctttgggacagattttatattatgtcaattgatcaggttaaaattttcagtgtgtagttggcagatattttcaaaattacaatgcatttatggtgtctgggggcaggggaacatcagaaaggttaaattgggcaaaaatgcgtaagtcacaagaatttggatggtgcagttaatgttgaagttacagcatttcagattttattgtcagatatttagatgtttgttacatttttaaaaattgctcttaatttttaaactctcaatacaatatattttgaccttaccattattccagagattcagtattaaaaaaaaaaaaaattacactgtggtagtggcatttaaacaatataatatattctaaacacaatgaaatagggaatataatgtatgaactttttgcattggcttgaagcaatataatatattgtaaacaaaacacagctcttacctaataaacattttatactgtttgtatgtataaaataaaggtgctgctttagttttcaaaaaaaaaaaaaaaaaaaaaaaaaaaaaaaaaaaaaaaaa

SEQ ID NO: 222004 - DNA, 1000 bp, Homo Sapiens
gttgtgtttttctttcttcttcttctttttttttttttataaaagcaaaagagaaatacataaaaaagtgtttaccctgaaattcaggatgctgtgatacactgaaaggaaaaatgtacttaaagggttttgttttgttttggttttccagcgaagggaagctcctccagtgaagtagcctcttgtgtaactaatttgtggtaaagtagttgattcagccctcagaagaaaacttttgtttagagccctccctaaatatacatctgtgtatttgagttggctttgctacccatttacaaataagaggacagataactgctttgcaaattcaagagcctcccctgggttaacaaatgagccatccccagggcccacccccaggaaggccacagtgctgggcggcatccctgcagaggaaagacaggacccggggcccgcctcacaccccagtggatttggagttgcttaaaatagactccggccttcaccaatagtctctctgcaagacagaaacctccatcaaacctcacatttgtgaactcaaacgatgtgcaatacatttttttctctttccttgaaaataaaaagagaaacaagtattttgctatatataaagacaacaaaagaaatctcctaacaaaagaactaagaggcccagccctcagaaacccttcagtgctacattttgtggctttttaatggaaaccaagccaatgttatagacgtttggactgatttgtggaaaggaggggggaagagggagaaggatcattcaaaagttacccaaagggcttattgactctttctattgttaaacaaatgatttccacaaacagatcaggaagcactaggttggcagagacactttgtctagtgtattctcttcacagtgccaggaaagagtggtttctgcgtgtgtatatttgtaatatatgatatttttcatgctccactattttattaaaaataaaatatgttctttagtttgctgctaaaaaaa

SEQ ID NO: 222005 - DNA, 1000 bp, Homo Sapiens
agcctagaaataaccctgtggatggaattggggcagcggctgctggagatctgtgtgccttgccttccttcagcaggaccgtctaggtgcgcagccacctatggatgcgtcccagccagccccgtcgctctcgtccatcctcagagacaaagaagagggcagggagtttgggcttggttttgaactttcctttcaatgtagcaaagcattcctagttaaccagagccttggaatctactgcctgctggccaggctttaaaatgaaaagtgttttaatgctgccataaaagggaggcgggggggaggaagggaaaataaaggcatctttccaagtactcatctaatttaattgtcaaaagattgataggccatgaattacttctccatctcactaagggttaaaggcgtgcaaccccccactggctgtgtcccctgccaccgaagtgagtgacctgccctacaaccaggtgggaccacctgtgctgcagtccggaggggcttctgcaggaagcactcaccccccacaccttccccggcctgagcttcccctacctttcgtcaccacctgagggcatgagcacaggccatggggcgtgcctggtgagtctgcctgtggttcaggcttagcctgtggtctcctgtgtgctgctgcccgcatgggatgcgcaggggaggcgtggggatccgcaggagggtggttgggatacaccggatacctctgctctcattgcttgtttgcaaatgctctatggacatttgtgtgctaaatcctattaaataaaaaagacgggttaaaacccagatgctgtatattcatttgtaattatgtataaagtgaagcagttttaaactgtaaagatttttttcagtgtgttttctcgaattttgccacaacatactggcttcgtattttatttatctttctttctagttaccagcttcagacccttgtaaagtctccctcagccctttcaaaaaataataaatttcctgtgaagtt

SEQ ID NO: 222006 - DNA, 1000 bp, Homo Sapiens
gaagacaagacttaaagagggggctagccagagagctaagcagagccggagaaacctacccaggcggtcttccttcagattgcagactgaagcccaggaagatgattggtatgactgtcatagggaaatacgtctgagtttttctgatacctatcaggattatgaggagtactggagagcttactacagggcatggcaagaatattatgctgccgcttctcattcatattattggaatgctcagagacatccaagttggatggcagcttatcacatgaataccatttatctacaagaaatgatgcatagtaaccagtgattataggatatacctgagaccatcaggaactgtcaacaaatgatacctttggatatccatcctcctcgacttatagtacagtggtgtatagtggcatttctgataaacttgaaaagacttgagtctttccactgggacacatccatttttcagattgttttgatttaggccaggtatattatcttcatttttaagagtttctttaagaaacttcatcagattgttgaaagataatttttgggacatagagctgaaagtttcagggtgccattttctataagatcttcccaaaagaaacatttaaaaagatgacatataccaccacttacttaaaaacaataaaagcaatagatttgattagtaatattattgctgtggagttctttacaaagggcttaggctgcatttccttctatagaggtgcattcttgtagaaatttgtagcatggtagatcagaaaatcctcttaggttttaggcaggaaggaatatttaaacattgctttagattttcctaaaggtatttgatttgatctgttagcttccagtaaaaatatttgtttttagtaaaaacaaatttaaatatatttacatgtttgttgtttatcttttgaatgtcttttgaggctgtgaaagctgtccacatttttgctgtgtattaaatagctgtgggtcatcaaaa

SEQ ID NO: 222007 - DNA, 1000 bp, Homo Sapiens
acggttgtgtgacaatggtctggatggaaaggattgctgctctccattaggagacaatgaggaaggaggatggattctggttttttttctttctttttttttttgtagttgggagtaagtttgtgaatggaaacaaacttgtttaaacactttatttttaacaagtgtaagaagactataacttttgatgccattgagattcacctcccacaaactgacaaattaaggaggttaaagaagtaatttttttaagccaacaataaaaatataatacaacttgtttctcccccttttccttttaagctatttgtagagtttatgactaaatagtctgtgcaggttcatagaccgaagatactacacactttaaaccaattaaaaagaaccaaaagtaaatagaaaagacattgaatcaccaaggcctgggatcaacctgggctgtccacacagaaaacaaaaacccaaccaaaccaagccctgttgtgctcactggtgcaaagagaagatcagggcagcttaagtggtctaagaatccttcaggcattctttaaggagaaaaaggatacctttgattttgtgtgtttcatgctctggattttttttttttttccttctctgggtttaagagattttttttgaaatagtgaggaactgaccattatatgccttcactggcttcttgtgcaataatatgatgttttaagtgtgcaaacaagttagagctggcagctgaatgatagacaaatagtgcaaatttgccagcttggagatagaaaggaattcaacaatatatcaaatactttccttcccacctttttccttttttttttttttttctgatttgattctggttacagtgccataaaccttgttacatatgtatatcagaatgtaagaaaaaaaaatttatttaaaaatatttttcgcaaaaaaaaaaaaaatcttggtgtgtttctgttgattgtgtaaaaatttattttcattatataaatgaaactgg

SEQ ID NO: 222008 - DNA, 1000 bp, Homo Sapiens
agttgactaaggagttgcggcaagtcaatctccagcagttcatccagcagacagggacaaaagttaccgttttgccagcggagcccattgaaatagaggcctcacatgcagacattgaaagggggatcatcattctttctgataagcaggagtgtaaagattagatatcacaccaaaagctcaggcaagaaaagcaaaaatgaacaagtgggactacattaaacccaaaactcctgcacaacaaaggaaacgatcaccaaaatgaaaaggtggactgtagattgggagaaaatatttgcaaaccgttatctggtaggggtttaatatccaaactatataaggaactcacagaacttaaagaaaacaaataatccaattaaaaatggtcaaaggggctgggcatggtggctcacgcctgtaatctcagcactttgggaggccgaggtgggagaatcacaaggtcaggagactgagaccatcctggctaacaccatgatgggctaacacccatctctactaaaaatacgaaacattagccaggtgtggtggcacgcgcctgtaatcccagctactcgggaggctgaggcagaaggattgcttgaacccgggaggtggaggttgcagtgagccgagatcgcattactgcactccagcctgggtaacagagtgagactccatctcaaaaaaaaaaaaaaaatagatatttttccaaagaagacataaaaacagccaacaggtatatgaaaaagtgctcaacatcactgatcagcagggaaatgcaaatcaaagccacaatgagataccacctcacacctgttaggttacatctgctattgtcaaaaagataagagatagcaagtgtcagcaagggtctggagaaaagggaatttttgtatactgttggtgggaatgtaaatcagtacggctattgtggaaaacagtgtagaggtttctcaaaaaattaaaactatcatacaacccagcaaaaaaaaaaaaaaaa

SEQ ID NO: 222009 - DNA, 1000 bp, Homo Sapiens
gggcagctgagacccgcgcagctgtgcgccgctgccgccgcagccaccctgcagcctgcctggccgcagtgcttgccgtcggcctcctggtgctctgggtcgcgggcggcgcttgcaccttcctgttcagcatcgccgggccggtgcttctgatcctggtgcacgcctcgttgcgcctgcgcaaccttaagaacaagattgagaacaagatcgagagcattggtctcaagcggacgccaatgggcctgctactagaggcactgggacaagagcaggaggctggatcctaggcccctgggatctgtacccaggacctggagaataccaccccacccccagcccataattgggacccagagccctttcccagcacttaaaacaggagcctagagccccctgcccaaacaaaacaggacatctgtgaccgccctacccccacgccagccccaaactaagatatccctcacacccagcccccattacctagggacaagagtcttccccagccttgaacctaggaccaagagccacctacatccagccccaaaactggggcttcaggccagagcatccatggccaatttcaaattgtgaacccagagacactcccatccacccttctccatgctcatccccaaactggggcctggagcaaggcactctcaaatcttgaaccctggaccaaagcttttccagaccccaccctaccttccaacccaggtcaagacattgccaaatcttgaactcagaacccaagtgttccatgcccctgtgtggatggagtcgggtatcctgactgttggacccctggtccaggtgatcccgaccctcaccagtcccatttgcctccctccagctctgcttaggcattttgcccctcaccccaatgttccacaccatcgacaaccaaggggtgaggtggggacaggcctcagcagggaatggggcgtatatgttagtgttgctgcaacaataaagcctgttgcatctctcatgccaa

SEQ ID NO: 222010 - DNA, 1000 bp, Homo Sapiens
tgagaacgtattaaaaacttctgggaaactacgggagaaccttcttcacggtgccttggaacactatgttaattgcctggatctggtaaacaagaggctaccttatggccttgctcagattggagtgtgttttcatcctgtttttgacactaagcagatacgaaatggtgttaaaagtattggtgagaagactgaagcttcgttagtatggtttactcctccgagaacttcaaaccagtggcttgatttctggttacgtcatcgactccagtggtggagaaagtttgccatgagtccatctaacttcagcagcagtgactgtcaggatgaagaaggccggaaaggaaacaaactttactacaattttccctggggaaaggagttaatagaaaccctgtggaacctaggagatcacgaacttttacacatgtatcctggcaatgtgtctaaattacatggccgagatggacgaaaaaatgtggttccttgtgttctctctgtaaatggggacctagaccgaggcatgctggcctacctctatgattctttccagctgacagagaactcctttacaagaaagaaaaatcttcatagaaaggtacttaaacttcacccttgtttagcccctattaaggttgctttggatgtaggaagaggccccacattggaactaagacaggtttgtcaagggctatttaatgagttactagaaaatgggatttctgtgtggcctggttatttggaaactatgcagtcctcattggaacaactttattcgaagtatgatgaaatgagtattctcttcacagttttggttactgaaactactttggagaatggattaatacatctgagaagcagagacaccacaatgaaggaaatgatgcatatatccaaattaaaagactttttgattaagtatatatcatcagctaagaatgtatagatttttatatttgtataataaatattcttctctcctaaaaaaaaaaaaaaaaaa

SEQ ID NO: 222011 - DNA, 1000 bp, Homo Sapiens
gcatttcttaaccaaagttgaattttgaaaagagtcagtccttgtttgctggaattagaatgttaatgtcctagtattattccgaactacagtattaactgcttgttgctagtggattagacagattcttttcttactgtggcttccatgttgggagcagaagcttttcatcctggtcacatgaagacagatggtattattgactggagttgaattatttttatatcttgtctggcacaatatggaaattactgaaataagacggtgtataatggaattaacacccaaaataagtagaacactgaagatttgaatttgatatttaagtaaaatgggactgggtgcagtggctcaggcctgtaatcccaaccctttggaaggtaaagacgggaggatcacttgaggccaggagttcaagaccagcctgggcaacatagtgagaatgcatctctacaaaaaataaaaaaaattagctaggcatagtacctgaggccaggaggtccaggccgcaatgagatgtgtttgtgccattgcacaccagtctgggtgacagagaaagaccctgtctcaaaaacaaattaaataaaatatcttcatatataaattaagctaattaaaaatatttttccctgtatttatttaatattttctaatctgaacccatatacagctgactaattcattcttagaaatgtgttatctgtaatctttcctaaacagagtagcccacaagaatcatgcactttttaaaattatttctaagaagccataacaaagctgtgtactaataaagactgcagcaagcacttgtgttatttaaattatgtaagtagattgtcatttgtcaggctcctgtacatttacatagcatgttatattaataataaatgtaaaatatgactaaagttttcattggaacacaatgtagacaggaggtttattatgagcattttgcagaaaggtgtggagtaagtaaagtgttggatgcactgaacaattc

SEQ ID NO: 222012 - DNA, 1000 bp, Homo Sapiens
tgttctctttcttactgtgaacaaatctgtccgcaagtgcttgatagggaccctggtgcaactacaccaccggtacagtcgccgtaatgtggtcagtacagggagtggcatggctgaggccagcctggaacccagcatacgctcgggtagccagctcctggagatgttccacattgggcagcagcagatctttaagcccacagaggatgaggaagagagtgaggccaagtacattggctcagctgacttccaggccaaggagatatttagcacctgcctggagggagagcaggggccacagtttgcgccctctgccccacccctgagcacagtggactctgtatcccaggtggcaccggcagcccctgtggaacctgaaacattccctgataagtattccctgcagtttggctttgggccttttgagttgcctcctcagtggctctcagagacccgaaacagcaagaagcggctgcttccccccttgggcaacaccccagaagagctgatccagacaaaggtgcccaaggtaggcagggtggagcggaagatgagcagaaacaataaagtgagcatttttccaaaggtggattcctagcaaggattgtaaattcttggaagcaacggggggcttccatattcccaccagagtgtgggaatgctgtggccatgtgattgtatgatctccttgcaactcagtgtgagttgattcctccaatatgggccagatgcttttgaatgatagggaaatctacataaaatccagtgtcctctttattgagggagtatatgtatccatctcagtgatccatgtccttagtgaagtccacattattctctgtggggacaagagctgggcagttttgaatgggtcttgaggtgggtaccccatgtgcactttctgaggatgcctcacttccctgggctctgcagagaacacacagagagaagactttcagagctcacaggagcagggagcaggagcactctaagggaattc

SEQ ID NO: 222013 - DNA, 1000 bp, Homo Sapiens
gtaaataggtaggcctctaattgaaccacctctctaagttatgtacgtatatataagctgaaattgtgtttgacattctgagggttttctttttctttttcctttttttttttttttggtggggggctgggggtcagagtcttgttctgttgcctgggctggagtgcagtggcatgatctcagctcactgcaacctctgccttctggattcaagtgattctcctgcctcagcctcttgagtagctgggactacaggtgcccgccaccacaccagctaatttttgtatttttagtagaggcgaagtttccccatgttggccaggctggtcttgaactcccgacctcaagtgatctgtctacctcggcctcctaaagtgctgagattacaggtgtgagccaccgtgcccggcccattctaagggttttctttgaagacaggtcaaatgctgttagtaagtttcaggagattgttaattcctcagttataccagattttataaaatatttgagaatagatggctaacaagaggttagaaatacttttccttaattttaatccacagtatgttacatgcattctaccactacattttggtgctatttaaggtgtgcaattttctataggtgacttttgcaattcagggaagatttgggcatattaaatgaaagaatatctaattgggggaggtgtgaagggaaagaaattcttttcaaaagctgaccacaaagagtagttaaaagtttttgtcactatcttcacaagtgtgtaaagcacagatttcaacagagtgcttggcatattgtagggtgctcaatggtggtttttattattattactcagattccacagtggcaagaaacatcattctacataatggaaaacatttacatcaaatcccacttactttaatgcgaacttggagataatttatggtattgtattgtaaaccattaatgaaaactttttcacagttgagtgaaattaaaatcactatatctc

SEQ ID NO: 222014 - DNA, 1000 bp, Homo Sapiens
ctgctgccccctacccggctcgttcccccaggggtgagccccgccgtgtctgtggccctctcttaatgccacggcagccaccctgccatggaggcgccttcctgggttggccagagggcccctcactggctggactggaggctgggtggccggccctgccccccacattctggctccaccggggagggacagtctggaggtcccagacatgctgcccaccccctgctggtgcccacccttcgcagttactggttggtgttcttcccaaagcaagcacctgggtgtgctccaggcttcctgccctagcagtttgcctctgcacgtgcacacacctgcacacccctgcacacacctgcacaccgtccctctccccggacaagcccaggacactgcctttgctgccttctgtctcttgcataagcctcaggcctggccctttcacccctcttcccaccaactctctctgcccccaaaagtgtcaaggggccctaggaacctcgaagctgttctctgcttttccattctgggtgttttcagaaagatgaagaagaaaacatgtctgtgaacttgatgttcgtgggatgtttaatcaagagagacaaaattgctgaggagctcagggctggattggcaggtgtgggctcccacgccctcctccctccgctaaggcttccggctgagctgtgccagctgcttctgcccaccccgcctctgggctcacaccagccctggtggccaagcctgccccggccactctgtttgctcacccaggacctctgggggttgttgggaggagggggcccggctgggcccgagggtcccaaggcgtgcaggggcggtccagaggaggtgcccgggcaggggccgcttcgccatgtgctgtgcacccgtgccacgcgctctgcatgctcctctgcctgtgcccgctgcgctgccctgcaaaccgtgaggtcacaataaagtgtatttttttaaaaaaaaaaaaaaaaaaaaaaaaaaa

SEQ ID NO: 222015 - DNA, 1000 bp, Homo Sapiens
tataggcctcagatactgaagattatttttggtagaagcaccgtgtaggctttttctgcaatgagcagcagctgactgaattttcataagaaacttggactgcaggacttaatctgtagtctttagacaacagttgctttcataaagactagttcttatcaaccttgaatgactacagattattttgtgaaggaggatgaagtaatgtgtgttcttgtaaaattaaattttatctttatttcttctaaaaatctgtataccaggaactgaaaatctttgaacagatattaaaatctacgtaagtatacaaactagttgagggatacactgtttgcttttataaaataactttgattacatgaatataataaattatgtgcatataaatgtgtgtctatatgctttcctttaaatatgtttgaaaagatgtttgaaacttgattatactatttataattggcacagtactttgaattatgccagtactacattgtaaaacagagttgtattttttgatatttaacaatgcttaacactttaaatgccacttctgaggaatggacctggtgtaacacacttgaatatgtgtgatgccaaactttttaaaatacaatataagttatgcttatttattattttctttagtttaatcttggtcatgttttggtgtgtatttttaatttttttcttaaattaacactttggcatgaacattactgcaggtttttgatgaatataatgaatgtatggaattcaattgaatttgcatggtcttcggaattttttctgtgtgtataaatttagctgctattaacagaagagagaactttctgtgagtagccatgtgtgttgatcagatacagtttttctgagatcttcaattaatctcactttaaaaatgaccaaaacatgtctttcttgaattaactttgaataaaagtttgtatattaaaaaaaaaaaaaaaaaaaaaaaaaaaaaaaaagaaaaaaaaaaaaaaaa

SEQ ID NO: 222016 - DNA, 1000 bp, Homo Sapiens
gtgggggtcaattctaacgtcatgttcttttgaataaatctctcagtcatatttgaaaaaaaaatacatgggaataaagaaaaatatcatctttggccaaatcaagcaggcatcttttttcttttccttgacgtttagctcattatacgtggtgattggatcacgagatctgtccgtgtgaaaatacagaaacatcctttagtttacaaaacagttattctaggcttgaagcctctgaacagcaaattgaatagatgggctgcatctgatttgctttatggatgtaattttacaaaacactcttgggtctctgaccccagggagttaagagtgcccagaggaggtcctacacattaaaggataaagccccccagtgatgctggcaagcaaatgtgttgagttcttaaatcttcatttggttttctgttcaggattttaattgcaaatgaatttatttctccagtttatctaaagacctaatttcccaatagtttcctctgcatttatatactctgtagtgtttaggcaaccctgttataagtttattaatattatgtaagtgttgttcttgtatttatgtatagtgtatgtattgtaaatatactcagagcttttttccttttactgtaaaatggtgatttttttgccctatgataatgtaaagggagaccctcctaatgagattctctcagaggatgattattccagtctattctcagagatttaaatgaacaagtgttattgtttttaatggtgtctcagacatattctgttggtgcattgcttttctgtattcaactttcctatgaattgagctgtgaactgaaatagagtttaaacctttaactgtatgcatttgtataattatctgaatgaaggcatgaaggttaaataaagcattttgtatggaacaaaaaacaaaactccctaactgactcagacactttggaaatcatagttattaaccattctaattaaacctttgttatgaaaagtttta

SEQ ID NO: 222017 - DNA, 1000 bp, Homo Sapiens
ggcccaaatgcagggaggagagtcgcttgacttgaagagaagacggattcaccaatgtgactttgcaggatgcagcaaagtgtacaccaaaagctctcacctgaaagctcaccgcagaatccatacaggagagaagccttataaatgcacctgggatggctgctcctggaaatttgctcgctcagatgagctcactcgccatttccgcaagcacacaggcatcaagccttttcggtgcacagactgcaaccgcagcttttctcgttctgaccacctgtccctgcatcgccgtcgccatgacaccatgtgagccgcacaggtcacactagagaagctgcgctggtatctttcctggtcgtgtgctgaggttgggacaattttttcctctttgacttcagcttgcatatggggttgaagcagcccactgagccaagttgaggagactggaggaaaagagagctggtctcccgtggggctcttcatattctaccttcacggaattccagtgtggcacccatggctgccttcccatccccccctgctctgaaataggacatttttcctacagtaacaaaacaggaatcaaactcaaggctgtgaacaaacatacgctgctttattctttccaatttttctcttgttttctagaactcttatccatatgtttttaaaataagtacctaaaagtggtttgatagtgtcctaaacgacttttttaacttcctaaatggaaagagcataacaagtagttgattggtaagatttacagggatttggtttctgagtttgaggcacattcccagtgaataagctgagtcccataccacactcaaaaggttttaataaatctaatcctatttcttcttaaagtttggttttcagacagtgctggtgcttctgcttcttaagttcatcaagggaatgaggagttcttgtccttctcctcctcttttttttcttttccactttctccttcaggattaaagattttgcggaattc

SEQ ID NO: 222018 - DNA, 1000 bp, Homo Sapiens; identical to SEQ ID NO: 116786

SEQ ID NO: 222019 - DNA, 1000 bp, Homo Sapiens
cccttgccctcagggagccacggttgagggtgaggcccaacacctgccttagggccctgggtgggcaagtctgggccctggggtagggagggagactcaggcccacacttgggtattttctaatttcagacaaacacacactcagcgcgcactcactgattcctacacattgccaagatttcacacatgtgaccaggggccaccaaagtccctgtgacctttgtgactaggatcctaatttctctattttctcctgggtgcctgggtctgtgtcacctggggcagtgtggataatgtttagttctgtgacactgttttttgggggtggcacctggttctccgatgcctgggctggtgtcaggcccaggactgtagtgctgggagcagtaaagctcagctctgtgtaatgagtgatgctatggcttgctcgtgtcttatgatccaatccttttctacatcagcccttgttttgttttatggctagtcttatctggcctggttatttccttgcggggaggagagggtttgctaatctgctcccagcccaacctattaccaccccacctcgctgggacctactgctcgggaggcagcagacagggagccaccagcagtggcttcctggccctgtgctgggggtggggggaagctgggggcacatgtggcccttgccttctgagcagctcccagtgccagggctttgagactttcccacatgataaaagaaaagggaggtacagaagttccaattccctttttattttgctggttggtatctgtaaatgtttaataaatatctgagcatgtatctatcaacgccaagaatttcaaagtctccttcaacaatatgaggcttttaggatgtttatattccttcatccctcttgtttcccaggttttgcagggaaaaaaagtctggaattatagatacagcttattattaaatttgttcttgcataaaaaaaaaaaaaaaaaaaaaaaaaaaaaaaaaaaaaaaaaa

SEQ ID NO: 222020 - DNA, 1000 bp, Homo Sapiens
ctagattcaaatgggctgataaccaaattttaacacatcagcattcaccaccaggtttacttttattttcagattggctcattttgtgcagaccttagagcaaagtttcctttatggtatctgtgtacgtatccaaacttcttttaattgttcacagattttaaaagcggtagcaccacatggttgtgtagatcagacctgtgtatttagatcagacctgtgtatcacgtaagtgtgtgagtgcagtgcagatgagcaccatttagttatatgtgctaggcaaatctccaacacagttgatgtgtagtcttgtggtagatttgtgcatactgtaagcaaattgcttagcttctctagacatcagtttccacatctgaaaaataagaagatgagagtacacggttgttatgaacaaatgacttaatgctttttaagcacgttgcatgacatctggaacacagaaagccctcaatacattgaagctcttaggattttcacgatgttcctgtctgctcaatgcatgctttctttattgttctgacagttgtgtggtaacaagctaatatgcttccagttgacttccagtctaccctggtgttagaaaccgtttcatctcttattgtaaatttgagtgcttgttgttttttatatttgtgatgactcttccagcagttgttgacaattgttagaggtttgacttttaaataattacttattttttctgattgtggttcagtttaactgaagaatatcctgagattgtaagaaaagcattttttaaaaggtatcacttgtgatcatttatctttctaaattctatttttaatactgttccaccaaagtgatgcagtggttaccatgacaccctaatttcatgtgtttttgtatttatgaaaatagtttcattgtcatttattggcggtatacaaagtaaaatgttataaatgtgaagttataaaataaatatatgctaataaaatcctgagtttttctgattcct

SEQ ID NO: 222021 - DNA, 1000 bp, Homo Sapiens
cctgctagcctggaggatgtttcagaaatggatcaaagctggtgaccattcagagctgtcccagaaccccaagcaggctgccacgcagagtgagctgcactacgcaaatctggagctgctgatgtggcctctgcaggaaaagccagcaccaccaagggaggtggaggtggaatacagcactgtggcctcccccagggaagaacttcactatgcctcggtggtgtttgattctaacaccaacaggatagctgctcagaggcctcgggaggaggaaccagattcagattacagtgtgataaggaagacataggcttttgtcctgcctcgccatcggagctctcatgggccccaggaagtccagggacagctcccttatacctggcccacgtccttctcagcctgccctcgacaacagtgaccaacagacaggcagctgggtttcccaggccatccctctgttgccatcagcttgattggcttccccgagggccagcagggctgggggctccggagagcagcaggaagcactcccagccaccagtgcctgtcacctctttcccctttgcccctgcttcatcccagctctgtgtgtggaggacaaagcttcttcctgcgtggctccaggaaaagatgtggctcacgtaggtggcacctgccaatagctttgtcaatcacagccccataggaacgtctggaattgcttgggagttggggagaactgtcaagaagagtgaagagagtgccaaagcggagatctgttcacctgggggccatggaggggggacccactaaagatcaagatcaaagattctccccatctcacagacaaggaaactgaggccagagggaggagagaattgctcatggctccagaactggtggcaagtttctctggactcttaggtttatttttaatatgaaatataaaaacagtttcaaatatcttattgagggagaagtaaaaacttatttaaacaaaaaaaaaaaaaaaaaaaaaaaa

SEQ ID NO: 222022 - DNA, 1000 bp, Homo Sapiens
ctctgggccagtttccttgaaagtctgaaaaagaatgattactttaagggactgatagaaggttctgctcagtaccgggaaaggctagaaatggcagagaattacttccagctctcagtagactggccagaaagttctcttgctatgagccctggtgaagaaatcttaaccttattacagacaataccatttgatatagaagaccttaagaaagaagcagctaatcttcccccagaggatgatgaccagtggttagatctctcaccagatcagctggaccagctgctgcaggaagctgttggcaaaaaagaatccgagtctgtttccaaggaggagaaggagcagaactatgacttaactgaagtctcagagagcatgaaagctttcatatccaaagtctcaacccacaagggagcagagctgcctcgagaaccttctgaggctccaatcacttttgatgcagattcttttcttaattattttgataagattttagggccaaggcctaatgagtcagattctgatgatctggatgatgaagactttgaatgtttagatagtgatgatgacttggactttgaaacacacgaacctggcgaagaggcttccctgaaaggaacacttgataatctcaagtcatacatggcccagatggaccaggaactagcacacacctgcatcagcaaaagtttcaccactaggaaccaagtggaacctgtatcccagactaccgataacaattcagatgaggaagattctggtacgggagaatctgttatggcaccagtagatgtagacctgaacctggtttcaaatatattggaatcctatagctcccaagctggactggcaggacctgcttccaatcttttacaaagcatgggagtgcagctgcctgacaacaccgatcacagaccaacaagtaagccaacaaaaaattaaccagcacatttagcttctcttttttctttttaaataaatattgaatatgattctgttc

SEQ ID NO: 222023 - DNA, 1000 bp, Homo Sapiens
ctcatgttgctggacacgctttttggggaactggtgtggaggattatctccgagaagaagctgaagaggaggcggaagccggagtttgacattgcccggaatgtcctggagctgatttatgggcagactctgacctggctgggggtgctcttctcgcccctcctccccgccgtgcagatcatcaagctgctgctcgtcttctatgtcaagaagaccagccttctggccaactgccaggcgccgcgccggccctggctggcctcacacatgagcaccgtcttcctcacgctgctctgcttccccgccttcctgggcgccgctgtcttcctctgctacgccgtctggcaggtgaagccctcgagcacctgcggccccttccggaccctggacaccatgtacgaggccggcagggtgtgggtgcgccacctggaggcggcaggccccagggtctcctggctgccctgggtgcaccggtacctgatggaaaacaccttctttgtcttcctggtgtcagccctgctgctggccgtgatctacctcaacatccaggtggtgcggggccagcgcaaggtcatctgcctgctcaaggagcagatcagcaatgagggtgaggacaaaatcttcttaatcaacaagcttcactccatctacgagaggaaggagagggaggagaggagcagggttgggacaaccgaggaggctgcggcaccccctgccctgctcacagatgaacaggatgcctagggggacggcgatgggcctcacgggcccgcccagcaccctgagaccacactgttgcctcccagtgaccctgctgggacaccaggacaaggaagacagtttcgcctctcgaaagccgcagctgcgcctaggctggagctggaagggtgggtgaatccggcttgggcatccccaatgaactctgccctgcctgggactctatttattctgattaaaggggttttgcaaatgggaaaaaaaaaaaaaaaaaaaaaaaaaa

SEQ ID NO: 222024 - DNA, 917 bp, Homo Sapiens
cagccagtcctgagcacctaaccatgttgggcatcactgtcctcgctgcgctcttggcctgtgcctccagctgtggggtgcccagcttcccgcccaacctatccgcccgagtggtgggaggagaggatgcccggccccacagctggccctggcagatctccctccagtacctcaagaacgacacgtggaggcatacgtgtggcgggactttgattgctagcaacttcgtcctcactgccgcccactgcatcagcaacacccggacctaccgtgtggccgtgggaaagaacaacctggaggtggaagacgaagaaggatccctgtttgtgggtgtggacaccatccacgtccacaagagatggaatgccctcctgttgcgcaatgatattgccctcatcaagcttgcagagcatgtggagctgagtgacaccatccaggtggcctgcctgccagagaaggactccctgctccccaaggactacccctgctatgtcaccggctggggccgcctctggaccaacggccccattgctgataagctgcagcagggcctgcagcccgtggtggatcacgccacgtgctccaggattgactggtggggcttcagggtgaagaaaaccatggtgtgcgctgggggcgatggcgtcatctcagcctgcaatggggactccggtggcccactgaactgccagttggagaacggttcctgggaggtgtttggcatcgtcagctttggctcccggcggggctgcaacacccgcaagaagccggtagtctacacccgggtgtccgcctacatcgactggatcaacgagaaaatgcagctgtgatttgttgctgggagcggcggcagcgagtccctgcaacagcaataaacttccttctcctcgggccacctgaaaaaaaaaaaaaaaaaa

SEQ ID NO: 222025 - DNA, 1000 bp, Homo Sapiens; identical to SEQ ID NO: 116794

SEQ ID NO: 222026 - DNA, 1000 bp, Homo Sapiens; identical to SEQ ID NO: 116796

SEQ ID NO: 222027 - DNA, 1000 bp, Homo Sapiens
gatcgaggctcaggaccgccgggagagcctgcccacctccccaccctggacgccgggcgcgtcccggccccccagcagcctagacggctgggtgagcccgggcccgtgggagccaggtcgcgggagcagcatgagcagccccccgccgctgccgccgccaccgcccatgtctccctcgtggagcgagcgctcggtgtccccgctgcgacctgagaccgaggcgcggccccccagccgccagctgcaggcgcttctggcgcgaaacatcatcaatgcggcccggcgcaagagcgcctccccgcggtcggcgggcgccgagaacccgcggcccttctccccgccgagggcgccaccgcccccgcccccgcccccgcccccgcccccgcgcatgcgctcgccacagcccgcccgccccggctcggctgctgtgccgggggcagccttcgcgcccatcccgcggagcccgttgcccgccggtccttcgtcctgcaccagtccccggagcccgctgcccgcgcctcccaggcccttcctctaccgccgctcgcccacggactccgacgtgtccctcgactccgaggactccggggctaagtctccaggcatcctgggctacaatatctgtccccgcgggtggaatggcagccttcggctcaagcgtggcagcctccccgccgaggcctcctgcaccacctagagccccacccccgaccccaccccgggagggcagagccagaagaaggctcattagacctgggggacccaaagggtctggcctctttgggcagccccagagatgaggggtcagcagaggagagctctggggttggggatgggttagggacgcaagcttgagttctagcccttgctctcattcagctgttgtgtgaccctgggtaagacccttccttgtttgaccctcagctttcccatctgtttaatggtggctttggccaaggcaatccacaaacgtcaaaattccccttcccatcagtacaca

SEQ ID NO: 222028 - DNA, 1000 bp, Homo Sapiens
tcttcactgttagctttttaaaacattaggctcccatccctatggaggaacaactctccagtgcctggatcccctctgtctacaaatataagattttctgggcctaaaggatagatcaaagtcaaaaatagcaatgcctccctatccctcacacatccagacatcatgaattttacatggtactcttgttgagttctatagagccttctgatgtctctaaagcactaccgattctttggagttgtcacatcagataagacatatctctaattccatccataaatccagttctactatggctgagttctggtcaaagaaagaaagtttagaagctgagacacaaagggttgggagctgatgaaactcacaaatgatggtaggaagaagctctcgacaatacccgttggcaaggagtctgcctccatgctgcagtgttcgagtggattgtaggtgcaagatggaaaggattgtaggtgcaagctgtccagagaaaagagtccttgttccagccctattctgccactcctgacagggtgaccttgggtatttgcaatattcctttgggcctctgcttctctcacctaaaaaaagagaattagattatattggtggttctcagcaagagaaggagtatgtgtccaatgctgccttcccatgaatctgtctcccagttatgaatcagtgggcaggataaactgaaaactcccatttaagtgtctgaatcgagtgagacaaaattttagtccaaataacaagtaccaaagttttatcaagtttgggtctgtgctgctgttactgttaaccatttaagtggggcaaaaccttgctaattttctcaaaagcatttatcattcttgttgccacagctggagctctcaaactaaaagacatttgttattttggaaagaagaaagactctattctcaaagtttcctaatcagaaatttttatcagtttccagtctcaaaaatacaaaataaaaacaaacgtttttaatact

SEQ ID NO: 222029 - DNA, 1000 bp, Homo Sapiens; identical to SEQ ID NO: 116797

SEQ ID NO: 222030 - DNA, 1000 bp, Homo Sapiens
ctaaaaccctgtgttcacaaaggcagagagtcagacccttcaatggaaggagagtgcttgggatcgattatgtgacttaaagtcagaatagtccttgggcagttctcaaatgttggagtggaacattggggaggaaattctgaggcaggtattagaaatgaaaaggaaacttgaaacctgggcatggtggctcacgcctgtaatcccagcactttgggaggccaaggtgggcagatcactggaggtcaggagttcgaaaccagcctggccaacatggtgaaaccccatctctactaaaaatacagaaattagccggtcatggtggtggacacctgtaatcccagctactcaggtggctaaggcaggagaatcacttcagcccgggaggtggaggttgcagtgagccaagatcataccacggcactccagcctgggtgacagtgagactgtggctcaaaaaaaaaaaaaaaaaaaggaaaatgaaactagaagagatttctaaaagtctgagatatatttgctagatttctaaagaatgtgttctaaaacagcagaagattttcaagaaccggtttccaaagacagtcttctaattcctcattagtaataagtaaaatgtttattgttgtagctctggtatataatccattcctcttaaaatataagacctctggcatgaatatttcatatctataaaatgacagatcccaccaggaaggaagctgttgctttctttgaggtgatttttttcctttgctccctgttgctgaaaccatacagcttcataaataattttgcttgctgaaggaagaaaaagtgtttttcataaacccattatccaggactgtttatagctgttggaaggactaggtcttccctagcccccccagtgtgcaagggcagtgaagacttgattgtacaaaatacgttttgtaaatgttgtgctgttaacactgcaaataaacttggtagcaaacacttcaaaaaaaaaaaaaaaaaa

SEQ ID NO: 222031 - DNA, 1000 bp, Homo Sapiens
acatttgaagaacacataaacaacatcaaaccaagcatcatagcagtaactcttgcctgtgaagaactgaagaaaagtgaaagctttaacagacttttagagttagttcttcttgttggaaactacatgaactcaggctcaagaaatgcccagtctttgggatttaagatcaacttcctttgtaagatcagagatactaaatcagcggatcaaaaaacaacccttttgcattttattgccgacatttgtgaggaaaaatatcgagatatcctaaaatttcctgaagaactggaacacgtagaaagtgcaagcaaagtttcagctcaaattctcaagagcaaccttgcatcaatggaacaacaaattgttcatctggaacgtgacatcaagaaattcccccaagcagaaaatcaacacgataagtttgtggaaaagatgaccagctttacaaagactgcccgagaacagtatgaaaaactctccaccatgcacaacaacatgatgaagctctatgagaatcttggagaatacttcatttttgactcaaagacagtgagcatagaagagttctttggtgatctcaacaacttccgaactttgtttttggaagcagtgagagaaaacaataagagaagagaaatggaagagaagaccaggagggcaaaacttgcaaaagagaaagctgaacaagaaaagttagaacgccagaagaaaaagaaacaactcattgatataaacaaagagggtgatgagactggtgtgatggataatcttctagaagccctacaatcaggtgcagcattcagagaccgtcgaaagcggattccaaggaatccagtggtaaatcatccctgtgcaacaagggctaatccaagatcagctacataaacggcctgagtgctgttttaaacaggattgggttgatggtacaacatgactttttaagataatcaagttagttaaaagtttcctagttggaaaactttgaaaaaaaaaaaaa

SEQ ID NO: 222032 - DNA, 1000 bp, Homo Sapiens
tggagtggcagctgcccccaagggtaaagagaagaatggtggggcacgacttgggatggctggagttccagaggatggagagcagccgggctggccttctccagccaaggctgcccccgtcctcccaaccactcacaaccacaaagtgccagtccttatctcacccactctgaaacacactccagctgacgtgcagctcattggcacagactctcaggggaataaattcaagctcttatctgagcatcaggtcacatcctctggagacaaggaccgaccccgacgggtaaaaccaaagtgtgccccacccccaccaccagtgatgagactactgcagcatccgtccatctgctcagaccctacagaagagccaactgccctaactgcaggacagtccacatcagaaacacaggaaggaggaaagaaggcagctctgggcgcagtgcccatcagtgggaaagctgggaggccagtgatgcctccacctcaagtgcctctgcccacatcttccatctcgccagccaaaatggccaatggcacagcaggtactaaagtggctctgagaaaaaccaaacaggccgctgagaaaatctcagcagacaaaatcagcaaagaggccctgctggaatgtgctgacctactgtccagtgcactcacggaacctgtgcccaacagccagctggtagacactggacaccagctgcttgactactgctcaggctatgtggactgcatccctcaaactcgcaacaaatttgccttccgagaggctgtgagcaaactggaactcagcctgcaggagctacaggtttcttcagcagctgctggtgtgcccgggacaaaccctgtccttaataacttattgtcatgtgtacaggaaatcagtgatgtggtgcagaggtagccactgttagcctggtgggaaaatgcacacatttctgaggggagagggaaaaggacttgttttcctgtgttcttgttttcagaaaatgaaagactc

SEQ ID NO: 222033 - DNA, 1000 bp, Homo Sapiens
acccaggtgtttcttttgttccaaagactttaccctccaaagaagattcagtaacagaagaaaaagaaatagaggaaagcaagtcagaatgctactcaaatatttatgaacagagaggaaatgaggccacagaagggagtggactacttttaaacagcactggtgacctaatgaagaaaaattatttacataatttctgtagtcaagttccatcagtgcttgggcaatcttcccccaaggtagtagcaagcctgccatctatcagtgttccttttggtggtgcaagacccaagcaaccttctaatcttaaacttcaaattccaaagccattatcagaccatttacaaaatgactttcctgcaaacagtggaaataatactaaaaataaaaatgatattcttgggaaagcaaaattaggggaaaactcagcaaccaatgtatgcagtccatctttgggaaacatctctaatgtcgatacaaatggggaacatttagaaagttatgaggctgagatctccactagaccatgccttgcattagctccagatagcccagataatgatctcagagctggtcagtttggaatttctgccagaaagccattcaccactctgggtgaggtggctccagtatgggtaccggattctcaggctccaaattgcatgaaatgtgaagccaggtttacattcaccaaaaggaggcatcactgcagagcatgtgggaaggttttctgtgcttcctgctgtagcctgaaatgtaaactgttatacatggacagaaaggaagctagagtgtgtgtaatctgccattcagtgctaatgaatggtaagtattaaaacaggttgatttcatagttattgagacaaaacaagggaattacgatgagaagacttttttccccctgcctttctttacaagttgctcaccttctcaaatgtcataactttaactgaaaatatttagctaaatttccatgttttgaaagtatcttagcatttca

SEQ ID NO: 222034 - DNA, 1000 bp, Homo Sapiens; identical to SEQ ID NO: 221564

SEQ ID NO: 222035 - DNA, 1000 bp, Homo Sapiens
ttcaccctgatcataatttcttcctatactgccaatctcgctgctttcctgactgtggagaggatggtttctcccatagagagtgctgaagacttagctaaacagactgaaattgcatatgggaccctggactccggttcaacaaaagaatttttcagaagatccaaaattgctgtgtacgagaaaatgtggtcttacatgaaatcagcggagccatctgtgtttaccaaaacaacagcagacggagtggcccgagtgcgaaagtccaagggaaagttcgccttcctgctggagtcaaccatgaatgagtacattgagcagagaaaaccatgtgatacgatgaaagttggtggaaatctggattccaaaggctatggtgtggcaacccctaaaggctcagcattaggaacgcctgtaaaccttgcagtattgaaactcagtgaacaaggcatcttagacaagctgaaaaacaaatggtggtacgataagggggaatgtggagccaaggactccgggagtaaggacaagaccagcgctctgagcctgagcaatgtggcaggcgttttctatatacttgtcggaggtctggggctggccatgatggtggctttgatagaattctgttacaaatcacgggcagagtccaaacgcatgaaactcacaaagaacacccaaaactttaagcctgctcctgccaccaacactcagaattatgctacatacagagaaggctacaacgtgtatggaacagagagtgttaagatctagggatcccttcccactggaggcatgtgatgagaggaaatcaccgaaaacgtggctgcttcaaggatcctgagccagatttcactctccttggtgtcgggcatgacacgaatattgctgatggtgcaatgacctttcaataggaaaaactgatttttttttccttcagtgccttatggaacactctgagactcgcgacaatgcaaaccatcattgaaatctttttgctttgctt

SEQ ID NO: 222036 - DNA, 1000 bp, Homo Sapiens
agttgataggttgttaaatacatttatataatacattaaatatgtgaaattaatacaccttcctacattttgaaggtgatgcatagatcccatagtgtgcatcatgttccttatatgaaaacgtttaaattactgggtcttttccattaaactacttttgtatggcttagataaatcttccattagtgttcatttttatagaattatgctgttaaaactactttaggtgaacaaataaacttgtctattatatattaacgcgactgaactacagtaaatgtttgtgatgtttccaatgctgaatgcctgttagcatatgaggcaaagtgtagtgttataaaaaacagcctgttgactgctgggcccgattctgatatgagttaggtgaccatgagaattgctgtttgaggtccacactgacacacacccattgggtcacaccccctttgcatgtttgtatttcctccctttcatcacatttgtttgaaataaggtacttttatagggttggtatttcagaacactttaggtcatgttgtagtttaaattcttcttgaaaaaggtatatgtgataaataaaaatttttattggaataattattacatggtactacatcaccctgaggaagagaataaattaaaattacacacttgcatgacaaaggcctgtgaaggaattaatgtgatttaagtgttttgtaacttcattttttattcctttagtagagcaaattcttatttttttcgccttcactggtaacagcttttgtgggagcccacaccagtcaagttggatttgaacccagctgctctgtactgcacttagaatgatgtaatattccaggatgctgctgcaggtggcgtatcatcgtacacactcagtgacatttctatcacaatcattttatggaagatgtgtgataatctgtttttactggtattaataaacacatacaatgaagaaaacagataacaaattttaagaccaaggtaagataac

SEQ ID NO: 222037 - DNA, 1000 bp, Homo Sapiens
gggcgagccaggaccacagagctcctggccctggccagaagcaggagtgtgaggaggagacagcctcagcggacaagcagctggtgctccaagcacaggagaacatgctggtgaacgtgtccttctcactctccctggagctgctctcctatcagaagctcccagctgaccagacactgcctggggtggacattcagcagagtgcgagtggagagagagagatggtgtttactcagaacctgctcctggagtacaccaaccagaccactcaggtggtgcccctgcgggctgtggtggccgtgcctgagctgcagctctccaccagctgggtggactttgggacctgctttgtgagccagcagcgagtccgggaggtctacctgatgaacctgagcgggtgccgaagctactggactatgctgatgggccagcaggagccagccaaggccgctgtggccttcagggtctccccaaacagtgggctgctagaagcacgatccgccaatgcacccccaacctccatcgcgttgcaggttttcttcactgccaggagtagtgagctgtacgagtccacgatggtggtggaaggtgtgctcggtgagaagtcctgcaccctgcggctccggggccaaggctcctatgatgagagatacatgttgcctcaccagccctgaggctccgccccagccctcagccccaggccccagctggagaaaaaacattgcccagggattaggagcagctcttcagcacaaagacacagacttggggacctggggacctctgggcagctcctggaatggaagaacccccttccacaatggtctcagcctaggccctcatgatttgtcctcagagctaacataaaggacaggccacaccacagcagagaccaccacattgagatcactactcagtgcatagcgaagaccagtatggcaaaattagtcttggaaaaaaaccacagccactaagtaaattcatgcacttttactatgca

SEQ ID NO: 222038 - DNA, 1000 bp, Homo Sapiens
gaggtggattccaaactccaagaaaatcctgaaagttgcctatcaattgttcgggaaaaactctacaagggcatatcttgggtagaagtagaagctaaagtgcaaaccagaaattggatgcagtgtaaaagtaagtggacagaaattctaaccaagaggatgactaatggtcggcgtatctactatggcatgaatgccctgcgggccaaggtcagccttattgaaaggttgtatgaaataaatgtggaagatactaatgaaatagactgggaagatcttgctagtgccataggtgatgttcctccatcttacgttcaaactaaattttctaggctgaaagctgtctatgttccattttggcagaaaaagacttttccagagatcatcgactacctttatgagacgactctacctttgctgaaggaaaagttagaaaaaatgatggagaaaaaaggcactaaaatccagactcctgcagcacccaagcaagttttcccatttcgagacatcttttattatgaagacgatagtgaaggagaggacatagaaaaagaaagcgaaggccaggcgccatgcatggctcacgcctgtaattccagtactttgggaggccaaggccggtggatcatctgaggtcaggagttcgagaccggcctgaccaacatggtgaagacctgtcactattaaaaatgcgaaaattagccgggtgtggtagtgcacacctgtaatttcaactacttgggaggctgaggcaggagaattgcttgaacccaggaggtggaggttgcagtgagccaagatcgcaccaccgcatgagagagagagattactatttcttgtccctttttctcagtttgattatatttatatacatatgtcagtaaatctgttttcagtattgatgtttaataaagaatgtacaatggccagagttctactctttcctctggagcattaaaatatattgccattcctattaaaacgtatttgaatgtgaaaa

SEQ ID NO: 222039 - DNA, 1000 bp, Homo Sapiens
cctaaagaaatagacattttactgttattttgaaagggcatcttttgatttttttgttgttgttgttcacttttggcatatgtatataagtaatattgacggtgatatgaaaacttttgttatgtgaagatatttaagtcagaaaattgttaaataatattacttcttttccaaactgctttgtgtattgtatatttttttaagaaaaagaaaagccttatttgacttatgcttgtgatactggacttcttaccaatccggaggtttccttccttgaatgtcagtgtgtaaacctggctgtagccgcatatgcagaataactgtaattgtgctagagttttaaaggttctgcttttaatgcactttttattttataattttgtattgaaatattttagaaatgttgattaattttggtgaaaaaatatccccaaagtggaaattattggaattttaaacttttgttcttgctgggttatttattttgattttagcattaaatgtcatctcaggatatctctaaaaggggttgtttaattcctaattgtatagaaagctagtttggtgaattgtattggttaattgactgtttaaggccttaacaggtgaatctagagcctacttttattttggttaaagaaaaagaaaatatcaataattcaattttgtgtcttttctcaatttattagcaaacacaagacattttatgtattatttcgatttacttcctaattataaaagctgcttttttgcagaacattccttgaaaatataaggttttgaaaagacataattttacttgaatctttgtggggtacaggttgatctttatattttactggttgttttaaaaattctagaaaagagatttctaggcctcatgtataaccagggttttgaggataaagaactgtatttttagaactatctcatcatagcatatctgctttggaataactataaataaaagatgaagttaggaaaaaaaaaaaaaaaaaaa

SEQ ID NO: 222040 - DNA, 1000 bp, Homo Sapiens
gagacagagtttcacccttgttgcccaggctagagtgtaatggtgcaatctccgctcactgcaacctctgcctcccaggttcaagcgattctcctgcctcagcctccctagtagctgggattacaggcatgcaccaccacacccggctaatttttttatatttttagtagagacaaggtttctccatgttggtcaggctggtctcgaactcccgacctcaggtgatctgcccgcctcagcctcccaaagtgctgggattacaggcgtgagccactgcgcccggccaaattatttttgtgggtagattcattctctttacctaatagtcataatttagtcagtgaagggacaacatctggggtaagagctatggaggaggtgctcagctttgtgagttttgtgccaggcatctttgctgaaaatggagatggcagcaagtgtgaatctgggggaatataagggaagacagaaaagccttaagagtagacggaggaagaagggtaccagaatagtccctgtggaggcaggcagatcagagctcagggtttgaaagtgggcctgagtaagggtcctgctagagaaactgcagatggaagctgagcagttaccaactgctaatgtgccaagtataccaagcacagcatgtgtcctgtagaggagcattattttaaacaatgttctactatcatctaccaaaataattgtggtaaaagtgtagtattttattttttccttttatgtcagcaatattttaaaatattgatctgtttatcttatatttttatggataaatgtagtatttgcctcatgattgtgagccactgagagtgcactgaacctattcacatgtctttaagatgttttgctgtgttaaaattttaggagagaaaaatacaagtgaataattatttaataggcatttattactttattttggagttgaattctgtcatttgaaaaagttcagtaatgtaataaatacaaagtgatctgcactgtt

SEQ ID NO: 222041 - DNA, 1000 bp, Homo Sapiens
ttacttaaactggtgaagtcatatcattggatgggactagtacacattccaacaaatggatcttggcagtgggaagatggctccattctctcacccaacctactaacaataattgaaatgcagaagggagactgtgcactctatgcctcgagctttaaaggctatatagaaaactgttcaactccaaatacatacatctgcatgcaaaggactgtgtaaagatgatcaaccatctcaataaaagccaggaacagagaagagattacaccagcggtaacactgccaaccgagactaaaggaaacaaacaaaaacaggacaaaatgaccaaagactgtcagatttcttagactccacaggaccaaaccatagaacaatttcactgcaaacatgcatgattctccaagacaaaagaagagagatcctaaaggcaattcagatatccccaaggctgcctctcccaccacaagcccagagtggatgggctgggggaggggtgctgttttaatttctaaaggtaggaccaacacccaggggatcagtgaaggaagagaaggccagcagatcagtgagagtgcaaccccaccctccacaggaaattgcctcatgggcagggccacagcagagagacacagcatgggcagtgccttccctgcctgtgggggtcatgctgccacttttaatgggtcctccacccaacggggtcagggaggtggtgctgccccagtgggccatgattatcttaaaggcattattctccagccttaagatcttaggacgtttcctttgctatgatttgtacttgcttgagtcccatgactgtttctcttcctctctttcttccttttggaatagtaatatccatcctatgtttgtcccactattgtattttggaagcacataacttgtttggtttcacaggttcacagttaagaaggaattttgcctctgaataaatagaatcttgagtctcatgcaaaaaaaaaaaaaaaaaaaaaaaaa

SEQ ID NO: 222042 - DNA, 1000 bp, Homo Sapiens
ggcttaacctttgaccctttctctaaactgctctgctgggcagatgcaggaaccaaaaaactggagtgtacactacctgatggaactggacggcgtgtcattcaaaacaacctcaagtaccccttcagcatcgtaagctatgcagatcacttctaccacacagactggaggagggatggtgttgtatcagtaaataaacatagtggccagtttactgatgagtatctcccagaacaacgatctcacctctacgggataactgcagtctacccctactgcccaacaggaagaaagtaagtacagtaatgtaaaggaagacttggagtttacaatcagaacctggaccctaaagaacagtgactgcaaaggcaaagaaagtaaaaaaggaattggccattagacgttcctgagcatccaagatgaacattttgtagtgcaaaaagacttttgtgaaaagctgatacctcaatctttactactgtatttttaaaaatgaaggttgttattgcaagtttaaaaaggtaacagaattttaactgttgcttattaaagcaacttcttgtaaacatttatcattaatatttaaaagatcaaattcattcaactaagaattagagtttaagactctaaacctgatttttgccatggattccttctggccaagaaattaaagcacatgtgatcaatataacaatataatcctaaaccttgacagttggagaagccaatgcagaactgatgggaaaggaccaattatttatagtttcccaacaaaagttctaagattttttacctctgcatcagtgcatttctatttatatcaaaaggtgctaaaatgattcaatttgcattttctgatcctgtagtgcctctatagaagtacccacagaaagtaaagtatcacatttataaataccaaagatgtaacaattttaaaattttctagattactccaataaagtgttttaagttttcctatgaaaaaaaaaaaaaaaaaaaa

SEQ ID NO: 222043 - DNA, 1000 bp, Homo Sapiens
gaacccggagcactggctacagcgcccacagctgactcggcaggtcctgggaaaggaggacctgacagctttttccttgggaagccccctaccccgctacctctacctggctagcaaccagactaatgcgtggggtcaccagcgcgggtaccgaatccagatccacagcccccttggcatacacatacccctggagagtgacatggagagggccctcagctgggggagataccagcttgtggtgacccagagaaaggaggaggagtcacagagcagtagcatctatcaccagaatgacatctggacacccacagttacctttgctgacttcatcaacaatgaaaccctcttaggagaggatctggtggcttgggtcacagccagcttcctgcacattccccatgccgaggacatcccaaacacagtgactctggggaacagagttggcttcttgctccgaccctataacttctttgatgaggacccctccatcttctcccctggcagtgtctactttgagaagggccaggatgctgggctctgcagcatcaatcctgtggcctgcctccccgacctggcagcctgtgtcccggacttaccccctttctcttaccacggcttctagtcctgagggtgtggcgggcggcgtggttaggcacatgtacttttccctgtttctactttctattctccgtgtttttatcacacctgctccccagattcccaccccctcaatgttcctctcacacgaaacccccatcagtccctttggttaattcttacttcctgttcatctctaaagtgttaaattataaaaatgatttttaaatattcaaagaaaaatatcacaaatcctactactcagaaataggtggtcacattacatcagacatctctttatgcatgtgcattcaaaaggaagagtagatagaattttgtaaaacagatgttgtatgtaatttataataaaaagtattagaggaaaaaaaaaaaaaaaaaa

SEQ ID NO: 222044 - DNA, 1000 bp, Homo Sapiens
tatgggaactatgtttgaatatgtgcagttttcaacattttggcacatgaaagcctgacaagtttttaaaagggcagaagctttattttttgaacaggaaaacatgttttttaaattcacatgtttgtatgagtacttttgcgaagcaaggcatgaactgctaggtattattaagaatgaatgatttttgcatttaagttgtttgaaggcatgtattttgaaaaatatctgttacaaatttataatttcaagacaaattgaatcttattttataatacttttggaatttcattaataaggctaaaatttgaggaatataactaattttcagccttaagacatttaagtttggaagtccttgctattcaacagaataacaagaaaacttcagaatgtatcactctcctgaaaagaagatattaataagcccttttatttatggttatagttttatttatagtctcaaaattcctaaagcaatgctacaaccattgaatttgccatattttgtatcagtgctgttaatttgctgttgcctcaagaaaaagtgctttttctccatggatgaggctagaccctaagaagtaattaagtcaatgtaaatcaaatggaagttttcccatgaactaagaatttattagttccctgattagactggaagaagaaaccactatttcatgaaaagcatggaatattatattttattgttcataattaatgaataaaattgatatgaatgaatgtagtgttctttgaattagtaaacagtacatctgtgacaatcatttttaacaagctctacttgtgttctttataaagtgtgattttcagaaagcaaacaacacaattacaaggttgaatctgaggaaaataatccttgtgccatagaagtatttacgaaattgcatttcattgttatgttttattttctgatacatgatgttcaattttatctttaggtaatattttatatcatagattaaaatttatagtgaacttt

SEQ ID NO: 222045 - DNA, 1000 bp, Homo Sapiens
ggagctgtttcctgggtaaatctagagtggggttttggttctttattttcccctataccctcaagcatttatccattgagttacaaacaatccagttacaatctttttaagttattattattattattattttttttttttttgagatggagtctcgctctgtcgcccaggttggagtgcagtggcgcaatctcggctcactgcaagctccgcctcccgggttcacgccattctcctgcctcagcctcctgagtagctgggactacaggcccctgcccagctaattttttgtatttttttttagtagagatggggtttcaccacgttagccaggatggtctcgatctcctgacctcctgatgcgcctgcctcagcctcccagtgctgggattataggtgtgagccactgcgcctggctaagttattattatttttttgagacagtctcctggtgtcacccaggctggagtgcagtggtgtgatcttggctcactgcaacctccgcctcctgggttccaacgattctcctgcctcagcctcccgagtagctgggcctaaaggtgcccaccactatacccggctaatttttgtatttttagtagagacaggggtttcaccatattggccaggctggtctcgaactcctgacctcgtgatccacctgccttgacctcccaaagtgctaggataacaggtgtgagccaccgcaccctgccaagttattttaaaatgtaccattattattgactatagtcacctggttgtgttatcaaatagtatgtcttattcattctttctttgtgtgtgtgtgtgtgtgtgtgtgtgtgtgtggtacccattaaccttccccatctccctgccagcccctaactaccctccccagcctccaggaactatccatccactcttatctccatgagttcaattgttttgatttttagatacacaaataaataagaacatgcaatgtttgtctttctgtgcctggcttatttcactt

SEQ ID NO: 222046 - DNA, 1000 bp, Homo Sapiens
cacagagatgcatctagtccccattcttgccacagccatccaggaggagctggagaaggggactcctgagccagggcctctcaatgctgtggatgagcggcaccattcggtcctcatgtccctgctctgtgcccatctggggctgagccccaaggacatagtggagatggagctctgccttgcagacacccagcctgcggtcttgggtggtgcctatgatgagttcatctttgctcctcggctggacaatctgcacagctgcttctgtgccctgcaggccttgatagattcctgtgcaggccctggctccctggccacagagcctcacgtgcgcatggtcacactctatgacaacgaagaggtggggtctgagagtgcacagggagcacagtcactgctgacagagctggtgctgcggcggatctcagcctcgtgccagcacccgacagccttcgaggaagccatacccaagtccttcatgatcagcgcagacatggcccatgctgtgcatcccaactacctggacaagcatgaggagaaccaccggcctttattccacaagggccccgtgatcaaggtgaacagcaagcaacgctatgcttcaaacgcggtgtcagaggccctgatccgagaggtggccaacaaagtcaaggtccccctgcaggatctcatggtccggaatgacaccccctgtggaaccaccattggacctatcttggcttctcggctggggctgcgggtgctggatttaggcagcccccaactggccatgcactctatccgggagatggcctgcaccacaggagtcctccagaccctcaccctcttcaagggcttctttgagctgttcccttctctaagccataatctcttagtggattgagccctcttggaaagacttctctgccatccctttgcacctgagaggggaagttctcagctgagctgaagctggattattaaagtggattgtcactcagaaaaaaaaaaaaaaaaaaaa

SEQ ID NO: 222047 - DNA, 1000 bp, Homo Sapiens; identical to SEQ ID NO: 116818

SEQ ID NO: 222048 - DNA, 1000 bp, Homo Sapiens
tagagagagaaaagaaaaggaggattgagacagagcagagtacgtccgtggaaaaagagaaggaaccaactgaagattatgtggatgtactgaaccctatgccagcatgtttttatacagtgtcccggaaagaggcaactgagatgctccagaagaacccttctttgggaaatatgatcctgaggcctggtagtgacagtagaaactactccatcactattcggcaggagatagacattccaagaatcaagcactacaaagtgatgagcgtaggacaaaactacactattgaactggaaaaacctgtaacactcccaaaccttttcagtgtcattgattattttgtgaaggagactcgaggaaatttaagaccatttatatgttcaactgatgaaaacactggtcaagaacccagtatggaagggagaagtgaaaagttgaagaaaaatccacacattgcatgaaatacaatgtgaaagctcctttgtatatcttggtaatttatattttcaaaacgaagttcttacttttaaagagaattacctatattctcctgatactgattaccaagtcattcacctgaacaccagaattagaattaaacattgtaccatacaatttcattatcttatcagaatgaaaccaattcacagggaaactagagactacggctgtggtggtaacctgcagatatacacattcccatgcactgacataagttgaaaacacatagtactttctagatggaatttttttctttaggcctcaatgaaatacatttcccctatataattccaacagcagtttctctagttctaaattttaccaattcccaaaaaacctaagttttgctgaaatctgatttgaccaatttatcaaatatgtcattttaattacctagctggaagttagagacatgaaatgtactagaggagcccttttccaatggaaatattatataccacattttttgttaatggaaataaatgtctccattccc

SEQ ID NO: 222049 - DNA, 1000 bp, Homo Sapiens
aaacctacccaagattcttgtgagaatactgaagctcaccaaaagaaagccagtaagaagaaggcccctcctgtgactaaagatccctcatcattaaaggcaaccccagggattaaggattcatcagcagcacttgccacttctacaagtctttctgcaaaaaatgttattaaaaagaagggagaaattatcattttatggacaagaaatgatgaccgggaaattttattggagtgtcagaaaagagggccatcatttaaaacatttgcatatttagccgccaagttggataaaaatccaaatcaggtctcagaaagattccagcagctaatgaagctctttgaaaagtcaaaatgcagataagttgctgaattcctgggactcttaactgatattgcatactacacagaagcttcaaattcctcatgttttaaatgagcactagagggaggtttatcacctttttggttaccagatgataatctatatttgttattactcagtgactctctaatttcacatcagcatgttcagcttgtgctagtcatcattctgatttgcttatctgtttttggtcaaaatatttatttttaaacatgttagaacttaccaaaatgaaagcaacagtgatgtattgaaatcttagttttgatattttaaagaaatgactttctagattaaaaaaatagttttgtagcattttaaacttagtgactatttagttcaattgttcatccattttttatttgcttttataattgcctccttgttttggtatattgtaaaataatttaaataatgtatttataaatatgtataattatgatgtaaaataccgtgtgtatatgtatgtatgtgtgtttctgtatatgcacacacataaacggctttgcctagccaaggattttttttatctgtataaaactttttgtataaagtttgctttcaataacagtaatgtataataaaaccatgtaaagttttgttgtaaaaaaaaaaa

SEQ ID NO: 222050 - DNA, 1000 bp, Homo Sapiens; identical to SEQ ID NO: 116822

SEQ ID NO: 222051 - DNA, 1000 bp, Homo Sapiens
ccttggaggatttcagccgaacagcatccggaggtgcatttgtggtatcacaagtcccaagccttcccttgcctgaccaatacccaccaagtcaaatcacagaccttgatgccacagttcatgaggataagattattcttacatggacagcaccaggagataattttgatgttggaaaagttcaacgttatatcataagaataagtgcaagtattcttgatctaagagacagttttgatgatgctcttcaagtaaatactactgatctgtcaccaaaggaggccaactccaaggaaagctttgcatttaaaccagaaaatatctcagaagaaaatgcaacccacatatttattgccattaaaagtatagataaaagcaatttgacatcaaaagtatccaacattgcacaagtaactttgtttatccctcaagcaaatcctgatgacattgatcctactcctactcctactcctactcctgataaaagtcataattctggagttaatatttctacgctggtattgtctgtgattgggtctgttgtaattgttaactttattttaagtaccaccatttgaaccttaacgaagaaaaaaatcttcaagtagacctagaagagagttttaaaaaacaaaacaatgtaagtaaaggatatttctgaatcttaaaattcatcccatgtgtgatcataaactcataaaaataattttaagatgtcggaaaaggatactttgattaaataaaaacactcatggatatgtaaaaactgtcaagattaaaatttaatagtttcatttatttgttattttatttgtaagaaatagtgatgaacaaagatcctttttcatactgatacctggttgtatattatttgatgcaacagttttctgaaatgatatttcaaattgcatcaagaaattaaaatcatctatctgagtagtcaaaatacaagtaaaggagagcaaataaacaacatttggaaaaaaaaaaaaaaaaaaaa

SEQ ID NO: 222052 - DNA, 1000 bp, Homo Sapiens
cttcttcttcaatagaggaattgttctgggggtcctggagacttaccattgagccatgcaatctgggaagcacaggaataagtagacactttgaaaatggatttgaatgttctcatcccttttgcagcttttctttttggctctctcatgtccttggcttgctcctctattctacctctctttctccagcaataatatgcaaatgaagacatgtatccataagaaggagtgctcttcatcaactaatagagcacctaccacagtgtcatacctggtagaggtgagcaattcatattcaaaggttgcaaagtgtttgtaatatattcatgaggctggaagtaagaagaattaaaaatttgtcctaattacaatgagaaccattctaggtagtgatcttggagcacacatgaataactttctgaaggtgcaaccaaatccatttttatttctgcctggcttggtcacctctgtaaaggtttaacttagtgttgtcaagtaacagttactgaaagagctgagaaaaagaacaatgaacagcaacgatcttgactgtgcaactcagacattcctgcagaaaagacatatgttgctttacaagaaggccaaagaactatggggccttcccagcatttgactgttcattgcatagaatgaattaaatatccagttacttgaatgggtataacgcatgaatatttgtgtgtctgtgtgtgtgtctgagttgtgtgattttattaggggcatctgccaattctctcactgtggttccttctctgactttgcctgttcatcatctaaggaggctagatccttcgctgacttcaccattcctcaaacctgtaagtttctcacttcttccaaattggctttggctctttctgcaacctttccattcaagagcaatctttgctaaggagtaagtgaatgtgaagagtaccaactacaacaattctacagataattagtggattgtgttgtttgttgagagtgaaggtttctt

SEQ ID NO: 222053 - DNA, 1000 bp, Homo Sapiens
ccaaggcggtccaggttcaccaagacactctgcgcaccatgtactttgcttgacatgttttagtgtttagcgattgtgtaccgagtgggattcacgagaccagctacactcagaccaacagatggccagcccttccgtgacagccagcatcgaacatgagacgtcattgattttattagattctccgttttccagaatgccttccgtcccagatttcaaacttggattttgaactgcagacctgtatgagaacccaatgtcataggaaatatggtttgctaaaatctataagctgcttattaaaacaaagtcccatgtgtcctaaaaatctcctaaaaccagtctatgaactcagggctttaaaacatttttaatttatttggtcattcaatttacttgtttttaatacatgattctctatgaaattgatgggctcaaactagctgtgaatcttctgagagtgaaagcaacacaaaacacaagtgtggttttaaagccttgaacattctgatgttgtcactaaagttgatttccaggcgatgctcgtgtgcccctggcgtggctcacccaagttcctcgactgagggccggtggccatgcagaggcgtccgcaggtgccgtgttctgccagcaccgcccttcacccggcctgaactaaggagcagtggcagaaggtgggccccgtgtgtttacagcatttccaggtccagagaggttggcagacaagtgccattttaataaaaaatgtatttaaaaaaagaaaaaagacaatatactgacagtctaatcatcagatttgtcctataggactgtgacatttattttccaaagtttttaaagaatacgggtctgtggtgataaatacagtacaatcctttttcactgttatgtctttaatgtaagagaaaaatatatatatctggtttgcagtaaaaaaaaaaaaaaaaaaaaaaaaaaaaaaaaaaaaaaaaaaaaaaaaaaaaaaaaaaaaaaaaaaaaa

SEQ ID NO: 222054 - DNA, 1000 bp, Homo Sapiens
tgtggagcaggatcatcgaggaccctgcccgctcagccggcttccaccccagtggctctgtcctggctgtgggtacagtgactggcagatggctgctgctggacacggagacccatgacctggtggctatccacacagacggcaatgaacagatctcagtggtcagcttctccccagacggggcgtacctggccgtgggctcccacgacaacttggtgtacgtgtacacggtggaccagggcggccgcaaggtcagccgcctgggcaagtgctcgggccattccagttttatcacccacctggattgggcccaggacagcagctgctttgtcaccaactccggggactatgagattctgtactgggacccggctacctgtaagcagatcaccagtgcggatgctgtgaggaacatggaatgggccacagctacttgtgtcctagggtttggggtgtttgggatctggtctgagggggcggacggcactgatatcaacgctgtggcccgctctcatgatgggaagttgctggcttcagctgatgactttggcaaagttcacctgtttagctacccctgctgtcagcctcgagccctcagccacaagtacggtggacacagcagccatgtgacaaatgtggccttcttgtgggatgacagcatggccctgaccacagggggcaaggacaccagtgtgctacagtggcgggtggtctgatgcggccagggaagagtcaggtgtcagggcaggaattctattttcgggagatgtctattgccgagtagagtaatatatacccagagtatgtctatagcagagggggttatgggggcgggagggtagactgacatacagaagtctctatttatccgggtgggaagagggagtcacatcgctttggggatccattggtgtttggtttggggtgttttttaagttttttcttttatatcatccagaaataaagacacgtacactaaaaaaaaaaaaaaaaaaaaaaa

SEQ ID NO: 222055 - DNA, 1000 bp, Homo Sapiens
cctttcctctagaagacctgagtcttcctgaccgactccaccatcacccaatctgttgattctccattgggaaaggcatttacaggtaaaagacttctgtatggattgcagttactctggtgatagttttcacctttattctgctgtgaaacaatcaaatcaaagccttgtgtcagttaacacatgacaagtggtctcaatgcagctaggaccatgccagaaacctggatctcttaagagattggtacctacctaggtacgaaagttctacccttggcatactcagcattcctcaaaaagaccatcagtgttagcacaaactgagcagaaaaaataagctgttgattttctacctgatacttaagccagtggcctactttaattcacaattccattttgattagcaggacttttccactttgaagataaatagcaactttatcaaagtgactgtactgcaaattaattcataatgcctgatagttttatatatagagacttatgtggaaggcatgttaataggtttccatgagacaccaaagaaaagaggactctatactgggtggagcagggtcttcacctttttgtttctgtcaacttgtcatatacacctccagggaccaaaaacaaaagcagctcggagtctgtgttgcctgattggaaagtagaagctctggtgtatgctacagcacataacacatttttactaaaggaaaaaagctaattatgtccatgcctctcgtaaaactggggggaaccttaaagagaaagaactaaggcttaagttatctgtagtataatcaattagaagtaatgaatggatgcatgtaaaatggatgtgattttttttcaagcttattttgaaatcttaaaaatcaggttacaccatagctactcaaaagttttacacacttaaaactcagatcagtaagtgttggtaccttttagactcataaaattgaataaaccattgcaatgctttaaaaaaaaaaaaaaaaaa

SEQ ID NO: 222056 - DNA, 1000 bp, Homo Sapiens
ctgccgcctggtgtgcctgcgctggaaggagctggtggacggcgccccgctgtggctgctcaagtgccagcaggaggggctggtgcccgagggcggcgtggaggaggagcgcgaccactggcagcagttctacttcctgagcaagcggcgccgcaaccttctgcgtaacccgtgtggggaagaggacttggaaggctggtgtgacgtggagcatggtggggacggctggagggtggaggagctgcctggagacagtggggtggagttcacccacgatgagagcgtcaagaagtacttcgcctcctcctttgagtggtgtcgcaaagcacaggtcattgacctgcaggctgagggctactgggaggagctgctggacacgactcagccggccatcgtggtgaaggactggtactcgggccgcagcgacgctggttgcctctacgagctcaccgttaagctactgtccgagcacgagaacgtgctggctgagttcagcagcgggcaggtggcagtgccccaagacagtgacggcgggggctggatggagatctcccacaccttcaccgactatgggccgggcgtccgcttcgtccgcttcgagcacggggggcaggactccgtctactggaagggctggttcggggcccgggtgaccaacagcagcgtgtgggtagaaccctgagcgaccctgcctccactctcccccagctgcctggaggggcaaaggtcgagggtagataggccttaacttagtccatagcgtcctcaccttccccaagccacacatcctcctcccatcccttgctccgatcccagcccctgagcagggagagagaagttttgttggcataggtttgcttaggtagccggcttctagaatgtagatccgtgagggcgtgagcttggactggacccactgctgattccctgcacctagcacagtgcttgccacaaagtgggctctcaataaatattatttgtccaaaaaaaaaaaaaaaaa

SEQ ID NO: 222057 - DNA, 1000 bp, Homo Sapiens
attgcttaagatacgcagccattccatattcatctccaactacacaggggaacggagcagatagagctgcgactgggaagcgtcaccttcccgtccagagcgctttctttcagaccctgcctacctgcaggcagatggaccggagggttttctgcttcctttcaaccagataacttcctaagtggagatggcctgtaggtagcaaatgcaggattttgtttactttcatcatgtcatgtggtggtcagactgctcgctggtggcctcgctttagaaggttttcatcaagccccgccctttctctctcatagtcttaatgcgtctggaccactggggaaaatatttttcttttcaaaaagcagccccttcagtctgcgttcccagttcattttgcaggcgcattcgcccttcctagtttgcagcaattaaagataacggagtgtaaagtcattagacccagaattagagcagccagcagctggcccagtgtaaaaatgtcccaagtgtagcccctcccaccgcagagcctgtttctaacgtacctgccattcgtggaagtcgcctgggttttgtaaaggagaattttttggactcaagctgtcatcttcaagcacgccaacttcaggcagtgttttctactgcaaacctccacatcctggaatcaatcacactgacagggaaaggataaatgctcctttataagccaacatgtatccaaattaagcccccttacctttatccagaccctttcacaaacaagttctgagtttttagccaattgatcctctactttccttctttagtccctctcagggacgcctccatccccggctcccctaaaggtagaagatactcgagcatgctgccaggggagctggatggtgaaacacctgaagatctcatatcgcctctcaaaacactgtcggacttgctttctgctttatgatgtccgtagttgttctaatattaaatgctttgaatttcaaaaaaaaaaaaaaaa

SEQ ID NO: 222058 - DNA, 1000 bp, Homo Sapiens
aaccagagatgaccttcaatcctggtccaactgagcttaccctggatcctgaacaccagccagaggagaccccagctcctagcctggctgagttgaccctggagcctgtgcaccgccgacccgagctcctggatgcttgtgctgacctcatcaatgatcagtggccccgcagccgcacctcccgcctgcactccctgggccagtcctcagatgccttccccctctgcctgatgctgctaagcccccaccccacacttgaagcagcacccgttgtggtgggccatgcccgcctgtcacgggtgctgaaccagccccagagcctcttagtggagacagtggtggtggcccgggccctgaggggccgtggctttggccgccgcctcatggagggcctggaggtctttgctcgggcccggggcttccgcaagctgcatctcaccacccatgaccaggtgcacttctatacccacctgggctaccagctgggtgagcctgtgcagggcctggtcttcaccagcagacggctgcctgccaccctgcttaatgccttccccacagccccctctccccggccacccaggaaggccccaaacctgactgcccaagctgccccaaggggtcccaagggacctccattgccaccaccccctcccctacctgagtgcctgaccatctcacccccagttccatcagggcccccttcaaaaagcctgctggagacacaatatcaaaatgtgagggggcgccccatattctggatggaaaaagacatctgaggccatccagggcaaggaactgtctttctggttcaatagactgccccgacagtctacaagcctcagcccactgaccatacctcagcccctagcccctggggggcagctttaacctgggcatgtttcctgggtaccagtggggccaggaggtggctctggctcagagccgtcagtgtggctgaataaaggctctcttgggtaaaaaaaaaaaaaaaaaaaaaaaa

SEQ ID NO: 222059 - DNA, 1000 bp, Homo Sapiens
agcggcttcgggagggcgagcctggctgggttcatccccgtggtgtcgagcagcggaacaaggccctggactggctccggggcagagggggtgctgtgggtggggagaaggacccaccaccaccagggacccaaggagtcgtctactttgctgacgatgacaacacctacagccgggagctgtttgaggagatgcgctggacccgtggtgtctcagtgtggcctgtggggctggtgggcggcctgcgattcgagggccctcaggtacaggacggccgggtagtgggcttccacacagcatgggagcccagcaggcccttccctgtggatatggctggatttgccgtggccctgcccttgctgttagataagcccaatgcccaatttgattccaccgctccccggggccacctggagagcagtcttctgagccaccttgtggatcccaaggacctggagccacgggctgccaactgcactcgggtactggtgtggcatactcggacagagaagcccaagatgaagcaggaggagcagctgcagcggcagggccggggctcagacccagcaattgaggtgtgatggcggccccaccccaactaccacctcttttcaggcacagaccttgtgggactgggccccaggcctgcccaggatgtggttttccaagtcctgacccttggagccagaagtggcccctctgcccctccaggcccagggcatggtcctgctgcttcacccctcccctagcctgccgtgtggcactgcccacaggctggggacaagcagcccttgtgttgagtcaggttggccctgtctagggtggaacagaaggacagatggacccaggagggagggcagctgagtaactgggtaacttattggggctgggcatgcactggggggctggaggagctgggctggacccttcccacctgagcatgctgacccccttcctacctccagaataaagaatctcaacctggaaaaaaaaaaaaaaa

SEQ ID NO: 222060 - DNA, 1000 bp, Homo Sapiens; identical to SEQ ID NO: 116833

SEQ ID NO: 222061 - DNA, 1000 bp, Homo Sapiens
tggcagccaaaagattgaaggaaggtgatacaatgatggggcagcaagtggccaaagttgtggaaagtaaaaatgtagccctaccaaaaggaactattgtactggcttctccaggctggacaacgcactccatttctgatgggaaagatctggaaaagctgctgacagagtggccagacacaataccactgtctttggctctggggacagttggcatgccaggcctgactgcctactttggcctacttgaaatctgtggtgtgaagggtggagaaacagtgatggttaatgcagcagctggagctgtgggctcagtcgtggggcagattgcaaagctcaagggctgcaaagttgttggagcagtagggtctgatgaaaaggttgcctaccttcaaaagcttggatttgatgtcgtctttaactacaagacggtagagtctttggaagaaaccttgaagaaagcgtctcctgatggttatgattgttattttgataatgtaggtggagagttttcaaacactgttatcggccagatgaagaaatttggaaggattgccatatgtggagccatctctacatataacagaaccggcccacttcccccaggcccacccccagagattgttatctatcaggagcttcgcatggaagcttttgtcgtctaccgctggcaaggagatgcccgccaaaaagctctgaaggacttgctgaaatgggtcttagagggtaaaatccagtacaaggaatatatcattgaaggatttgaaaacatgccagccgcatttatgggaatgctgaaaggagataatttggggaagacaatagtgaaagcatgaaaaagaggacacatggaatctggaggccatttagatgattagttaatttgtttttcaccatttagcaaaaatgtatactaccttaaatgtcttaagaaatagtactcataatgagtttgagctacttaataaaatacatttaagtggtaaaaaaaaaaaaaaaa

SEQ ID NO: 222062 - DNA, 1000 bp, Homo Sapiens
tattctctgggtgaaagtctgcaaccctgaaaaagatgcaaaacattgtgatagacagaaagcaaatctgcgaattcgcttcagaccttcccttttccaacatgttggtctgcactcatcactatcaggaaaaatccaaaaactcacggataaagattatatgaaaccattacttcttaaaatccatgtaaacccacctgcggaggtatctacttccttgaaggtctaccaagggcatacgctggagaaaacttacatgggagaggatttcttctgggctatcacaccgatagctggagactacatcttgtttaaatttgataaaccagtcaatgtagaaagttatttgttccatagcggcaaccaagaacatcctggagatattctgctaaacacaactgtggaagttttgccttttaagagtgaaggtttggaaataagcaaagaaaccaaagacaaacgattagaagatggctatttcagaataggaaaatttgagaatggtgttgcagaaggaatggtggatccaagtctcaatcccatttcagcctttcgactttcagttattcagaattctgctgtttgggccattcttaatgagattcatattaaaaaagccaccaactgatcatctgagaaaccaacacattttttcctgtgaatttgttaattaaagatagttaagcatgtatcttttttttatttctacttgaacactacctcttgtgaagtctactgtagataagacgattgtcatttccacttggaaagtgaatctcccataataattgtatttgtttgaaactaagctgtcctcagattttaacttgactcaaacatttttcaattatgacagcctgttaatatgacttgtactattttggtattatactaatacataagagttgtacatattgttacattctttaaatttgagaaaaactaatgttacatacattttatgaagggggtacttttgaggttcacttattttactatt

SEQ ID NO: 222063 - DNA, 1000 bp, Homo Sapiens; identical to SEQ ID NO: 116836

SEQ ID NO: 222064 - DNA, 903 bp, Homo Sapiens
ggatgggagcaggggcagagacgggcagagggcagagggcggcagcgccggagcggcgtcatggccggctcctctggttgctccggggcctgaccctcggaactgcgcctcggcgggcggtgcggggccaagcgggcggcggcgggcccggcaccgcggggatcgtgggggaggcagggtctcttgcaacgtgtgagctgcctcttgccaagagtgagtggcaaaagaaactaaccccggagcagttctacgtcacaagagaaaagggaacggaaccgcctttcagtgggatctacctgaataacaaggaagcaggaatgtatcattgcgtgtgctgcgacagtccactcttcagttctgagaaaaagtactgctctggcactgggtggccttcgttttctgaggctcatggtacgtctggctctgatgaaagccacacagggatcctgagacgtctggatacctcgttaggatcagctcgcacagaggttgtctgcaagcagtgtgaagctcatctaggtcacgtgtttcctgatggacctgggcccaatggtcagaggttttgcatcaacagtgtggctttgaagttcaaaccaaggaaacactgaccatcttcaagagtcccgttcccttgccaccccttcacgtgcaccctcaatttccacaattcacttgaatgacttgttttatttgcaataaaactgggctgaatttgctgctgtctccagcgagtcattgcttctcttaatttatttacctggaatcaacttaatcctgtgtgttaggctgttcttgtgttgctataaagaagtacctgatcaggatctgggagaattgaaaaaaaaagaaaactagaaaattaaccaaatttaaaaggaaaaaaaatacctgagactgagtact

SEQ ID NO: 222065 - DNA, 1000 bp, Homo Sapiens
tggcaaggctgcttctctatcactggctttgcacagaagtatgctctacttgcgttgctttagggcaggattctattttgagggaaaagacagtatccttattaccttttgtttgtttaatagcacaaatgcttatttgttatccaaaaacaacctccttcttatctgtgataaatctatagaaagaatttagctgcaagtggacaaaggaacaagcccccagaaaagaaagggaagaactgccttcttatactacagaacatgcattagtgtgggctatatagctgtggctcatgctacccaattccagatttctttgtcctctaagagttgattgctgtatattaaaattgaacatcagaggatgggaagagggctctgtaagccagaaccttactaaagtagagggcacaatcagtgtgaataaattcacttcagaatctcaagtcaaggccaggcacggcggctcacgcctgtaatcccagcactttgggaggccgagacaggcggatcacctgaggtcgggagttcgagaccagccttaccaacatggagaaaccccatctctactaaaaatacaaaattacctgggcgtggtggtgcatgcctgtaatcccatcatctactcaggaggctgaggcaggagaattgcttgaacccaggaggcggaggttgcagtgagccaggattgtgccattgcactccagcctgggcaacaagaacaaaactccatctcaaaaaataaaaatcccaatcccaagtcgaaatcacctcttgttttaaacaagaatgaatcattactgtgtatgttagggtattaaaactgtttcaccagtacagtgaaagttgtttcaacattttaaacaaacagtggttatagactctttctttaaccattgtatattttcttccattcttgtcattggtcaataggggagggtagattagctgctccagaattcaataaagtgtaatatttctaaaaaaaaaaaaaaaaaaa

SEQ ID NO: 222066 - DNA, 1000 bp, Homo Sapiens
gccaggggcggacggggctgactcctgctctctggaggacggtcagtccatgtctcggagaaacgggtgagctgagcttggcgtttggacccagttcagtgaggttcttgggttttgtgcctttggggcagaccccaggcaaggatgtctgagaccacttgggcgctgttttctcagctccaatttcaagagtgagctatcaaacccagagcggaaggagggagctctgatgagcacggtttgtcacacgataaagggattttttttttcagggctactacggttgatcttgcaactctgtaaatatgtatgtagacacttttaaaagcacgtatttatgtccctgactgtaaatgctccatttttaaagttttataacttgtgttatttaatgagtcagtcaatcggctgcagtatgggatctgataaggatctaggagaagggtctcatgcggaccctcacatgggcagaaaaatggtggtcattggccgacatcacagttttcctgtttcccacccagctaaaaaccgttgtttgctttaaattttcataaactggaatcctttcacccgctcctacagctaaccctcacaagcatgaagtgctgtggctgttccttatcctaatgatgcgcttttgtcccgtaaatgttaacactcatgaagcataccccggcctctcagttcttgagggcctccccaccgcagcagcaaggaaagctcacgaaccccaaacctggcaagtcacctgcagcccatggtgagctctgggaagtgtggttgaggccttggggtcactccttttttgcatgtgcaaatgtgctggtcacccttcaacgctcccagacggtcaggaaaactgttccaatcatgaaaaggggggatgattttgtaaaagtggcatttcctggtcagtggtggtcttcaagacgacagctctgtatctgccatgtgaagagaattaacaataaaagtgtgaagagcgattgtgaggaacaag

SEQ ID NO: 222067 - DNA, 1000 bp, Homo Sapiens; identical to SEQ ID NO: 116839

SEQ ID NO: 222068 - DNA, 1000 bp, Homo Sapiens
ccctttccaagagactccttgtgatgactggggcaggaatctccaccgaatcggggataccagactacaggtcagaaaaagtggggctttatgcccgcactgaccgcaggcccatccagcatggtgattttgtccggagtgccccaatccgccagcggtactgggcgagaaacttcgtaggctggcctcaattctcctcccaccagcctaaccctgcacactgggctttgagcacctgggagaaactcggaaagctgtactggttggtgacccaaaatgtggatgctttgcacaccaaggcggggagtcggcgcctgacagagctccacggatgcatggacagggtcctgtgcttggattgtggggaacagactccccggggggtgctgcaagagcgtttccaagtcctgaaccccacctggagtgctgaggcccatggcctggctcctgatggtgacgtctttctctcagaggagcaagtccggagctttcaggtcccaacctgcgttcaatgtggaggccatctgaaaccagatgtcgttttcttcggggacacagtgaaccctgacaaggttgattttgtgcacaagcgtgtaaaagaagccgactccctcttggtggtgggatcatccttgcaggtatactctggttacaggtttatcctcactgcctgggagaagaagctcccgattgcaatactgaacattgggcccacacggtcggatgacttggcgtgtctgaaactgaattctcgttgtggagagttgctgcctttgatagacccatgctgaccacagcctgatattccagaacctggaacagggactttcacttgaatcttgctgctaaatgtaaatgccttctcaaatgacagattccagttcccattcaacagagtagggtgcactgacaaagtatagaaggttctaggtatcttaatgtgtggatattcttaattaaaactcattttttttaaataaaaaattgttcagctttaaaa

SEQ ID NO: 222069 - DNA, 1000 bp, Homo Sapiens
ccaagcataggagaaaaggctctcatggactagaaatattccagcgttgttactgtggagaaggtctgtcttgccggatacagaaagatcaccatcaagccagtaattcttctaggcttcacacttgtcagagacactaaaccagctatccaaatgcagtgaactccttttatataatagatgctatgaaaaccttttatgaccttcatcaactcaatcctaaggatatacaagttctgtggtttcagttaagcattccaataacaccttccaaaaacctggagtgtaagagctttgtttctttatggaactcccctgtgattgcagtaaattactgtattgtaaattctcagtgtggcacttacctgtaaatgcaatgaaacttttaattatttttctaaaggtgctgcactgcctatttttcctcttgttatgtaaatttttgtacacattgattgttatcttgactgacaaatattctatattgaactgaagtaaatcatttcagcttatagttcttaaaagcataaccctttaccccatttaattctagagtctagaacgcaaggatctcttggaatgacaaatgataggtacctaaaatgtaacatgaaaatactagcttattttctgaaatgtactatcttaatgcttaaattatatttccctttaggctgtgatagtttttgaaataaaatttaacatttaatatcatgaaatgttataagtagacatacattttgggattgtgatcttagaggtttgtgtgtgtgtacgtatgtgtgtgttctacaagaacggaagtgtgatatgtttaaagatgatcagagaaaagacagtgtctaaatataagacaatattgatcagctctagaataactttaaagaaagacgtgttctgcattgataaactcaaatgatcatggcagaatgagagtgaatcttacattactactttcaaaaatagtttccaataaattaataatacctaaaaaaaaaaa

SEQ ID NO: 222070 - DNA, 1000 bp, Homo Sapiens; identical to SEQ ID NO: 116841

SEQ ID NO: 222071 - DNA, 1000 bp, Homo Sapiens
caagaagagtttggagccatgagagaacagtatatgaggactggcgaaggcttcctgttggtcttttcagtcacagatagaggcagttttgaagaaatctataagtttcaaagacagattctcagagtaaaggatcgtgatgagttcccaatgattttaattggtaataaagcagatctggatcatcaaagacaggtaacacaggaagaaggacaacagttagcacggcagcttaaggtaacatacatggaggcatcagcaaagattaggatgaatgtagatcaagctttccatgaacttgtccgggttatcaggaaatttcaagagcaggaatgtcctccttcaccagaaccaacacggaaagaaaaagacaagaaaggctgccattgtgtcattttctagaatcccttcagttttagctaccaacggccaggaaaagccctcatcttctctttctctcctcagtttacatcttgttggtacctttctagccttagacaaatgatcaccatgttagccttagaccaagaagctggctagtcctttctgtgaagctaatacaatggtcatttccagacaaatttaaaggaaacactaaggctgcttcaaagattatctgattcctttaaaatatatgtctatatacacagacatgctctttttttaagtgcttacattttaatagagatgaatcagttttggaatctaagctgtttgccaagctgaagctacaggttgtgaaataatttttaacttttggaatcatactgcctactgttactctaaatagaaatatagggttttttttaatgtgaatttttgcctatctttaaacatttcaatgtcagcctttgttaaccttaaatacactgaattgaatctacaaaagtgaaccatctcagacctttactgatactacaacttttgttttctgatggccaaaataccaaatgcctgttgtatttatggattaaaaactgcttataaaaaaaaaaaaaaa

SEQ ID NO: 222072 - DNA, 1000 bp, Homo Sapiens; identical to SEQ ID NO: 116849

SEQ ID NO: 222073 - DNA, 1000 bp, Homo Sapiens
ggaggtggggagagctagcccaggccaggggtcaatgttcatgtcactagctttcaatccagtttccactgcagtggctggagagtgacctgagtgctacttgaagatatgtagagattccttatccatgcctgtacatagcatgtcctcctcccctcagctttgctaataccagtcccctcccttccctttggcttcctgctgttgggggtggaaaagactagaaaggacattgctttctcagccccacccccaggtccacagtgtccaaggtaatggcacacatattcatgcacaagaagcactcacctagagctgtctgtgcctctctgggagaaaggagagaggataagaagggaaagttcacaacctgtgaacagggacttgagcacgagacacttttcatctggagcaggggggtgagctcctcagcagcctccgtaacagctgccctgcctacacctgcagagctggaggttctgtcctccctgctgctctcaggagtgttcaagggtggagggcagggaatggggcctgaggtattaaggctaagaggtgggggacagggcccatctaccagccttcatcaggaagggaaagggctttggggtcaggtggcagctattccccaccaagagattcagggtcacaggtttttccccacacctctgaactcagggcctagccacccccaaacttccaaatcccacttttgtgatatgtgaagctactcatttcttacccttggaggctgtgtggggaatttccagcccttttatgcctgtgtgatcccaccccacccccatagttgtataaaggtcatagtgaagaagctgggggaagactgcttcagccagatcctggggtggggtctttaggttttctcactttgacaacccccgaatgtttttatagtagtttttttgtatttttttgtaatgacagtattatgtaaaaaataaagtattttaaaaatatggaaaaaaaaaaaaaaaaaaaa

SEQ ID NO: 222074 - DNA, 1000 bp, Homo Sapiens
ttgtgtcaaagaagcccctagctgctctcgtggcctccttcccccactccctatcccttcacctgtgaaatgcctttgctttgcatattgtgtgtggatgtgtgtgtgtgtgtgtgtgtgtttgtgtgtatgtgtgtgcttctgtgtgtgcctaatgctctgtctcttggtcactgaagcatccaaataaagaatttccctcatgggccagactacaacttaacagacctagggttttgagccatattgccattggatctagtatgtctgtcttgacccctcacccccaccccattcagacctcagtagtccccagtagtcactttaggagttgggacagagtcgagcaccctgtgaaagtctcccttgagttcaggtgccctgaactcagtacagcctcatcttctcatccaccaccttctcctgcttctcctgtcacatagggcctcatgaaggtctttaaagggtttaagctggggatctgctttatgtttgagagaactgttctggctgttatgtaaaggagtgcagggaggggcaggaaaggagacaaggaggccagtatggacactgtgtccagtatggctttccaggctaatcacttagggcagagacccagccttattcatctctacttcctgatgtccatagtggtgtgtcatgaatttttattgaatgaacaaatgaggtgtatgaggagagatggttttctcctgctcagctcttacacagtgataggtttgttccatgggacttatcataggcctggtgattcttgaaagagcatttttcatgactcaaaaatgagctgagaaggagtgttatggccaggtgcggcgtcatgcacctatagtcccagctgctcaggaggctaaggcagaaagaccattcaagcccaggagttccagcctgaagtatgctgtgatcatgcctgtgaataaccactgcactccagccagggcaacataacaagactctatctaaaaaaaaaaaaaaaaaa

SEQ ID NO: 222075 - DNA, 1000 bp, Homo Sapiens
tcaggacattcaggccctggcctacgggctgtgcccaacccagccagagcgagcccaggagctcctgaatgaggcagtaggacgtctacagggcctgacagtaccaagcaatagccaccttgtcttggtcctagacaaggacttgcagaagctgccgtgggaaagcatgcccagcctccaagcactgcctgtcacccggctgccctccttccgcttcctactcagctactccatcatcaaagagtatggggcctcgccagtgctgagtcaaggggtggatccacgaagtaccttctatgtcctgaaccctcacaataacctgtcaagcacagaggagcaatttcgagccaatttcagcagtgaagctggctggagaggagtggttggggaggtgccaagacctgaacaggtgcaggaagccctgacaaagcatgatttgtatatctatgcagggcatggggctggtgcccgcttccttgatgggcaggctgtcctgcggctgagctgtcgggcagtggccctgctgtttggctgtagcagtgcggccctggctgtgcatggaaacctggagggggctggcatcgtgctcaagtacatcatggctggttgccccttgtttctgggtaatctctgggatgtgactgaccgcgacattgaccgctacacggaagctctgctgcaaggctggcttggagcaggcccaggggccccccttctctactatgtaaaccaggcccgccaagctccccgactcaagtatcttattggggctgcacctatagcctatggcttgcctgtctctctgcggtaaccccatggagctgtcttattgatgctagaagcctcataactgttctacctccaaggttagatttaatccttaggataactcttttaaagtgattttccccagtgttttatatgaaacatttccttttgatttaacctcagtataataaagatacatcatttaaaccctgaaaaaaaaaaaaaaaaaaaa

SEQ ID NO: 222076 - DNA, 1000 bp, Homo Sapiens
tgctgtcctcatcggaggccagtgccctgggccacctcagcttcctggagcagcagcagagcgaggccagcctagaggtggcttctggcagccacagcggcagtgaggagcagctggaggccacagcccgggaggacggggacggggacgaggacggcccggcccagcagctctcaggattcaacaccaaccagtccaacaacgtgctgcaggccccactgccccccatgaggctccgtggcgggcggatgacactgggctcctgcagggaaaggcagccggaattcgtgtgagctggggtggggctgggaccacaggtggcttctctcttgcctgctcctgtccctccagcacgtcccctgcaccacggcatagcttaggtgcgccgtcctggggtcgctgccgagagcgcctggacttcgacgtcccaccagcgggcgcctcctcccagaggcttccaggagcacgagggccttgcggcacaggactgtgccctgtgctgtcccctgcaccccggctcagctgagctggggaacactgctgtcgtgtgaagtcacagtggccttgttggtgcccacagggctgtgtggatggaggaagctgtccctgcccagtgcatcccccaggtcatcacggggacgcaggaggcaggccctgccctgccctctcctcacaggtctgttgcagggactccagaaaccattctgggagccgtggatgggggcggagctggggtttggtgcagtttccagggtgcagtacagcagggcctgaatactggccctggactcccttttccagaacaccaggtgtggccacctggggctcaggtacacagtggggtctctcggaagccaccgtgtggttctttcacaggcacgtttattttgctgaaataaaaagtttttaatcgggaaaaaaaaaaaaaaaaaaaaaaaaaaaaaaaaaaaaaaaaaaaaaaaaaaaaaaaaaaaaaaaaaaaaaaaaaaaaaaaaaaaaa

SEQ ID NO: 222077 - DNA, 1000 bp, Homo Sapiens
cacacaggccccctgcctggggctctccaaggagccttcttcacccacttccagctccacttctgcaaggttaagtcaagtgagaacgatgagaaatagggagatggtgtctccttaagtccttgatctgcctgtctgtggaatgggaggttggattagctgcgctgaggtcccatccacagctggtgctcagctgcttgaaggggagactccctcctctgtaacttctttctgggggattggggtgggcagtacctatccccagtcccctcctagcttgactttagtggtttccaatgtagaagttaacaaagtatgccccattcctgtgacaaaagcacaaccattctgaagttactggagcatgggctcagctcatcctccctctggccccttctcccatggggacatctcggcccagcacccctatcccatttccagagttcttccttccccatctgggccttcataaaatgcaggggaagccagactggtctcaggagcgctaaagcccttccgtggggggtcgtctttctgggactagccctgctgtttaggacctgggaccacaatggggtacctgccgagggggtccccaagagatccaggctgtcatgtgatttatggtggcatgtgttgtgtatttgttggctacttgtgtcttgaaatctagaattatttcacgcagaattgtcactgtttgtcaggaagagaaaatgggctagtggaagcccagtcttgagttcttgtcttgttaccatttaaaattgacatttaattttcaaatcactgttggtgcctaatcacttaagttattaatttattctgttgtattcttttttttaaattgtaacatatttatccggtgggtgggacaggagtgtgttcaagtgggtcatgtttttgctgtggtgacacatggtacaggcttggagcttgcaggtccctttctactgtggtgttggagcaggacaataaagtccactagaaatgcacccca

SEQ ID NO: 222078 - DNA, 1000 bp, Homo Sapiens
ctttcttccctgctgttttagcatttctttgtaaaatgttagcttcaattaattagccattggtacttactgtagctacacatattaaaaggcaaagtgtttctgaaggcaatttctttttaatatgcccgaatgaatgaggcttcatcctttccatattcttactctttacaggagttcaaatgcaaataagctccacctccctgcacttgtagtctaaaaagtaaaaggggcgatcaggtccatctcaaaggtcacacgtaatagcctccctgggctgatcattccctctccttgtaattgcagtatcctgagtagcagtttaattttcatcaaacatcggagtagtttagttgtttgacaggaggagaataaggctgaaagcctcaagtgaaggatcttgcagcttgtaaaagcaatttccaaaaatgaaacccattcatcgtaaacaaaagcacaaacacttgtagcagtttataatgcttttggtttaatctcaattagtctttctcccctggactagaaatccagtatagtttgccattaatttattgaatctggttttggacaatgcttctgtagtgtagctgcacgtcctggtactgtatcctctgactttattttccatgtattacaaaaggaaaaaaaaattgagattacactggcataaactctagtttgcacagttcacagctactacttgtgcagtaattgctttatgcggctgtaatccataacctgtgaagacagcacatcatctaaatcccattccaaataatatttgtgtagtgttagctgtgaatttaccctgtacagctgtatctctataaatataattccatgtattaatagtcacagaaagactgtaagtgagcaactatttttatgaaacgtaccactatggataaattaacttttacagaaatcttgtttactgtatgatattctaaaacactgtcaaataaaatatatatccaaaaatcttttctttttccaacta

SEQ ID NO: 222079 - DNA, 1000 bp, Homo Sapiens; identical to SEQ ID NO: 116852

SEQ ID NO: 222080 - DNA, 1000 bp, Homo Sapiens
agctcctgtttgtgaagggcgtctgttatgctcctgcagtcgccgaggccttggatgtgcagccaggggaggagcgtcctgccggccccgcagggcccccaggactccagggtaaagtgtgggccggtggcgcaagactcagaggtgtgctcgtctctttcctgtcagagtgggcgtccccaggccacggtgcaggcctgagtccttccaccggccccgtccagtcgtccctggaggggctgtggaggagggacgcctctgtgtggtcaggaagtgaaggggccattggccgcatgccatgtgccacctgcggcttgtgtctcacctgtcatctggactcagcacccaggctgcacgtctgacacctgagaggcgagagagtggggccggcctaggagccaaggctggggccttgcgctctgtccccaggatggtggccttgtttgtcctaaacacacccagcacaggttctggcttcctgacatgctgtggaggcagggagggtgggtggccacatgtgcttgagggttttcaccctggccctcagttgcctgctgtgcgggtccctggggcagctgcaggggctcatggacccatcagggtctccacagctcccctgcagtgtgtgcaccccacaatgtctgcggctcttcttccggcgtgtcgggctttgatcacagcatagccacgtcagtggcgtgcgcctctcgcacaggccattctgggtctggtggtgccaggtgccgtgacacgccgtgctgggcttgtgctgcagctgggtggtgtggccctcattctcatgttccagctgctgggcagtgctctgcctgtgtgctgcgcctgcaggctgcgtgtgctgccgtggatctcctgcatcccttgacccctcccgccatcagaggaaaggctgctccccgaggcaccgcttccctgtgcggcgctgcagaggggccctcagtgtggcactcctcgtcaaagaaaaataaaggctagaactgca

SEQ ID NO: 222081 - DNA, 1000 bp, Homo Sapiens
gggtggcaggtaccacagtgtaggcagcagggtcagggccaaagtctatgcgttccatctccaatccaggcagtgaggaatcctgaaacaccaggagaggcgtcagaagtaggaagggcaggggaacaggaatgcaagattaaggaaaccgcagctgagcaggtgtcacaagctgtaaaggaggaagggagtctgcaggcccttcacatttttggcctgggtggggctgggcccaggaaggggtgggctggattttgtaaagctggaggcagccaggaatctgactgtccggaatgtgagttgaggggtctcccactgaagtcctcttctggaagctgcagatgggggcccgggaggcacacacgagtctgggactcattcccgggcacacctatggctccttcggtatcacctggggaagccccggaatcttagttcttccattccctactcttccttccgagggagtcaggatgggacagacacccattttccaaaaggctccttgcctccttccctggcccacctgaagccaagtcccaggtgtcctggctgctctcctgggcggggtgggatttttgcataagcactttgctgccctccagtggctgcttgaggaaacgcagggcctggtttgggagagtcaccgagggcccatgtggctggaggttgggggcaggatctggcccgagctctcctcagacctccccagacctgtcttctcatcagccaccgctgttttcttttgccgaacgatggttgcatctctcggacacagtgtaccccctcccaagccctccctgagccgttctcctgagtccctgagggcagacacagctccagggacccaggccagctgccacacccccgacactcctgctgtccactggccttagctcctgcaagttccccagtgtccgcacctgttcccttccctgacctcaccttcctggggtctgtgactgactggagataaaaataaaagcaattgtgacacctg

SEQ ID NO: 222082 - DNA, 1000 bp, Homo Sapiens; identical to SEQ ID NO: 116853

SEQ ID NO: 222083 - DNA, 1000 bp, Homo Sapiens
ttcttctttggcctcaccagtgaaaacttgttgtctttagttcctaaagtttcttctactttggcacattccccagttgagcagcagcctctatgcttccacgttcaggaaaaattccagtcctcatatcttttgtagttcaccctcaagctctcccgcttcaccatccaatagtttctcccaaaccttggcacccccctagactttgcttccaatggtttcttccagaccacttttcctagatgaatatattcgtttaccttactaggaaaattattggaagattttttcttttacttgaaattggaggcattttaataactggcgaactggaatgtgtttctgtatttgtagacaaccatgaacccatgcaagtaggtgaacattccacagtggctgggtgaccacagcagctgcatgcagacaggactgcccgtgctttgtggggaatcagagaatttccaaacttgtttctcagacttccgcagatctcatcactttgatttctaatccatgctgtattggtgattttgtttatcgttcctgtaacttgttctacattccacagtctttaccgttttatgttcaaaattacaacaatccctgtccattgattccactctggaactctttgttcatgccaattttgaaattttaatacgagccttcaaataaacacagaaaagaaaaaaaaaaaggaaaaaaaataaagtgtgtgccttgggtgttttgaacctgatctgcataaaaccatattgtattcaaatgctgtatctttcatgaaaggataaatatatcttcaatgtattaatgtagctgataaaatagttatagtgccttgttttctgaactgagaagcccatatcaatgcacaacgtaaagaaaggacggttcgagctatgaaatgttgaggacacctacacgtgattctggagcctttctcatcataagactgtggaaaatacacagtcgtttaagttaaaaataaaaagtaaattga

SEQ ID NO: 222084 - DNA, 1000 bp, Homo Sapiens
tgtgggtgcaggaagcaaaagtcagactgtggtgtggactgttgctgtgaccccacaaagtgtcggaaccgccagcaaggcaaggatagcttgggcactgttgaacggacccaggattcagaaagctccttcaaactggaggatcctaccgaggtgaccccaggattgagcttctttaatcccgtctgtgccacccccaatagcaagatcctgaaagagatgtgcgatgtggagcaggtgctgtcaaagaagactcccccagctccctccccttttgacctcccagagttgaaacatgtagcaacagaataccaagaaaacaaggctccagggaagaaaaagaaacgggctctggccagcaacaccagcttcttctctggctgctcccctatcgaagaagaggcccactgaagttggagtcatcatctctacccccagtctggcttgggagatgctttcaggttgcagccagaaggggttttttaaatgacttctctggatttcaggtttcttgctgttgaaaaaaggaacaaagcgttactgaaaagaaggtaacctttgttggatgtgggccttagcctccaggtccagactactactctatgttctccagaagggtgctaagtcacctactgaagagagaaccaactgactttcctattgactcatcaggaaccagtcctcagtctggtcaagttgtttcttatttgtgagcagttcaggctatctcctgatggggatgaggccaaggctttcttatcttttggttgtctctgcttaatggaggagcctggcctaggatggaggcctggcttagatctttcattccacctcaggaatgaggttgtgatctttcctgtcctgaccctctctgaattatgtttcaatagtactcttgattgtctgccatgttgttgaagcaaatgaattatttttaaatgttaagtaagtaaataaaccttagcccgtctttttttttttttttttttttttttttttt

SEQ ID NO: 222085 - DNA, 1000 bp, Homo Sapiens; identical to SEQ ID NO: 116855

SEQ ID NO: 222086 - DNA, 1000 bp, Homo Sapiens
gcttggtccttttcctctctgcttggattctggaccaccacctgggaccaaccttcagctctggaaccttcataaagcaggtcagcgtggcctgattgtcccaggacctgaagggagcaaggatggcctcagggcctggtgaagtctgctactctgtccttactgctgaacatcctgcttgtatcaggaaactcagaagcagtttgccttgtcaaattcaatctcaatggccattgtccacataactgatcacccatggctgcctctcctattatctattatcactgaaacttagtagcctgctttttttttttttttttttagagctattgcgtatcttccctgtttgggatccttgtacctggtttgggttttcccttccttgtgacaattataatccagatgcctcttctttctgtttgaattacggtagtgcattgccttagtggcttgcctgtgcctctgggtggattacatatgatagtaaagcccacctgtttggatgggagtagaggaagttggtgtagaccagctgtggagctgaaggcacagtctgccccacccccacctccccactgtggttagtcagaggcatcctgctccaagctctgcttttccttcctctgaaacaatgccattcttgcttctattgctacacatctccttctggctcaggtgaaatccatgcccttctgcttatagacctaaagttcaggtacttattattggccattgatcttgaatttgccctctcctagtgctgcagtcccacttcaaagccattttctgaggaggatggtttaggtctggcaattgtccttgaaaaatcccacccatgttgtaccaccttggtgagtcatatgccactcatcagcttgggaatgatggctgccaactcccaatctcccaggaaggcagggggcagaatctttttttcacttggcctgctacctccattaaaaaaccattctcttacagtttaaaaaaaaaaaaaaaaaaa

SEQ ID NO: 222087 - DNA, 1000 bp, Homo Sapiens
ctcgggtgacccttcccacacaccagccacagataggcctgccactggtcatgggtagctagagctgctggcttccctgtggcttagctggtggccagcctgactggcttcctgggcgagcctagtagctcctgcaggcaggggcagtttgttgcgttcttcgtggttcccaggccctgggacatctcactccactcctacctcccttaccaccaggagcattcaagctctggattgggcagcagatgtgcccccagtcccgcaggctgtgttccaggggccctgatttcctcggatgtgctattggccccaggactgaagctgcctcccttcaccctgggactgtggttccaaggatgagagcaggggttggagccatggccttctgggaacctatggagaaagggaatccaaggaagcagccaaggctgctcgcagcttccctgagctgcacctcttgctaaccccaccatcacactgccaccctgccctagggtctcactagtaccaagtgggtcagcacagggctgaggatggggctcctatccaccctggccagcacccagcttagtgctgggactagcccagaaacttgaatgggaccctgagagagccaggggtcccctgaggcccccctaggggctttctgtctgccccagggtgctccatggatctccctgtggcagcaggcatggagagtcagggctgccttcatggcagtaggctctaagtgggtgactggccacaggccgagaaaagggtacagcctctaggtggggttcccaaagacgccttcacgctggactgagctgctctcccacagggtttctgtgcagctggattttctctgttgcatacatgcctggcatctgtctccccttgttcctgagtggccccacatggggctctgagcaggctgtatctggattctggcaataaaagtactctggatgctgtaaaaaaaaaaaaaaaaaaaaaaaaaaaaaaaaaaaaaaaaaaa

SEQ ID NO: 222088 - DNA, 1000 bp, Homo Sapiens
acagtggacagggactcagaaatgtggtgggagggcctccctggcttgggagaccgctctctgcaagggagggggagagaagcagagggagagagaaggtgacacggatggaagagtgggaaggagctggcctggctcagccctaggctgtccctgcagccagggtgtccgggggctggccagtcagagaaagggggccatggactgctgtggcaaatagggagacaaggagacagaccctgcagtcctactacagtctggagtggggtcctaagaagaagggtcccacctcaacccctgtcagtgtccactgtggggtgggggctgacccctgcctttgattgtcattctcctgggaagcccagtctcagtccctcccccaacactgtccacactgcccctccccactgtttatttattgcacggatctaagttattctccccagccagagcccgagctcctgctccctgggaaaagtggcgtatggccctgagctgggctttatattttatatctgcaaataaatcacattttatcttatatttagggaaagccggagagcaacaacaaaaaatgtttaagccgggcgcggtggctcacatctgtaatcccagcactttgggagtccaaggagggggatcgcttgagtccaggagtttgagaccagcctggacaacatggtgaaaccccgtctctacaaaaaatacaaaaattagccatgcatggtggctcatgcctgtagtcccagctacttgggaggctgaggcaggaggatcacttaagcccagaaggcagaggttgtagtgagctgagatcgcaccactgcactccagcctgggcaacatagcaaaatcctgtctcaaaaaaaaagttaaaaaatattgcccggctcctagaatttatttatttcctgacttacagcaagcgagttatcgtcttctgtattttgtagactttctaaataaagtcaaattctttctttttccacagagaaaaaaa

SEQ ID NO: 222089 - DNA, 1000 bp, Homo Sapiens
acctagcttggtttaccagtgatggaaaagtattttgatatcattaactttttcaaaagatccaactttttctctatgcctttgccacattctcttcagggtctctttccacagtggataaatgttttttctgtattatgacagtattgttgtgatggccatctgctggaaactcctgaagagcattatgtattacagtgagcagttgtattgcctgtttggtgcccaatggttaagtcattgtcacttagctttatattgtcagtttgatatttattttaaattgtggaactagatgcataaattcacatttctgcctttcctttgcatcttctcatatattgtgtttttttttttttttcctagaaaaaatatttaaagcattgtttgacaggtagaaactcatgtatctgtagtccatgagttatatcctggctcagtggagtgatatttatgtattatttttacttttctctcagtgtcttatattaagattaacatgttgttaatagttgctttgttgattaatctctcttgttggtgttttaataaatgaaataggcttgcctttagatcgggtgctgatattgcctgtttcctagtaatgggctgatcaaatgatcagtggaattcttggtttgatgataaccttattaattgaaattttttactgatgtggctttaaaagaggtttattttgtatatgtttagaactctctgattttgatgaattatatgggaatgagaaacagaagaagtggtatttgctggcgagttaaataggcaaggtacccagtgataacaccaaccaaaccactcctatctgcatgattctgaacatctggatgcctgttgttttactgtgtatattttatttttaatatattaactttgtggattcatttaaggtctactcaaaagtaacactgtcaaaaccactaatatgtatgtaaaaattgtgctgtatactacaataaagttgttacttggatttgttcca

SEQ ID NO: 222090 - DNA, 1000 bp, Homo Sapiens; identical to SEQ ID NO: 116858

SEQ ID NO: 222091 - DNA, 1000 bp, Homo Sapiens
aggctatacttcaaatcctacttataaagaagtctgctcagaaaaaactggccatgcagaagtcgtccgagtggtgtaccagccagaacacatgagttttgaggaactgctcaaggtcttctgggagaatcacgacccgacccaaggtatgcgccaggggaacgaccatggcactcagtaccgctcggccatctacccgacctctgccaagcaaatggaggcagccctgagctccaaagagaactaccaaaaggttctttcagagcacggcttcggccccatcactaccgacatccgggagggacagactttctactatgcggaagactaccaccagcagtacctgagcaagaaccccaatggctactgcggccttgggggcaccggcgtgtcctgcccagtgggtattaaaaaataattgctccccacatggtgggcctttgaggttccagtaaaaatgctttcaacaaattgggcaatgcttgtgtgattcacaatcgtggcatttaaagtgcacaaagtacaaaggaatttatacagattgggtttaccgaagtataatctataggaggcgcgatggcaagttgataaaatgtgacttatctcctaataagttatggtgggagtggagctgtgcggtttcctgtgtcttctggggtctgagtgaagatagcagggatgctgtgttcacccttcttggtagaagctaaggtgtgagctgggaggttgctggacaggatgggggaccccagaagtcctttatctgtgctctctgcccgccagtgccttacaatttgcaaacgtgtatagcctcagtgactcattcgctgaaatccttcgctttaccaaatctagacatacataagggctttctctcccttttcagccctctctgtgcagagaaaagatgtgagtccgcttgatgaattctaatgctttgcttagagctatgagaaatgtttgttttaataaaaacctacagtccaataaaaaaaaaaaa

SEQ ID NO: 222092 - DNA, 1000 bp, Homo Sapiens
ctttaaacaggatcacactgtaccccctgcctgccttatttgcttactgagcacaggacagaggcaatatacaactctgggttcacacacaagctgagatgagaagaggaatgagccatatattggggaaaatcatagtttgtaggtataattatatagtgcttttctccctcaaagtatttttctagccttgaattcattttatcttcattatccctgtgaagtaggtgggacaagtataaggggaagaggggtgctgaatttttaggccaaagactgatattaatacaaatcactcactaactgtagagccttgggcattatcagtgaactactctgagatttactgtcttcatctgtttaatgagtagaatgtccgtgatgcctacctcacagggttgttgtgagggtcaaatgagaatgtatgtgaaagatttgtaaatggtaaagcactatattcttgtttgttagtcctttttcctttctttgggtagacctacagtcagatgttttgttttatggatcacttattttccttactggtagactgtcgttttatagacatattcctatttcatatattctctccctgttgttagagaacctatctttgtttttggtcaaaacacacatagaaaacaaaatgatccaatgaaaactggtttaactagcaaaagccttggcacctgttggagactatgaccaagccaataaaaagggcatttaaatcagccctgttagtaggaatgtggctatggctggtgcctcttctagtcacaagtttgtttttggagggggtccagaagatcattcccttgcatagatttctcttttaccaatttgagtgcctcctacatgggcagcagtggactaagtgctgggtgtgataaagaggaatgacttaattatgagactgtatataatcaaatacagtgtgggttaggacctgtggcagaccattataataaagcatggccccgtgagggttttgaaagagaaa

SEQ ID NO: 222093 - DNA, 1000 bp, Homo Sapiens
agaaccaggaggagcgatcgctgcttgctgagcagcgggagcaggagaaggagcagatgctggaatatatggaacagctccaagaggaagatctaaaggacatggaacgaaggcagcaacaaaaactgaagatgcaagctgagattaagcgcatcaatgatgaaaaccagaaacagaaagcagaactgctggctcaggagaagctggcagaccagatggtgatggagtttaccaagaagaagatggctcgagaagcagagtttgaggctgagcaggagagaatccggagggagaaagagaaggagatcgcacgcttgagggccatgcaggagaaggcccaggattaccaggcagaacaggatgccttgcgggccaagcgcaaccaggaggttgcagacagagagtggcgcagaaaggaaaaggaaaatgcgcggaagaagatggaaacagaggctgagctgcgaaaaagtcggctcgaacaggtggctttcaaggagcacgctctggctgttcaggtgcacgggaccgggatgagttcgagaggattcttcgggctcagagagaacagattgagaaggagcggctggaggaggagaaaaaggccacagggcgcttacagcatgccaatgagctccggcgccaggtgcgcgagaaccagcagaaggaagtgcagaaccggattgccacctttgaggggggccggcgcctcaaagaggaggcccagaaacgccgtgagcgcatcgatgagatcaagaggaaaaagcttgaagagctgagagccactggccttcccgagaagtactgcattgaagctgagcgcaaagctaacatcctgccagctacctctgtgaactgaggggagccttcgtggccctcaggatgccttcgggggacagattctgcccagtctctgggcatccataattgctgctaacctagacatttcatagttacagattaaatctacttgactaaaaaaaaaaaaaaaaaaaaaaaaaaa

SEQ ID NO: 222094 - DNA, 1000 bp, Homo Sapiens
ccagccatcaagacggagcccacggatgaatatgaccccactctgatctgcagccccacccatggaggcctggggagccagccttactacccccagcacccgatggtggccgagtccccctcctgcctcgtggccaccatggctccctgccagcagttccgcacggggctctcatcccctgacgcccgctaccagcaacagaacccagcggccgtactctaccagcggagcaagagcctgagccccagcctgctgggctatcagcagccggccctcatggccgccccgctgtcccttgcggacgctcaccgctctgtgctggtgcacgccggctcccagggccagagctcagccctgctccacccctctccgaccaaccagcaggcctcgcctgtgatccactactcacccaccaaccagcagctgcgctgcggaagccaccaggagttccagcacatcatgtactgcgagaatttcgcaccaggcaccaccagacctggcccgcccccggtcagtcaaggtcagaggctgagcccgggttcctaccccacagtcattcagcagcagaatgccacgagccaaagagccgccaaaaacggacccccggtcagtgaccaaaaggaagtattacctgcgggggtgaccattaaacaggagcagaacttggaccagacctacttggatgatgagctgatagacacacaccttagctggatacaaaacatattatgaaacagaatgactgtgatctttgatccgagaaatcaaagttaaagttaatgaaattatcaggaaggagttttcaggacctcctgccagaaatcagacgtaaaagaagccattatagcaagacaccttctgtatctgacccctcggagccctccacagcccctcaccttctgtctcctttcatgttcatctcccagcccggagtccacacgcggatcaatgtatgggcactaagcggactctcacttaaggagctcgccacctccctcta

SEQ ID NO: 222095 - DNA, 1000 bp, Homo Sapiens; identical to SEQ ID NO: 116861

SEQ ID NO: 222096 - DNA, 1000 bp, Homo Sapiens; identical to SEQ ID NO: 116863

SEQ ID NO: 222097 - DNA, 1000 bp, Homo Sapiens; identical to SEQ ID NO: 116864

SEQ ID NO: 222098 - DNA, 1000 bp, Homo Sapiens
ggccctgtcctggctgccctcacccatgtcaagctactgaggctgtgtcttgtttgttttctctgttacatttttgtttgctgttgtcacagtcagctggtttcggcgtgatgttgaccttttgatgtacatactccgttttaaactcatttccactctagttgagttctgcagcatgcagcggtatgaccctacgggggtcaggagagccctgcggcccccacccaccagctcagaacctgtcactaatacagctgcctgtgaccctgggacccgcaaccttccagctgcttccctttgtcaaagtcacgagtgcgtctgccttgacagccctcgtcaacagaacttccagtgggttgtgggttcatttcctttctttttaagaacagggttgggaccttttctgcccctgccccttagctactgaggcatagggagaggaagttaatttcagagccatacaaaaataagccacaaccagcttcagaattaattcccaatcccccattccaccagggctgggagcccattcccagtgcttcccaaggccctcggggacatctaccgccaacccagctgcttctggcaggggctccaagccccagcgtggggaagggccctggagaagccctcatcctcatgggaaccacactgcagtgggtggggaaggttgttgtcagcaccgcccccggctcctccaggtcctgctggctcctcgggggcagggttccctggacctcccagttctgcgccttggggccagccagtactcagagaggaggaccttctcaaccacgtacagaacacgggttttcatggctgcctttggtttggttttctgagaagataggattggattggattttgcagagggtgagaacttctctgtgcctgctcagaggcgccctagggaagggccatgtttgagttttgctttgtatgttgttttgcaagtatctgcctggtactttgatttaaaataaaaacaattttcatagtt

SEQ ID NO: 222099 - DNA, 1000 bp, Homo Sapiens
cagcccaggaaacagcatgtggttcagagaaaagagcgacaaggaaaagttaggactcctgaggtccgaacaggggcttctgttgcccacttcacaacacccagtgatcaccggtgtgcaattgcctccttggctctgagggatgttttgcgctcccttttctcatcattggggttagcgggtgcagacaaattcagcaatagtatgcagatcagcccctcaccacctcattgttctcatctggaactgaaactttctggatttctcttgaagtgctacactgcactgaatgtaaggaattgttgcttgtggaagtttctcagcgtttctggctgtcttagggctggcctcagaacccagcattcctgttatttgcttctaaattagcagctctctttttttttttttttttgaggcagtctcactctgtcacccaggctggagtacaatggcgtgatctcggcccactgcaacctctgcctcctgggttcaagcaattttcctgcctcagcctcccgagtagctgggagtacaggcacacaccaccacacccagctaatttttgtatttttagtagagatagggtttcaccatgtctcccaggctggtctcaaactcctaacctcaagtgattcgcctgcctcggcctcccaaagtgctgggattacaggtgggagccactacagctggcccagcagctctgtttctgatagaggtggttggggctctcatccctagatcctaaccctttagtatgctggaattctactcttcacttactgcattgactgttgttgattagttattattgcaaagcactgtcaccggcctcagggagtttatgtgtaatagaattaaaaataatagctgtgtataacacttagctcaagccacgcatgtgtgaggcatttggtatgtatctgaattaattctcactaaaattcagcaaaggacttgatagcccctccccgccttttcaataaaggatgaatgaaggttg

SEQ ID NO: 222100 - DNA, 1000 bp, Homo Sapiens
gaatgttttgtgagattatttttatatgaaggaatagcctgaactcaaacagatggtaagaatagtacaaacaccttagcacatcactgcacacacagtattctgaaaggagatttgacacttaattcccattttcttaaaataacagttttgttgacttaaaaatatgagatacataggatgtgaaaaaaaatgtttgcagtactcagcaaaaaatagggtacataaagcagggtggctgtccatccactgattctggggtgagaagcgatttctacctcgcaagagtgactagaaagtttctaggagcacctccaggcttgcaaagaaagtgaggcctcttggtatcctttcctcagtgtgtatatgacagccagtataatcaataccctaggttatgcgtctatatgatactcatctgtgaatattattggttttgtaatctttgttatataagaggatgtttaggctgtatatactggggtagattattgcctgccccttatacataggaatatgctgcataattgcgcataacttccatctcccttactggcttgtaggcagaggaaactgtatatgttactgccttgtacttttctcatacaccaaaaacacaccaaaaaaatcaataaaataagcaatcttctattctcattccttttcccacagcagcatattttagaggcacatacaaaacctacattctctagttgggagtggatttttaaagttttccttttatcttttatttttttttgtatgatgcactgagatgtgtactttctaacaggggattggtacctaagaaatgtggtagcattattcagaaaactattatactttcaaatgacacatagtaaggagaatggaataatacatgttgcatatttgttaccagttgtaatttgtctgtattatgaaagatgtaatggtttgtcagctgtcactgttgttttcttgtaacatgatatggaataaagtatagcagaatctccgt

SEQ ID NO: 222101 - DNA, 1000 bp, Homo Sapiens
tatttgtttgaactattattgatgctagccaagcagtatacttgatgtgaagatgtcatgctatcacaatatgctaagagctcacaaaaataagatagaatttccaggacaaacatctttggaattgtgagtgaaggatatagtggcaggcttgtccctctttaattaatactcttggtatttgtggtgatgggaggatgctgttactaggagagttttgagatactgcagtggatgtgggatgtatatgaacttcttcataatgtactcctgggaactgggtaggacatatccatattgtagttcccaaggtgtctggttgagagttagagaacttttaaatttctttagccagacaggtctctatttttttaagttatccaggactccaagaaccatagttactgaaaagggagtcctgatacatctaatattggtagcatgtaacagtgtttgacaaagagtaagtaagcagtattcttgggagtcagtgttatgtgtttcagcagagtattattttgtatatgtatgccattttctccctgcaaagcagctcaacaagagaaaaagctctagttatagggcttaaattgatttctatttcaaataatttcctaagagattctagagtagaactgaagagtattctattggaaaagtgaaaggaaagaaatgtaattttctttgaacatgaaaaagaaaacaactttgagagtagtcatttagcagtagatgtgcattattatgagaaaacagttctataagtccagggttaattatattaattggaatgtcagtctttaatgtcgagcttattgtagggtagaaaagagctttctactcagctaacgattactcattgatccaaaacttaaatacatctataatttcctggggctattgtgagtactgtgtatgtatttagcaaatatttaagacctagtaagtgctcaataaattgtagctgttattgctgttgttgtttgtacctctaaaaaaa

SEQ ID NO: 222102 - DNA, 1000 bp, Homo Sapiens; identical to SEQ ID NO: 116869

SEQ ID NO: 222103 - DNA, 1000 bp, Homo Sapiens
aaaaatccaacccatgtcccaaaagagaattttaggaaacattcacagccccggtcatttgatttgaagacttacaaacctatgggatttgaatcttcatttctgaaatttattcaggaaagtgaagagaaagaagatgattttgatgattgggagccttcagagcacttaacattaagtaattcttcacagtccagtaatgatttaacagggaatgttgtggcaaataatatggtgaatgacagtgaacctgaagttgacatacctcattcttccagtgactctacaattcatgagaacctgactgcaatcccacctttaatagtagctgaaacaacaacagttccttccttggaaaacctgagggttgtattggacaaagcattaacagactgtggagagcttgccttaaaacagcttcattatcttcggccagtggtggttcttgaaagatctaagttttccacaccaattttagacttatttccaacaaaaaagacagatgagctttgtgtaggaagttcataagtagcaattttgttttagtaacagactggctccaacactgcaacatggggacatttgccaactcgaacaaaggctgagaagcagccacaccgttgtttagggtagaataggctgtgtatttacatgaatgtataatatctatgtcagcagtattggctgagtccattagctctccagttggtttaatgattgggtttatttttgtttgtttgtttattaaaaaaatggaactgtacacttgtttggtgctaattaatacatcaaaatatactggggcttcctttttcaaattaagtgtgcatgattgtatatggaacaaatactaaggtcccagggtgggagggctagggaaagggatatggagttcttacttgacttgaatgtgcacctgagggtgctttgtgtaatatattgtacactacagcatcttatattttttgagttgagtttcaataaattacaatttttcacc

SEQ ID NO: 222104 - DNA, 1000 bp, Homo Sapiens; identical to SEQ ID NO: 116871

SEQ ID NO: 222105 - DNA, 1000 bp, Homo Sapiens
acctacaagacttggaggaattaagagttcacccttcatctcaccaaattttccccatttttctctttcttgtagaaggagagaaaccatgctctctagcaacattgagcaaaaatcataaccactcatctaatttctaagaggcacctccatcgagggccggtctcctgcttctttagacctcttctatctttgttacaggagaggacctgtggatagacttagttttgacataaaacaatgcccattcacctcctccttcagcacaacgtcacccattgggcaagagatccagatttgttaacaaaaaagattttacttcgtgattccacgtctataattctatattgctaattttttcttttgtgtgaattactgaatatttcagagcaaagctatcaacttggagaaacagggattaaaaataaggataaacactaataagagctctagaaaaaagggaacagaaagtctgcctgtttagtaagtggcaattccatacatattttagagttttttctatctaaaattagttaaatacttagaatgtttgtaatgagtgttcgatatttgctataggttttagggttttgtaaatcttcatagtaattataaacatttgtaaaatttgtaaaatactataagtcattttgagtgttggtgttaagcatgaaacaaacagcagctgttgtccttaaaaatgaattgacctggccgggcgcggtggctcacgcctgtaatcccagcactttgggaggccgaggcgggtggatcatgaggtcaggagatggagaccatcctggctaacaaggtgaaaccccgtctctactaaaaatacaaaaaattagccgggcgcggtggcgggcgcctgtagtcccagctacttgggaggctgaggcaggagaatggcgtgaacccgggaagcggagcttgcagtgagccgagattgcgccactgcagtccgcagtccggcctgggcgacagagcgagactccgtctc

SEQ ID NO: 222106 - DNA, 1000 bp, Homo Sapiens; identical to SEQ ID NO: 116874

SEQ ID NO: 222107 - DNA, 1000 bp, Homo Sapiens
tggagggccaccaggaacacccatcatgcctagtccagcagattcaaccaactctggtgataacatgtatactttaatgaatgcagtacctcctggacctaacagacctaattttccaatgggtcctgggtcagatggtcccatgggtggattaggaggaatggagtcacatcacatgaatggctctttaggctcaggagatatggacagtatttccaagaattctcccaataatatgagcctgagtaatcaaccgggcactccaagggatgatggcgaaatggggggaaatttcttaaatccttttcagagtgagagttactcccctagcatgacaatgagcgtgtgatccattaccaagtctcctcatgaaaaccacagtgagtcagcccttcacagaactactacggaagaaaattattcatcacagtgtacagttaaacaaaggaatctcagtcacaccaaaccaacctttttatttcctgctctctcccctcttttgtgaagaaagcgggtccaaatgtgattcaaacaactgtacggagtggcatattagaattgccctaaactgaactgcaaataattatgtgtgtatgtatatgtgtgggaaagagaatgtactgtatatgtgtatgttatacagacatatacacatacatacattgacccacaggacattgtaaaatattatcacatgacatcttaagtagaaataagtagggacttttattccatcctttttttcacgtttacattttaattattacaagttgctcctgccccctccctgaactattttgtgctgtgtatatcactgctttatataagttattttttaaggtgaactcagatgttatggttttgtaaatgtctgcaatcatggataggaataaaatcgcttatttgagagctttcattaaattgcgtctgatgcaagttatcctgtgaatcacaaagtgtactgtctcaaaaaatagaagaaaatgtgtcttcgtcttta

SEQ ID NO: 222108 - DNA, 1000 bp, Homo Sapiens
ggagtggagaagttgaaaacaattcagacaactcgggaaggtaccaaggattggagcacagaggctcagaagcaagtccagctctcccggggctgaagctgagtgcagatcaggtggccctggtctacagcacgctggggctctgcctgtgtgccgtcctctgctgcttcctggtggcggtggcctgcttcctcaagaagaggggggatccctgctcctgccagccccgctcaaggccccgtcaaagtccggccaagtcttcccaggatcacgcgatggaagccggcagccctgtgagcacatcccccgagccagtggagacctgcagcttctgcttccctgagtgcagggcgcccacgcaggagagcgcagtcacgcctgggacccccgaccccacttgtgctggaaggtgggggtgccacaccaggaccacagtcctgcagccttgcccacacatcccagacagtggccttggcattgtgtgtgtgcctgcccaggaggggggcccaggtgcataaatgggggtcagggagggaaaggaggagggagagagatggagaggaggggagagagaaagagaggtggggagaggggagagagatatgaggagagagagacagaggaggcagagagggagagaaacagaggagacagagagggagagagagacagagggagagagagacagaggggaagagaggcagagagggaaagaggcagagaaggaaagagacaggcagagaaggagagaggcagagagggagagaggcagagagggagagaggcagagagacagagagggagagagggacagagagagatagagcaggaggtcggggcactctgagtcccagttcccagtgcagctgtaggtcgtcatcacctaaccacacgtgcaataaagtcctcgtgcctgctgctcacagcccccgagagcccctcctcctggagaataaaacctttggcagctgcccttcctcaaaaaaaaaaaaaaaaaaaa

SEQ ID NO: 222109 - DNA, 1000 bp, Homo Sapiens; identical to SEQ ID NO: 116878

SEQ ID NO: 222110 - DNA, 1000 bp, Homo Sapiens; identical to SEQ ID NO: 116879

SEQ ID NO: 222111 - DNA, 1000 bp, Homo Sapiens; identical to SEQ ID NO: 116880

SEQ ID NO: 222112 - DNA, 1000 bp, Homo Sapiens
accttgctgcggagccaagtggtcatccctatcttacagtgggccattgcctctactaccctggaccaccgggatgccaattgtagtgtcatgaggtttctacgagacctcattcatacaggggtagccaatgatcatgaagaagactttgaattacggaaagaactgattggacaggtgatgaaccagcttggacagcagcttgtcagccagctgctgcacacctgctgcttttgcctccccccctataccctaccagatgtggctgaagtgctctgggagatcatgcaggttgacagaccgactttttgtcgatggttagaaaattccttaaaaggtttgccaaaggaaacaaccgtgggagccgtcacagtgacacacaaacaacttacagacttccacaagcaagtcactagtgctgaggaatgtaaacaagtttgctgggccttgcgagacttcaccaggttgtttcgatagctcacactcctgcactgtgcctgtcacccaggaatgtcttttttaattagaagacaggaagaaaacaaaaaccagactgtgtcccacaatcagaaacctccgttgtggcagaggggccttcaccgccaccagggtgtcccgccagacagggagagactccagccttctgaggccatcctgaggagttcctgtttgggggtgtgagggaaaatcagcgcggattttaaaaagatggctgtggcctgcccggcgtggtgggaggggagctggtttcctggtgaactttctaaaaggaaaaataattttaagtaaagaaaaaagaaaaaaaaggaagactaaacagaaaccagaactgaaacattcacctggtagcaaatgacacatgcacgcacacacacatacacgcacaagcgccagtgcgcacgtgtacacagaaaaacaaaaggacaagctttctgtgaaacaaaatatttacttagggataatgtggggattcacatgaattaaatagctgcaattggaa

SEQ ID NO: 222113 - DNA, 1000 bp, Homo Sapiens; identical to SEQ ID NO: 116883

SEQ ID NO: 222114 - DNA, 1000 bp, Homo Sapiens
cctcctgtactcaggagaagagactcacacagtcgaaacagccacctccccaacagatgcgtccatcccagcttctccggaatggaaacgtgaatcagaatcaactgctgcagcccccgccaggtcctgtgcagaggagccctgtggagctgggacctgcaaggagacagagggacacgtcatatgcctgtgcccccctggctacactggcgagcactgtaacatagaccaggaggtatgtgaggagggctggaacaagtaccagggccactgttaccgccacttcccggaccgcgagacctgggtggatgctgagcgccggtgtcgggagcagcagtcacacctgagcagcatcgtcacccccgaggagcaggagtttgtcaacaacaatgcccaagactaccagtggatcggcctgaacgacaggaccatcgaaggggacttccgctggtcagatggacaccccatgcaatttgagaactggcgccccaaccagcctgacaacttttttgccgctggagaggactgtgtggtgatgatctggcacgagaagggcgagtggaatgatgttccctgcaattaccacctccccttcacgtgtaaaaagggcacagtggcctgcggagagccccctgtggtggagcatgccaggaccttcgggcagaagaaggaccggtatgagatcaattccctggtgcggtaccagtgcacagaggggtttgtccagcgccacatgcccaccatccggtgccagcccagcgggcactgggaggagcctcggatcacctgcacagaccccaccacctacaaacgcagactacagaagcggagctcacggcaccctcggaggagccgccccagcacagcccactgagaagagcttccaggacgcacccaggacgctgagcccaggagcctgccaggctgacgtgcatcccacccagacggtgtcctcttcttgtcgctttttgtcatataaggaatcccattaaaaaaaaaa

SEQ ID NO: 222115 - DNA, 1000 bp, Homo Sapiens
cccaccagggaggacaacatcttcatgctgtgattgaagcatccattcagaacacgaggcaatattgcagtccacagggaatggatgcttcacttgatctccggaccttggctgcagaggccatcgcagcttttgaaaagtgaaggggttaattcccattggtgtctttgcttatagcatttttctctaacctataacaaggagacattacattttactttagaacatgagaatagcagttttgctcatgacttaccattccagctgcatgggaaagcaaagcagaaaacagtgccccaaatggaaaaaagatactcacacagaacaaaacagttcttggtcttgttcttggtcttgtcaaaccttgcctgatgctctttctaaagtcaaaatatgaatgctaagaaggcataacctacatccttctctgatttcttcagcagggtcaaaagacagttactagcaatggggaatgcttgtcactgtggagaaagagttttgtatatgtctgataccgttgttataacaaaacaaatttttttactatagttttttgttttctacctgcacacccaccagaagagcacaaagcaaggccattgcaacaggcatttaaaaattattatcaaacatgcacatgcttgtacacacacacacacacacacacaaacaggggcatttgtaaaggtgtccctggaatgtaagatttataatgtttaaggcaaggtgaaggcattgccaagtgtgtgtcgctcataggactagtgtatattcactgaaagttaacctgatgatttgttattgtttgaaccatatgctgatttgcttctggtttctgtttagtgtgttctctctgataaggggctgaaagattctgcatcacacatcctctgagacctaccatgtcgcacactttgttaatgacaaacttcactctacactatacagtaccttgttgatatattcagtaaagtcttattttaaaagaaaaccaaaaaaa

SEQ ID NO: 222116 - DNA, 1000 bp, Homo Sapiens
ttaactttgttgcgaagctctttggtgaataatagaactcaggccaaggtagcggaggagctgggcatgcaggagtacgccataaccaacgacaagaccaagaggcctgtggcgcttcgcaccaagaccttggcggaccttttggaatcatttattgcagcgctgtacactgataaggatttggaatatgttcatactttcatgaatgtctgcttctttccacgattgaaagaattcattttgaatcaggattggaatgaccccaaatcccagcttcagcagtgttgcttgacacttaggacagaaggaaaagagccagacattcctctgtacaagactctgcagacagtgggcccatcccatgcccgaacctacactgtggctgtttatttcaagggagaaagaataggctgtgggaaaggaccaagtattcagcaagcggaaatgggagcagcaatggatgcgcttgaaaaatataattttccccagatggcccatcagaagcggttcatcgaacggaagtacagacaagagttaaaagaaatgaggtgggaaagagagcatcaagagagagagccagatgagactgaagacatcaagaaataaaggagggcatgcaagtgtggagtatttacttgctcagtaactgtgactgttgtctattgagacctagcctagttttcctgcagacaatgaacgaagtgtgctcattgaaataaaatacagagtcaaatcgctattgttgttttaatgatctgtttttagctggatggtctttattacaaagtattagatttttcttctatttaacggaaaacttgactttggtgaatgtgcattacttccttttattttgctctttaaataataaaattcaagaagcatattctatgtggaatagatcctgtttttccatctgtgtcccagattgtgaccctagactttcaattgacaagtaaaaaattgactttactagtaaaaaaaaaaaaaaaaaaaaaaa

SEQ ID NO: 222117 - DNA, 1000 bp, Homo Sapiens
taaaccagtctcttggagggcacaacccttatttgacaaaacttggatgttggcttgactgtgtttgtcccttcagatggcaagtcagcatcattctttatattcctcttctcattgggttttctgaactctggcaggcggttgaagtagtttctcactgtgattaattctagcaatctcttttcacccctctgcctttccaaaacattgacaagactcatttccagttaattaattcgagaaccctccctcttcattttgggtactgggctgtcttgtcactgagccctatccctttggaatgtggcagggagtgaggttggtgagagaacatgtgggcacttaactcttcatgttccagttcatcccagaagtagacatcccaggacccattctgtgtcaaggtgaatgcctgtgtcctccccagcttcatgcctctgtcatgggggaaggaatagcttatgttctgctctggtgcagtgccgtagattaaaggtacatttctatcttctttgatttaaaaagcaccagtctcataaaggtgccactcagttttagccatgtcttcactgaaattgcaaaagtacttttagggagcaggagtttatttgacatctagttatctgtctgtctgttcatctatctatctgtctgctgtatgagaggtaggactggattaaatgaccactgaactcactgaatccagatcattcatatcatcaacaaaagctctagggggaggtcacgttgtgaatgcttaaaacatattattttcttcaacaaccatatcgctaaactaatatatccagagattttgcacaattcgtgttgaaccttccaaaacaaaaataaagacctgtccaaaagttttgacaaaaatactgattgctcccaaataaagtgcttctaagctttgtgtagacatagtttaactgatttgtaaaaatagcttaagcatgttgagaatgaagtaaaagttttcccatgtgctgtctaatgt

SEQ ID NO: 222118 - DNA, 1000 bp, Homo Sapiens
ttcctgcagaatgtggcgctgctggaggaggaggcggacatcaaccagctgaccgaattcttctcgtacgagcatttctacgtcatctactgcaagttctgggagctggacacggaccacgacctgctcatcgacgcggacgacctggcgcggcacaatgaccacgccctttctaccaagatgatagacaggatcttctcaggagcagtcacacgaggcagaaaagtgcagaaggaagggaagatcagctatgccgactttgtctggtttttgatctctgaggaagacaaaaaaacaccgaccagcatcgagtactggttccgctgcatggacctggacggggacggcgccctgtccatgttcgagctcgagtacttctacgaggagcagtgccgaaggctggacagcatggccatcgaggccctgcccttccaggactgcctctgccagatgctggacctggtcaagccgaggactgaagggaagatcacgctgcaggacctgaagcgctgcaagctggctaacgtcttcttcgacaccttcttcaacatcgagaagtacctcgaccacgagcagaaagagcagatctccctgctcagggacggtgacagcggcggccccgagctctcggactgggagaagtacgcggccgaggagtacgacatcctggtggccgaggagactgcgggagagccctgggaggacgggttcgaggccgagctcagccctgtggagcagaagctgagtgcgctgcgctccccgctggcccagaggcccttcttcgaggcgccctcaccgctgggcgccgtggacctgtacgagtacgcatgcggggacgaggacctggagccgctgtgacgccgcccgcgagaacgccgccgcggggccgctccccacgtgccaccaccgggccaccgcggctcgtgtaaaaactgttgtggaaaatgagtgcgtttgtacggaatgataaacttttatttattcacagaaaaaaaaaaaa

SEQ ID NO: 222119 - DNA, 1000 bp, Homo Sapiens
tccttcagacagagttcatgccttactcaacatcagagaactcatactggagagaaaccatttgaatgtaatcagtgtggaaaaacatttagcttgagtgctcgacttattgtgcatcaaagaactcatactggagagaaaccctttacatgtattcagtgtggaaaagctttcattaatagctataaacttattaggcatcaggcaactcatactgaagagaaactctatgaatgtaactagtttgtaaatcagctgggatttcttcctttttattcattcttttaaaaaatttattttaaggtagtacatgtagttggaagaactactataaaaacaatatatgtgggaaaacttccagccctctgttaattgtgtgtctcaaatttgttctggaaaagaaagggggaaagtctatgaacgacttttcaacctggcaattccatatacaatgttaaacttgattcttatgacatattcctatgaaaataataaatactggcacttttccttgcagaaagcactcagacctgaatcagagaaaatcatatgccaaagccaactgccagtgctagactctttttccataaagagtaaatggaatgctaacactagtgggcttattgagaaaatttaaaggttgctgtagtgtttagaacttaggctggaaaaccatattttagtgcatcattttactacatgatcttccaattagatagcttgtaatctgttccttacagcacttgctgttgttacatgtgaagattttataaattttaggaaagtgtctatgatatatagtgaaaagtgtgggaaaagaatatagaaataatattcacttctaaaaccattatgataaaatatttgtgtatggattagaatagaaagggattatggatgtatctattcaatttctcagtttatgttgggccttcctttttggaatgtacgctgttatgctatgataaatgatataatgagtaaaaattattcaaagccc

SEQ ID NO: 222120 - DNA, 1000 bp, Homo Sapiens
tggggtgagatcctgacctgtgcagagagtggggaggcgtcagcgcctggccagggctgccccagtcctttggtgcccggtgagcgcagccagcaggagctgagcagcgggggagatgaatcacctcctgccttggcgaggcggcagctcattgtttacaggcaagccctgctcctgggagggctcctgccaccccacccttcctctgtgtgttatctctgccccacagcagcccctgggcagcaccagtggccactgggctccccccggggttgaaacgggtttcccagaccaggggttcagaggagactatttacccttcatgatctttggcgattctccactggagcggaagggctgtgtgtcaaaagaaggaagccaggctgtgaagggccgtgttgctttcagtgggtgggcagaggtttagaaaggtggttctgaaatggcacctggtactcttgtgggacctggggaatataaggaactctgtgcatgaggtttcaaaaataaaaattgagtccactctccccgtacacacacactcgggcacttcaggaggtcagttctcaccccttcctcgatggggctttaaagctctggggagaagagctgctccccactcatgccccagagggactgtgaaaaggcttcctgtgacctccgatggcggcccctcattggccaagggcactgtggatgttttgtgggaggcagcatggcaccgtggaaagggcagtagacgtggagccggcacctctggtctggattccacttaaaaccagttgagtggtctcaagcccttaacctctgtaagcctgtttcttctctgaaatcacagtaataaagcgtcgtaagatggttgggaagaaccagaggtgacttatgcaaaagctttataaactgtaaagttcctgccaaaaaaaaaaaaaaaaaaaaaaaaaaaaaaaaaaaaaaaaaaaaaaaaaaaaaaaaaaaaaaaaaaaaaaaaaaaaaaaaaaaa

SEQ ID NO: 222121 - DNA, 1000 bp, Homo Sapiens
ggaatacttggtttcttttcttacttatcaaaagacagcactacagatatcatattgaggattaatttatcccccctacccccagcctgacaaatattgttaccatgaagatagttttcctcaatggacttcaaattgcatctagaattagtggagcttttgtatcttctgcagacactgtgggtagcccatcaaaatgtaagctgtgctcctctcatttttatttttatttttttgggagagaatatttcaaatgaacacgtgcaccccatcatcactggaggcaaatttcagcatagatctgtaggatttttagaagaccgtgggccattgccttcatgccgtggtaagtaccacatctacaattttggtaaccgaactggtgctttagtaatgtggatttttttcttttttaaaagagatgtagcagaataattcttccagtgcaacaaaatcaattttttgctaaacgactccgagaacaacagttgggctgtcaacattcaaagcagcagagagggaactttgcactattggggtatgatgtttgggtcagttgataaaaggaaaccttttcatgcctttagatgtgagcttccagtaggtaatgattatgtgtcctttcttgatggctgtaatgagaacttcaatcactgtagtctaagacctgatctatagatgacctagaatagccatgtactataatgtgatgattctaaatttgtacctatgtgacagacattttcaataatgtgaactgctgatttgatggagctactttaagatttgtaggtgaaagtgtaatactgttggttgaactatgctgaagagggaaagtgagcgattagttgagcccttgccgggccttttttccacctgccaattctacatgtattgttgtggttttattcattgtatgaaaattcctgtgattttttttaaatgtgcagtacacatcagcctcactgagctaataaagggaaacgaatgtttcaaatct

SEQ ID NO: 222122 - DNA, 1000 bp, Homo Sapiens
tgctgagaacgcaaccgtggttcctggaaaatgccccagtcctgggtgccaagaggccttcctcactttcctctgtgtgatgtgtatctgcagcctgatcggtgccatggcacagacaccctcagtcatcatcctcatcaggacagtcagccctgaactcaagtcttacgctttgggagttctttttctcctccttcgtttgttgggcttcatccctccacccctcatcttcggggctggcatcgactccacctgcctgttctggagcacgttctgtggggagcaaggcgcctgcgtcctctacgacaatgtggtctaccgatacctgtatgtcagcatcgccatcgcgctcaaatccttcgccttcatcctgtacaccaccacgtggcagtgcctgaggaaaaactataaacgctacatcaaaaaccacgagggcgggctgagcaccagtgagttctttgcctctactctgaccctagacaacctggggagggaccctgtgcccgcaaaccagacacataggacaaagtttatctataacctggaagaccatgagtggtgtgaaaacatggagtccgttttatagtgactaaaggagggctgaactctgtattagtaatccaagggtcatttttttcttaaaaaaagaaaaaaaggttccaaaaaaaaccaaaactcagtacacacacacaggcacagatgcacacacacgcagacagacacaccgactttgtcctttttctcagcatcagagccagacaggattcagaataaggagagaatgacatcgtgcggcagggtcctggaggccactcgcgcggctgggccacagagtctactttgaaggcacctcatggttttcaggatgctgacagctgcaagcaacaggcactgccaaattcagggaacagtggtggccagcttggaggatggacatttctggatacacatacacatacaaaacagaaaacattttttaaaagaagtttcctaaaataaa

SEQ ID NO: 222123 - DNA, 1000 bp, Homo Sapiens; identical to SEQ ID NO: 116892

SEQ ID NO: 222124 - DNA, 1000 bp, Homo Sapiens
gattatctggaagctctaagatgagagcaaatgcctgatcactctggccaaatgtcagatactaaagcccattcttggccgggcatgttggctcccgcctgtaatcccagcactttgggaagcccaagtgggtgaatcacctgaggtcaggagttcaagaccagcctgaccaacatggggataccccgtctctactaaaaatacaagccgggcgtggtggcgcatgcctgtaatcccagctactcaggaggctgaggcaggaaaatcacttgaactcgggaggcagaggttgcagtgagctgagatcgcgccattgcactccagcctgggtgacagagcaagactctgtctcataaataaatacaaagcccattcttccagagtcttgtgccttaaataaaacacacctctctgctgtgggaagactgtgcaatggcacagccgcagagcttggtttgggaggttgaagtgctctggggagaattcgtagatcatcctcagaaaagccttgccctggtgttctaccagaaaaacgtctcccaatcacccaggaaagctgtccacagtagtccccccttatccacggtgtcactttccatgggttcagttatctgcggtcaaccacggtctgacaatattaaatggaaaattcttcaaacagttcccaagttttcccttgtgcattgttctgagcagtgtgatggagagtctctgccgtgccatctgggatgcaaaccgtccctgtgttccccacgtccaggccgtagatgctccccgccggtcagtcacttagtcgtcagatcgcccgtcctggtatcacagtgcttctgttcaggtcagtctttttttacttcattagggccccaaagcaccagagtagtgatgctggtagtgatgctggctgttcggatatgccaaagagaaaccgtaaggtgcttcctttaagtgaaaagatgggaagaaaacagtcatatgctgaatcttctatctgtgaaattct

SEQ ID NO: 222125 - DNA, 1000 bp, Homo Sapiens
tctcagctttgaatgggaggcctttctatagtggaggcctttccttgaagcctatgaactgcaggcccccttttgccattgatctcaaagcacttgtcctcaggatagggaagagcagggggatgcaggaatagcagggatagcttgctcccagccccctccccaatttggttccgttgacataggaattttacgattcccaaaccatgcaggggctgagccttccttatgatgactttgttctccctcccactgggggaatcctccctatgccttaaaactgccgagccccactccatgtaataggattcctgggcttcctcaatgggggttcatgttcttggactgcgggccctcagtccttaactggaaagtgaccgtccactgccccatggagcccatctggacacagcacagccccaaaaccgttagcagctggctctgtttccaagcctggggaggggttcctcagtgcaggagttggggacaggctggggatccaagctgcttgagggggtcaaccttggaccaaagttgccttaagcctgtggtaaaagggcttcagggaaggtaagtgggccacctgctggaagctgccagctgcccggctggcaatggtgtgagtgtcttggccctgtccctgccctggggtccagcaggtcatccctcccttcttctctctcctttggcgtttgttcctgtagtcactgggctaatctccccctagcttcaagctgtacatagggcctcccagtgcaaatcctcctgcccataccgtgcacccttagaagcctgcgtgtgcatagagcgccccctacttcccagttaactcccagttcttctccctgagcttggtatttgtcatgtgccaactctgactctgaggtgggcagtgagggaagcagccccgggcctgcttgcttcctgtccccgaaatgttcgtttcttctgaagtaaatatacatatataaataaatgtataaatactgctttgtatctg

SEQ ID NO: 222126 - DNA, 1000 bp, Homo Sapiens; identical to SEQ ID NO: 116894

SEQ ID NO: 222127 - DNA, 1000 bp, Homo Sapiens
aggcagcttgactgttcatgtttcattttgcaaccattggttttgagattatcttttatgcacatttggagtcccttttcaacagtgacagtttcttacacgaagaatggatatggttattgggctcctctaagaatcagagtagggtaacaatgtaccaggcaaattgtaagttgaaattctagataagcatgcagatgacttacaatataaatgaagaataggaaacattttatcttcttaccaagtaccttactataagtaaacctaagataagaaaacccagatttacctataagattgttgggagttaatggtgtcaataaaaggattgatggtccctctaatgaaacccagtagatgtttgttgaattgaactgaaaatttatgtggccagacacagtggctcatgcctgtaatctcagcatttggggaggcaaaggtggaagtatccctcgaggccaagagttcatgaccagcctggtcttttgtagagaccctgtctctacaaaaatataaaaatcagccaggcgtcgtgcacacctgtagtatcagctacttgtaaggctgtggcagaagtgctttagcccaggaggttgaggctgcagtgagccatgtccacaccattgcactgcagcctgagtaacaaaatgagaccctatctcaaaaacaaaaaggaaaagaaaatatacatgatgggattcctattgtgaagtcatttaaaataatgacttgaatttctcagaaatttcaggagcatataaactatttaaatcaaaatattcttacatatagaaaccaagtaagaataaatgagagatatttcagtggacatctggacatatttatggactttgagtatctagcaagtagaaaggaaaaaaatattcatcatactctaatcatttttttatatctattgagcttgtttcttgtaaacttttctttatcttataaaggcatatctcgcttttgtatcgacctgttccttaaaaaaaaa

SEQ ID NO: 222128 - DNA, 1000 bp, Homo Sapiens
gcgccacctggaggatgccaaccgcgcgcgccacgggttggagacgcagcaccggctgaaccagcagcagctatccgagctgcgggcccaggtggaggacctgcagaaagccctgcaggagcaggggggcaagactgaagatgccatttccattttgctgaaaaggaagctggaggaacatttgcagaagcttcatgaggcagatctggagttgcagaggaagcgggagtacattgaggagctggagccacccactgacagcagcacagcccggcggatcgaggagctgcagcataacttgcagaagaaggacgcggacttgcgggccatggaggagcgataccgccgctacgtggacaaggcccgcatggtcatgcagaccatggaacccaagcagcggccagctgcgggggcacctccagaactccattccctgaggacacagctccgagaacgggatgtccgcatccgacacctggagatggactttgagaaaagccgaagtcagcgggagcaggaagaaaagctgctcatcagtgcctggtataatatgggcatggccttgcagcagcgagctggggaggagcgggcgcctgcccatgcccagtcattcctggcacagcagcggctggcaaccaattctcgccgtggacccttgggacgcctggcatctctgaaccttcgccccactgacaagcactgacagacctcacaatcaagccagcctgggctccacccaccctggcttcctccagctcacatggcgcccagcactgggcttcagccaggtgctcgagagctttgaggccatgatctctgctcttccctctcccagattggtggggagggagggcgggaggtagatataggcctgttctttttagcaatgtgattcttgttgttgattctctctctggagttcatgtgctgcctcaggagactctgattttatatttgagaaaaataaaggcgttcaatctgcaaaaaaaaaaaaaaaaaa

SEQ ID NO: 222129 - DNA, 1000 bp, Homo Sapiens
ccagtacctgatcaattttttttctccctaaccccagatgcaatgcgatcacagggtcattaccatctctttattaattgtaaaaatttttgttgatccagcatttgagtgacactgttgaatgtttctaaaaatgcctttttaaggagagaaaaaaaaatcaaagggcagtctcaatacttagaaaattattgtttgtctgttgcgcataataatgacataatctgcttagcagaaaatgacgattaatctataggaaagctcaagtaaatgcattatcaactgcagaagtttgaaaaccaggttcatttacgtgagattgctaaatgcatgggggaaagcagtggtcctagcatccatcttgtattcagcttatcattattgcagggaaaatgcttttaatttaaattaatttttaattcttttggcaagttgatggcaaggacttgattgtgtcattaagcaaaagaatgtattggaagttgatggaaagacaaattcatctgtagtagtaactggccgattgctaaagagttcataaggaggtgagaagtaatttttttaaaggagaaaaattttttggctttagatttaaagtaaattgaaatgttttaaagaaaaaagtattcacagatttaatacctattaataatataagagctgaaatgtaagtcatttcttcagtccttctcctctgtcggaatcttttttgttttaccataaattcacctgacgagggcactctgagatagcactgctctggggccatctgatcaccatcgggagcaaatctctgacctccttgcctgcagcttttacttaaccctgtagtttctggacgtttgtgcagtattgaaaagacaggagaaaagcaaacagaaacctggttataacctgacgctaaaactaaaaacaaggaaatgtacctctttcttcagaattaaaactaaaatcttaaataaaacagaaaacttgatgatgaaaaaaaaaaaaaaaaaaa

SEQ ID NO: 222130 - DNA, 1000 bp, Homo Sapiens; identical to SEQ ID NO: 116898

SEQ ID NO: 222131 - DNA, 1000 bp, Homo Sapiens; identical to SEQ ID NO: 116899

SEQ ID NO: 222132 - DNA, 1000 bp, Homo Sapiens
tgctaagcagagaatcgctgtggccggacgacggggcgtcgagacaagaagaaagacgttggcaactcccacaaggcctagggccacgtcccgccgtcctcggctgctgagcctgatgggacaagtagttttgcgaacggcttaacctactgattgaagaggtcggaagctctgaggcccggggcttccggaggtcgcggagatggaattggagcagagagaagggaccatggcagccgtgggctttgaggagttctcagcgccgccaggctcagagttggcgttgcctcccctatttggtggccacatcctggagagcgagctggagacggaagtggagtttgtgtcaggtggtctgggcggctcagggctccgggagcgagatgaagaggaagaggcagcccggggtcggcggcggcgccagcgggaattaaatcgcagaaagtaccaggcactaggtcggcgctgccgggagatcgagcaggtgaacgagcgggtcctgaacaggctccatcaggtgcagaggataactcggaggctgcagcaggaacggaggttcctcatgagagtgctggactcctacggggatgactaccgggccagccagttcaccattgtgctggaggatgagggcagccagggcacggatgcccccaccccaggcaatgcggagaatgagcctccagagaaagagacactgtccccgcccagaaggactcctgcacccccagaacccggcagcccagcccccggtgaggggcccagtgggcggaagaggcggcgagtgccacgggatggacgccgagcaggaaatgcgctgactccagagctggccccggtgcagattaaggttgaggaagactttggctttgaagcagatgaggccctggattccagttgggtttctcggggtccagacaaactgctgccctacccgaccctggccagcccagcctctgactgacgcatgcccaataaactgaccccacaccaaaaaaaa

SEQ ID NO: 222133 - DNA, 1000 bp, Homo Sapiens
gtggcttgtgttgtcctggggctgcagttcttacacgagaagaagatcatttacagggacctgaagttggataaccttctgctggatgcccagggattcctgaagatcgcagactttggactctgcaaggaagggatcggcttcggggaccggactagcaccttctgtggcaccccggagttcctggctcccgaggtgctgacccaggaggcatacacacgggctgtggactggtgggggctgggtgtgctgctctacgagatgctggtgggtgagtgcccgttcccaggggacacagaggaagaggtgtttgactgcatcgtcaacatggacgccccctaccccggctttctgtcggtgcaagggcttgagttcattcagaagctcctccagaagtgcccggagaagcgcctcggggcaggtgagcaggatgccgaggagatcaaggtccagccattcttcaggaccaccaactggcaagccctgctcgcccgcaccatccagccccccttcgtgcctaccctgtgtggccctgcggacctgcgctactttgagggcgagttcacagggctgccgcctgccctgaccccacctgcaccccacagcctcctcactgcccgccaacaggccgccttccgggacttcgactttgtgtcagagcgattcctggaaccctgagggcatctcctggcacctctgtccccttcccccacagactgttagagcctctgctcgttcacccgtgcgccctgcctggaggtccaggccttgctgggtacttctgagcccttgggattcaaagtggcagccatggggccactgttgtgggctttgctcagtgtcactgggcaaagtgtgtcccttccccctccagctcgccctcttctacctcccagcgagacctggcccagaaagggtgccgcagcaaggagtgatatggtttgtctttttaagactggacttgctttatattaaatttgtaaaagtgtgcaaaaaaaaa

SEQ ID NO: 222134 - DNA, 1000 bp, Homo Sapiens
ccacacaggagagagaccttataactgtgatgactgtgggaagagctttagacaggcctcaagtattttgaatcataagagactccattgccgaaaaaaaccattcaaatgtgaggattgtggaaagaagcttgtataccggtcataccgtaaagaccaacaaaaaaaccacagtggagaaaatccatccaaatgtgaagactgtgggaagcgctacaagaggcgcttgaatcttgatataattttatcattatttttaaatgacacgtaagtgttgtacatatttatggggtacagtgtgatatttaaatatatgtatatgatgtataatgatcaaatcagtgtaattagcacatttatcacctcaattatctcttttttgtgttgagaaaattaaaaattcattgttccagcagtttgaaaataaattgttgtcgatgatagtcacctttagtgctgcagaacagcagaacttcttcctcttatctacctgtacttttgcatccattggccaacctttggccatcccacctatcccttacccttccctgcctctagagccactgttctcactacttctaagaaatcagctttttaagcttccccatgtgattgaggacagtttgaagttagtgtttcagccatagctcagcataccccagtggtcgtgggactgtcagagcagagaatgctgcagggtttctaacagaagtttgacaattagttattattcaggagacaggtcttagtataagagtttgttcacacactttcaaaacactaatgatgaacatgtcaaaattgatgaccactagaatgtcagccacatgtgtctttgtatttttgctgcatccttacattgcttgagtctggaagattgaggctgcagtgacctatggtagtgctactgcactccagccagggcaacagagtgagaccctgtctccaaaaaaaaaaattaaataaatacctttctttgtttccaaaaaaaaaaaaaaaa

SEQ ID NO: 222135 - DNA, 1000 bp, Homo Sapiens
tacatattcaggccaaaaaaactgcctacaactacagaacagcctgtcaccaccacattccctgtaaccacgggtttaaaacccaccgtggccttgtgtcaacaaaagtgtagacggacggggactctggagggcaattattgttcaagtgactttgtattagccggcactgttatcacaaccatcactcgcgatgggagtttgcacgccacagtctcgatcatcaacatctacaaagagggaaatttggcgattcagcaggcgggcaagaacatgagtgccaggctgactgtcgtctgcaagcagtgccctctcctcagaagaggtctaaattacattattatgggccaagtaggtgaagatgggcgaggcaaaatcatgccaaacagctttatcatgatgttcaagaccaagaatcagaagctcctggatgccttaaaaaataagcaatgttaacagtgaactgtgtccatttaagctgtattctgccattgcctttgaaagatctatgttctctcagtagaaaaaaaaatacttataaaattacatattctgaaagagcattccgaaagatgggactggttgactcttcacatgatggaggtatgaggcctccgagatagctgagggaagttctttgcctgctgtcagaggagcagctatctgattggaaacctgccgacttagtgcggtgataggaagctaaaagtgtcaagcgttgacagcttggaagcgtttatttatacatctctgtaaaaggatattttagaattgagttgtgtgaagatgtcaaaaaaagattttagaagtgcaatatttatagtgttatttgtttcaccttcaagcctttgccctgaggtgttacaatcttgtcttgcgttttctaaatcaatgcttaataaaatatttttaaaggattacaaaaaaaaaaaaaaaaaaaaaaaaaaaaaaaaaaaaaaaaaaaaaaaaaaaaaaaaaaaaaaaaaaaaaaaaaaaaaaa

SEQ ID NO: 222136 - DNA, 1000 bp, Homo Sapiens
tgcacttctgtgaagtcatgctgaaggacatggcggactcccgccgcatcaatgccaacatccgggaggaggatgagaagcggccagcagaggagcagccaccgttcggggtctacgctgtcatcctgtccagtgagttctggccgcccttcaaggacgagaagctggaggtccccgaggatatcagggcagccctggaggcttactgcaagaagtatgagcagctcaaggccatgcggaccctcagttggaagcacaccctgggcctggtgaccatggacgtggagctggccgaccgcacgctgtctgtggcggtcaccccagtacaggcggtgatcttgctgtattttcaggaccaagccagctggaccctggaggaactgagcaaggcggtgaagatgcccgtggcgctgctgcggcggcggatgtccgtgtggctgcagcagggtgtgctgcgtgaggagccccccggcaccttctctgtcattgaggaggagcggcctcaggaccgggacaacatggtgctcattgacagtgacgacgagagcgactccggcatggcctcccaggccgaccagaaggaggaggagctgctgctcttctggacgtacatccaggccatgctgaccaacctggagagcctctcactggatcgtatctacaacatgctccgcatgtttgtggtgactgggcctgcactggccgagattgacctgcaggagctgcagggctacctgcagaagaaggtgcgggaccagcagctcgtctactcggccggcgtctaccgcctgcccaagaactgcagctgacacatcgcccgcccgcccgcccgcccgccaggcgctgccctgcaggtgctctcgtcctcccgtgccagcccccgcccgcccgtgtcccagaatgcactgctgaggagcatgcccacccccacccccgcagtgtgcagattaaagcaagtcagatcatcaaaaaaaaaaaaaaaaaaaaaaaaaaaaaaaaa

SEQ ID NO: 222137 - DNA, 1000 bp, Homo Sapiens
gggcgaggaggatttctccctgtcagccaccattggctctatcctcagggagctggacacctccatggatgggactgagccccctcagaatccagtgactccccttggcctccagaatgaagtgccaccccagcctgatccagtcttcttagaagctctgagctcccggtacttgggggactctggcctggatgacttctttctggacattgacacatctgcggtagaaaaggagcctgcacgggccccaccagagcctcctcacaacctcttctgtgccccaggttcttgggagtggaatgaactggatcacatcatggaaatcattctggggtcctaaaactgtgatagaggggatcgatccttcctcatgtcatcttcggtggcctggatccctgaatgcaactctgggtgtgtgtttttgtgggggctcgaagcagtgactatggcctcctttgttcccatttcagggttccacaaactgtcttgcatgtgtgtgtgtgtctggttaccccgaccttctgtgaaggtgggtcttcctgaattaatttatctattccaaatgccttaacgagactctgtttctgggagtctgattttccacttacacatttcttccacctttcctgctagttcccactcccctgtgaccactggggcctcagggaagataaagaaagctgggcctgtcgaaggatgacagggatgtgctgccaggttgctatagaaacccaggctctgcctcttgcaccttgagggggtgggaggggctggtgtcctccctccaggctgaaccccacttcctcggcaggaccccagtctcagcagcctcctgatttcataaccaggccggaccacgtgcaatagggtggaaaccaaactgctccatgccgggttatttaaaagaaaggcagagtttgtggtggcttttttttttttttttggattgtttgtaatttttttaaataaaagtattttggaaggagaaaaaaaaaaaaaa

SEQ ID NO: 222138 - DNA, 1000 bp, Homo Sapiens
acccatcggcgggagagagtgccacgcctccacagcttgccccaagcgctctgcctgcccgtccactcatctgcccatggggaagtcggctcactgggacaagggccactgggctggtctgtgtctgggcctgtcccatggctggggcagtgagggggcccagtcagcctctttggggcaccctctctcagccaggcttggcccactgccatcacccagcaccccagatcaccgccaggccagcccccaatggtccccttacggacaggtcccagagatggacagaggcacccagggcccccaccgtccttctgacacagcctgtgggctcccggaccgagtgtcccccgccaggctactcctaactaacgcgttgcctttcacggaccccgctggaagcttgtagcttggcaaggctgatgcttctgccctggcctgctctgggtggtggtggataggtggacagacggccagccagccagctgtggccgggggcccggctccatgtgtcccgtgtctgtgtgctgtgctgccgcgccgtgtctgatgtgtcagtgctccggccgccgctgtccctttcatcaaagccttaacctttgctttatgctcttgtgggaggcgacgggggggcaggcgggagcaggcacgggggtgatgctgccacagggggctggtgacacccagagccccctccccagccctcaggccctccctgccaaactggagaaccccaccccaaggcatgccacgtccgcagccccggcctggctgcggtgctcgcgccgtgggaaagcacactggggaggggtcagtgcttcccttggtgtcagggacctgagagtaagcacatgacagcgtctgcttgcgttgtgtctgttttatgtttttatatctacatctatatatctataattttattaaaaaaaagaaaaagaaaaaaaaaaaaaaaaaaaaaaaaaaaaaaaaaaaaaaaaaaaaaaaaaaaaaaaaaaaaaaaaaa

SEQ ID NO: 222139 - DNA, 1000 bp, Homo Sapiens
atgtagaaaaaattgagttaatggggtggactgggttgggaagaaatacatttcctaatgtatttatagaaaataaaaatatttttatgtgcctttttatttttgttggtggggaggtcattggacaagttccaactttcatcttgtgttcccttcaccttcatatcctgatcttagagcccccctccccctgccacccaccttactgtttaacctggatttttttttctatttaatttttgtctaatatcttagcccagtttatcaatcagttatcttaagtcagcattttctaagccattgtttgaggaaacagtgacaataggtaataacacatcttagtattaagagttttacaggccactagtataagataggcatcgtggtagatgcatataaagggtggaatgggagccatggcaggtcatagagtcctctcaatgggaacctgattgatgatcacagtcttcagtggtgagtcagtcctcaccaagttttccagatcattcctacaaagtaaactgggagaataataagtctgaaagagtgtggagtgctcccacaattacaaagaatgcttcctgggtggagtgttgagttggaaccattgtaaaggtgggcaaagcctagtagagaaccagtgcacctcaggtgcacttacatatggtggggctgaggcaaagcagccctgtaggcttcaaagaatcagtgtaagccactaaaaggaactgaaaacctaggtgtcacaataaacagtctacacagtctcacgtagaccaaaattctgatcattttccaggctgttgcatgaagtgatagagtatgattataatttctgtttgcttgtgctgtttgtttttgtttttcatctgtcaatgtgatgatctgtgttttatagggtagagtggatttgtctactttggctgtaaaataccctaatcacattatgatcttgacaggtgcactttactggggagaataaaaaggaccatacggtaaa

SEQ ID NO: 222140 - DNA, 1000 bp, Homo Sapiens
tcttctcattcatcaaagagtccatagtagtgataaattctataaaagcgaagactatggtaaggactacccttcatcagagaatctacacagaaatgaagattctgttttgttttgaagtcctcaaatgggagctgaaattttccagtcactagagttctttcagtagaaaaagaatttttaaaaattaaaatgtaatgttgctgcccaacttcaacattcataatggccaggagaccacacaacagagacatttaatgagaggggtttcacgagggattttgttagaactttaacatcagtcattgcacaggagctaaggcttataaaatatgagtatggtcaggaatttaataaaagtacagtgatgagcatgcctaaatccatgttctctagaatgtaagcttggtgaaagaagggactttgttcattgctagtctacaaaactaggacatttcataacgcaatgtaggtgctcagtactttttgctaaataactaaaagtatgtaaaggtaaaaggtttgaaatttttaagcgcattttttaaaacttaaaatgtatttggaggagaaatcctgcaagtaatcttaataaaatcatttcaagtaaatatttgaaatgtagaacaataagcattatgatgatctgaaataacattaatttgattgtaaccctattggggttagttcccaccctttgttccatcttgagcagagatgtgctgcatttcttaacgtttggtctctatacattataccatctgctgaagtttagctttgtgtgtgtgtatatgtacccatgtgtgcacttgaaatatcagtacaaactgataaacaatgtttctggttaatgttgcaaaaatggaacactgtattttacataattgattttctactcctgccctgtgaattaaggcagagttttactgtaatatttgcaagtatccaaaatggttactgatgacaaatactttttaataaatgtcaaaatcacaataaa

SEQ ID NO: 222141 - DNA, 1000 bp, Homo Sapiens
tttcctgaggtttttcactccaccaaatcttacaaatcattgaaagaaatatattctaacagtacgcactgaatagtgaaaataattagacattttaagaaccagagccatagaattattttaaattagtagaaaagaggagctatttccgaatctatagaataaagtaccacctaaaactgaattttatcatataagcaagtaatacctattagtcatacctaaatttttcagcacttcattcaattaaaatacatgaattttaaatattttacatgatgtgaataggcatgataatacttttagtataaaatctaaactttttccatttatcagaaatgataaaatccagttaccacatattcacgtttataaaatccttaattaaatgagtaacttctaaaatataacaatactaaatatcacactgtgatggaggtcccaaatatgtggtctatcaccactgaattcatgtaatagataagaaaaaaattagaggtggatgtcttgttttgtgtcatgaattactaaaatctcttagtagttgtggtatatttttgagtaaaattaccatttccagatttgagtttgaagggcttttatagttgtattttcctcctcactgttaataatcataatcctttttcagtattttagtggccttgaacaactggtttatctacaatctcaaatcctaagtgtataattatgtgcaatgttcaatacctcatataatacttgctcaacagtatagtggtaccaatggcattaagatggtgtttttgttctacatatttttcaataatttattctttctaatgttgaaattatatcaggctttaccggtttttttagttgtttaaataagtaatattttcaaaagaataaaataaccaatgatatctcttggaataatctgtaaaacgtagttataaaattctattttctacttaaaaaaaaaaaaaaaaaaaaaaaaaaaaaaaaaaaaaaaaaaaaaaaa

SEQ ID NO: 222142 - DNA, 1000 bp, Homo Sapiens; identical to SEQ ID NO: 116909

SEQ ID NO: 222143 - DNA, 1000 bp, Homo Sapiens
ctttgacacttaaatttatctatatttttaacaaagttcttgaacttagtatggcaccggaacctgttttgaattcagtcaggtttttactcaagtaagtggttgattttttttaagtcaaactacactgaaacttttatccttttcttagattaatcttactttttaaatgtatttacaatatacagcaaggtgattatttcaagagaatcccaaagtacttgaataagggctattgtaaaatttaaaagaaatatttatatatacacatatatacacatacacacatgtatatatatattcttcataatggaggacaatgttttgcaatatataaatcattctatttttgtaaattgtatatcactttaattgaaaatgttctctactaattaatactgtgaaacaaaattgatgttgtttaactagaagttatgagtatcttaactgcctttattccttttcaaaaaggaaaaagctgtagaacattttgtagatgaaactactgtttaagattaatgaattaatattgtgaatgaaaatcaaaatccatactttaaaggtaatcatgttactaacaacctatttttgaattcataaaaatttctttataaatgatgttttgtgaacatagtaaaatagaccattatactatgtgtatgtttgatacagcgtcgccaaaactagtgttctttattagtgcctctcacaaaagatcctggatggaggagtaagatgaaatattatgctattatatgatgctgtttgtaaaggtattaatgtactagtaaggtgttaatgacaaggaattagtactattcctgttgtaaagttagattttgcatattgtatctatcaaaatatgtttgggtttagattttaagttgtctactgagcagatttctgcattggttttccagtcctgttaaaagtttagaaacttcatatgtgtcatcacagcttttgtaaagaaagtatccttaatattttatgacattct

SEQ ID NO: 222144 - DNA, 1000 bp, Homo Sapiens; identical to SEQ ID NO: 116912

SEQ ID NO: 222145 - DNA, 1000 bp, Homo Sapiens
atatttttgacatgtgatggtgatagtctctggttctccccatccccacaaaggctgttgaaccacagcaccaggaagcctgagaatgaatcctgagggctctagcccaggctttgtcccaggctttctggtgtgtgccctcctggtaacagtgaaattgaagctacttactcatagtggttgtttctctggtcttgagtgactgtgtccacagttcatttttttccggtaggaataactccttttctacatccacgctccatagagtctctccttttcagacatcctgggatgaaagaatttggcttttttttttctttttttttttggacatctgttttcactcttaggcttttaaacaatagttattgcttttatccctctcagattctaataactgagagcgatggggctatattgaatctctgtatgcactgagaactgagctatgaagaggatcttattaaactgctggtctgactttatggattgacactgttcctttcttttattgtgaaaaaaaaaaaaaaccctgaaagtcttgggaaccccctaaagtcttttgggaatcctcaaaaagcatgggaagttaagtatttagctacataaatgttgtaagatcatatcttatgtatagaagtaataagaccatttggaattactggactaattgaatagttaaggtttctattcgggacaataaaatgtattttgaaagtgctgctaactattgatgctgacagtgtttcactcctatgagtgacccaaacatattataaatatgtggtaaagggaatggagcctgtggggttgagcagaatgttgtactagctgtgcctggactgagtataacagctttatgattatgagaaaacaaattctttattttttttttctgttccaaagattcatcctatggggtggccataaagtctagaattagatactaatattttgtcattcattataacatatcaataaaccatttgttaaaaaaaaa

SEQ ID NO: 222146 - DNA, 1000 bp, Homo Sapiens
tgtgtattctgtaacagattatgtataatcatatatgatatattcacaaagagaaaacaaaaggaacttttaaaaaaaaaatcacttcacttatattaagcaatgagatatactaaacaatgagattctatagaatgttctagaatgtgcacaagcgggtttctgtgcttttgccatagctttataactggggataacccttccttcgataccaaacactaacaagaggaagcagaatatgagaagccatatttttacataggagtcagatacaaaaagaaaaatcactgaatgcttttagatattgaatacgttttcaggaaaatgctaaatctgatagattacgaaatatatttttagaacttgtttagaaaggattcagttaaccaaacaagaaaaaggcagtgcctcacaaagaaattaagaagttgtccgtcccacgttacatcaaattcagttttatataggccatatataatatatatttataatgtataatttttatgtatttttcaaaactacaaactggaatccaactataaagtgtttaagaatctacacagaatattcaaattatagaacatgttttttccctttgccccataatcagtatttgccaaattacatgcaattccttaaaaactaaatcacattggtaaaaggcctacagctttgtacttacattgtgccaaaggctgaggaaatgttttctttcgaatttttatgtgtattgtaaaatgttctaccgtactttagtagtttgaagttttcaagtgcataactatttttgaccagcagaaggcgatacgcttcagtattttatgcaattttttttcacttcgaagggaaagtgtattataaaaaaagattttttttttttaaaacatgctactcttaattttcatgttggtgatgaaattcccagtggtgtttcttaaggttctatcttgtgccatgatgaataaaaagttaagcaaaaaaaaaaaaaaaaaaaaaaaaa

SEQ ID NO: 222147 - DNA, 1000 bp, Homo Sapiens; identical to SEQ ID NO: 116915

SEQ ID NO: 222148 - DNA, 1000 bp, Homo Sapiens
cctgcgttttcatttgtttgacatttgtctattattggatttcattatcatatgaacttgtcagtgggaaacaaactgtctaaaaatttttctcttacgtttaacatacaatcatgtgaaatttaggcagagttcgataaattactggcaaaaacaaaactcttttataaagattttctaatgttgactttaatactctaacatggtacaaaccaaatggtaaaatcccaagtcatttcttttttcatctctatttagcaacagaattaagtggatgaagatattctactatgcattaaatcttgaactttataaaacatgtacaaaaattgtacaagataagttccacctggtaatgtctttccctaatacagggttgcgcttgcattggaccctagggatttgcactaaaattatatcaaggtctcagatgagcttagtgcacaagcactatcactttaaatactattatttgctaccacagcaactatatatttccatagcttttggctgggggcgggggacatttttattacaacttgaaattgctttgctggtttcatatttatttgttgtatttaaaaaatacattgttgtaagagtgattttttcaatatattttattcctgggggggatcatgctacactctcaaaagaaaattaagaaatcattcagatcatcccccctttttaagtagtgtgaattgcaaaacccaacatattttttttactgtcagttgcggtttatttattctttaactgtctgttttagtagtttaatgattatgaaaaatgtatctgtgtgtgatttgctatttattaaattttaagtactttgctgaatgtcattttaaagcatgtttgaagtcttgtgtatttgtctgtgttaatgctgtcaggaggaactgactaagatgttttaatatgtatcaaaaattaaaatgattttttttattgccttgaggtactttttaaaaaaaaaaaaaaaaaaaaaaaaaaa

SEQ ID NO: 222149 - DNA, 1000 bp, Homo Sapiens
ccaaaacacctctcagcctccatgggtggctctgtggaaatccccttctccttctattacccctgggagttagccacagctcccgacgtgagaatatcctggagacggggccacttccacaggcagtccttctacagcacaaggccgccttccattcacaaggattatgtgaaccggctctttctgaactggacagagggtcagaagagcggcttcctcaggatctccaacctgcagaagcaggaccagtctgtgtatttctgccgagttgagctggacacacggagctcagggaggcagcagtggcagtccatcgaggggaccaaactctccatcacccaggctgtcacgaccaccacccagaggcccagcagcatgactaccacctggaggctcagtagcacaaccaccacaaccggcctcagggtcacacagggcaaacgacgctcagactcttggcacataagtctggagactgctgtgggggtggcagtggctgtcactgtgctcggaatcatgattttgggactgatctgcctcctcaggtggaggagaaggaaaggtcagcagcggactaaagccacaaccccagccagggaacccttccaaaacacagaggagccatatgagaatatcaggaatgaaggacaaaatacagatcccaagctaaatcccaaggatgacggcatcgtctatgcttcccttgccctctccagctccacctcacccagagcacctcccagccaccgtcccctcaagagcccccagaacgagaccctgtactctgtcttaaaggcctaaccaatggacagccctctcaagactgaatggtgaggccaggtacagtggcgcacacctgtaatcccagctactctgaagcctgaggcagaatcaagtgagcccaggagttcagggccagctttgataatggagcgagatgccatctctagttaaaaatatatattaacaataaagtaacaaatttaaaaagataaaaaaa

SEQ ID NO: 222150 - DNA, 1000 bp, Homo Sapiens; identical to SEQ ID NO: 116918

SEQ ID NO: 222151 - DNA, 1000 bp, Homo Sapiens
tgtcccgcaaggcccccagcaagccctcagccagtaccaagaaagcagaagggaagctgagtaactccaacagcaaagatggcaacatgcagactgcaaagccttccgctatgaaggtgggggagaagctggccacaaagtcttctccagtgaaagtaggggagaagcggaaagctgctgatgagacgctgtgccaaacaaaggtattgctggacatcttcactggggtgcggctttacttgccaccctccacaccagacttcagccgtctcagacgctactttgtggcattcgacggggacctggtacaggaatttgatatgacttcagccacgcacgtgctgggtagcagggacaagaaccctgcggcccagcaggtctccccagagtggatttgggcatgtatccggaaacggagactggtagctccctgctaggtttgctgtcttccctctccctcaggccatactctcctttaccatactactggactggactcaggctggaggcagatagacacagtatagggggaatgggcttgcttctcccaaacccaccagttctccactgtctcttctggaccaggaattagttgctgtgggtgccacagctgaagtcagtttgtcttgctggtttaaatagatctttcagagctgggtgctgggtttgccatctttttgttttctttgaaaagcagcttagttaccctttttataaataaaatatcttgcagttatctttgtcctttccccacctacacccccaataatttccctagagattaaggagtaaaggctgggctatggcagctctgtccacaaagccttctctcccatccttgcctgttcctttgtacttccaggctcattttaaagttgtatttaaaggactgccctcggaaatgcttctgtttagcggaacttgtattcagcctgacacgctttgccaggaacaaacctcatgtgaaagaaaacaaaatgaatttttttactttcttctc

SEQ ID NO: 222152 - DNA, 1000 bp, Homo Sapiens; identical to SEQ ID NO: 221514

SEQ ID NO: 222153 - DNA, 1000 bp, Homo Sapiens
cacagaagcccagggggtccaggagagtctcagcaagctcctggaagagctatctcaccagctccttcaggaccgagcaaagggggctcaggcctcgccgcctcccatagctccttaccccagccctacacgaaaggacctgcttctccacatgcaagagctctgcgaggggatgaagctgctggcatctgacctcctggacaacaaccgcatcatcgaacggctaaatagagtcccagcacctcctgatgtctgagctccatggggcacatgaggcatcctgaagcattagaatgattccaacactgctcttctgcaccatgagaccaacccagggcaagatcccatcccatcacatcagcctacctccctcctggctgctggccaggatgtcgccagcattaccttccactgcctttctccctgggaagcagcacagctgagactgggcaccaggccacctctgttgggacccacaggaaagagtgtggcagcaactgcctggctgacctttctatcttctctaggctcaggtactgctcctccatgcccatggctgggccgtggggagaagaagctctcatacgccttcccactccctctggtttataggacttcactccctagccaacaggagaggaggcctcctggggtttccccagggcagtaggtcaaacgacctcatcacagtcttccttcctcttcaagcgtttcatgttgaacacagctctctccgctcccttgtgatttctgagggtcaccactgccagcctcaggcaacatagagagcctcctgttctttctatgcttggtctgactgagcctaaagttgagaaaatgggtggccaaggccagtgccagtgtcttggggcccctttggctctccctcactctctgaggctccagctggtcctgggacatgcagccaggactgtgagtctgggcaggtccaaggcctgcaccttcaagaagtggaataaatgtggcctttgcttctgtt

SEQ ID NO: 222154 - DNA, 1000 bp, Homo Sapiens
ggaaggtccgggaggtgcgagctcaactcaaggacatcatggtgcagcagcggatgagcctggcctcgtgtggcactgactgggacatcgtcaggaagtgcatctgtgctgcctatttccaccaagcagccaagctcaagggaatcggggagtacgtgaacatccgcacagggatgccctgccacttgcaccccaccagctccctttttggaatgggctacaccccagattacatagtgtatcacgagttggtcatgaccaccaaggagtatatgcagtgtgtgaccgctgtggacggggagtggctggcggagctgggccccatgttctatagcgtgaaacaggcgggcaagtcacggcaggagaaccgtcgtcgggccaaagaggaagcctctgccatggaggaggagatggcgctggccgaggagcagctgcgagcccggcggcaggagcaggagaagcgcagccccctgggcagtgtcaggtctacgaagatctacactccaggccggaaagagcaaggggagcccatgacccctcgccgcacgccagcccgctttggtctgtgagctgaggctgtccccagagaggatggcagcaggtattgggtcctcagccttctggcgggagccctgaggctgcggacaaagccctttcatctgaggactttcatctgtgcatatcacggccccccagggcagttcctgctggaccagactctctggcagaggaggtggagttcttccatgcaggagcacggcatggcgggagcggggctgcagagtatccgaggtgctgccggggcagcgggaggtggctggacccatcgcatctaaaactggcccaggacacttggtgtatgcgtgacttggctgtggctgtcttttttaatccttgtgtaaagcagcaaaaaagacctaaagggaattgtaatttggttataattcaggatttggaaataaatttattatttgtaaaacatgaaaaaaaaaaaaaaaaa

SEQ ID NO: 222155 - DNA, 1000 bp, Homo Sapiens
tgagccaccgcgcctggcctaaaatgtgttctttattattgacggctgtattgatgggattggtaatttagtccttcatattaatctctattctctctcagagtacaagctctcatcatatgcaaattctcagaagggctgtgaacaccttagtaataaatttatcttttgaggtcattagcaaacatgaactcacagggatccagagatggtaaaattcaaaacagcctgtcaagttcaaaacagagaggtgaaagcagaagagacactttcctattttgcctaataggtctccttatatgcatctgtagttaacattcctcaattcaagttagaatcatgaaacaataatgaagctcctcctatgtctcttttcaagttgtaattactatataggaaaaactaagttgtcacccaatatcttagacactttgagagcaaagggggtgctgtaaataagtatacaagatcacagacctaaattgagcctgttccagacaaattggggcctatggtcaacctatccttagacctgctaacgcattagcattagcagcacctaagtcctcattgaatgttctggttcaaggctccacctcagaaattctgaaatgggtagtaagagcaaattttcattttaaagcacacctgagatgattctcatacaaccgaaattttagatccatagccctatttgatacttgacagtgcaagtttctgtaatttaaaaagatgtggtggcctgacacctgcaatcccaacattttgggaggccaaggtgggagggtcccttccttgagcccagcagtttgagaccaatgtagtgagactcatctctgccaaaaaaaaaaaattagccgggcatggtggcacacatctctagtcccaattactcaggaggctgaggcgagagaatcgcttgagcctgggacattgaggctgcagtgaactgtgatggcacaactgcatttcagcccgggagacagcaagattctgtctc

SEQ ID NO: 222156 - DNA, 602 bp, Homo Sapiens
ggaagcagcgggcagcggcccgcggagaggcacctcggagatctgggtgcaaaagcccagggttaggaaccgtagcatgctgcgccccaaggctttgacccaggtgctaagccaagccaacactggaggcgtccagagcaccctgctgctgaataacgagggatcactgctggcctactctggttacggggacactgacgcccgggtcaccgctgccatagccagtaacatctgggccgcctacgaccggaacgggaaccaagcgtttaatgaagacaatctcaaattcatcctcatggactgcatggagggccgtgtagccatcacccgagtggccaaccttctgctgtgtatgtatgccaaggagaccgtgggctttggaatgctcaaggccaaggcccaggctttggtgcagtacctggaggagcccctcacccaagtggcggcatcttaacggcattggtggaagctggggtcagaaaagagaaatgaccatttggaggggcggtgcctcctagaagaaccttcttagacaatggggggaggatgggactttgttttttccaagaataaactcaactcctgcatgaaaaaaaaaaaaa

SEQ ID NO: 222157 - DNA, 1000 bp, Homo Sapiens
gagtttaatttgaaagtctgggtgtcttaggatgatggttaggaacattgaaaaatggctgcaaatagccaaatcaaacttaagaaccagatctctgccagattaaacatttttgaagcttttaaaagtcaatattcctagtggccactgagttccaggcacactggtgccctttactgccacagctgctcaccttgtctggcaaactggagggacctcagaaactggactcctgcatgtccttgggggcgcagccctgtggtgctcaggcagagctctcaggagccggggcaccttgctgttcgctgctgtgtcgtcttctaatgtgagctcatccactgctgctgcagcgtggtgatcaggagtcacagacaagatcggggatggtgtgtgtgtgtgtgtgtgtgtgtgtgtgcacgtgtgtgtggctaaattaagtcatactgtcaaccacacgtgatctcgtctgaaacagtgtttggaagtgggaacagttttgtcctgtatgctgatgtgtccagaatttcatttaatgatagacggaaaatgtgtggttactgaaaactgtatatgatacagaatttcataagagccatgctgttgggcaaagcaactctttttcaaccactgctcatcagtttctgtagagacaaaaactctgtacatattttggaatctgaagaatcctatgtaaatcatttgttacttaagtctgtgaaaaacatatttctttggaggaaaatgtatgcatttataagtgttccatggaatcagtttttattgtatcgatataattgtctctaagtgttgactgtcttcattgcaatatgaaattcattaaaatgtccatgttccataattactattataaaagctttgtgttattgggagtcttattatttttatagtttttcatgttttgctttggtgaaacattgtgaatgactatataaacatcacgatgagctagaaattgaacaaatataatactggtcactcg

SEQ ID NO: 222158 - DNA, 1000 bp, Homo Sapiens
agaaagtactgtctgtcttaaattttgctgcaaataaaaatgtactttggattatttattgttgaacttgagagatagaaataacatcagatatattttttcttttttttttataattaattttttttttttttttttttgtagagacagtgtctcactatgttgcccaagctggtcttgaactcctgagttcaagagatcctcctgccttagcctcccaaagtgctgggattacaagcataagcaccacacctggctgaacatcagatattttaaagtgtagcccagagtctagttggtaaatgttacttatattgggactagtattttctaatgtttctgggatatgctccctataaaatgaaatgttttcctggaacaatgctaattaggattgcattcctggccaaagacatgacatcaaataagtaatagacatcaccagcaatgaattttgaaaagcaaaaaatactattaacctatataaccatttaaaatttaaaaaattatgttccaagtacctctattttctgagctagaagaaaccttagaggccatctgatgatagattcccagagctggatggatccctagggactacctaatctgactttctgtccactgcatggattcttctaaaaagtatgtcacttatttccctaccttattaagactaaataagtggaacatcatagagctctttatttataacagtcattctttgatagtcaactcttaaatggagacttgagatgcttaaatattgtactactgtgcttatcttgtaaagatttcataaaatgatagtattggttattttaaaaaggctttggcttatgctgaattatacatgtagcaccaaaatgttacaactctactaaatttccttgttctaaactattatattagctataataaatattagtcatacatgtaacatgtttaatgacaaataactttctttatctccttggaattaaagagggcttttaaaagataa

SEQ ID NO: 222159 - DNA, 1000 bp, Homo Sapiens
cgcaggtcttaaggagctttccgacttcctccgagtccagcagtccctgggcaccaggaaggaactgcagaaggagctccaggagcgtctttctcaggaatgcccgatcaaggaggtggtgctttatgtcaaagaagaaatgaagaggaatgatcttccagaaacagcagtgattggtcttctgtggacatgtataatgaacgctgttgagtggaacaagaaggaagaacttgttgcagagcaggctctgaagcacctgaagcaatatgctcccctgctggccgtgttcagctcccaaggccagtcagagctgatcctcctccagaaggttcaggaatactgctacgacaacatccatttcatgaaagcctttcagaagattgtggttctcttttataaagctgatgttctgagcgaagaagcaatactgaaatggtataaggaagcacatgttgctaaaggcaaaagtgtttttcttgaccagatgaagaaatttgttgagtggttacaaaatgcagaagaagaatccgaatcggaaggtgaggaaaattaaatggctcaacaagcacaatacctaggttaccacacaccactttttgattgggaatgctgaaccatttgagaagagaaacttggcttctgttttcgcaaaggaaaaaaaaaataggataggcttcccttgtgcagagggagaaatggttttgtttttgttttgtttttaaatggagccctgaggcatcagctattatacttgggactctacctctcactcactatatgctaacttaaagccattcaacaaggagtcaagtagatctgaaattaaatactcaacagactcctccttttttagctgtatttttcaggtactgtgtggtgaccgccccactggtgtctattacaggccactttggtagttgtgtatctgctcatgtatgtgatttgacaaaccagttttttaaaataaatggctttttaaaaatctggaaaaaaaaaaaaa

SEQ ID NO: 222160 - DNA, 1000 bp, Homo Sapiens; identical to SEQ ID NO: 116927

SEQ ID NO: 222161 - DNA, 1000 bp, Homo Sapiens; identical to SEQ ID NO: 116930

SEQ ID NO: 222162 - DNA, 1000 bp, Homo Sapiens
gcttgtaatatcagcaccatgttttatggaacatcagctgttgccacacttttatttattttaacagcaattgccttcaaagaaaaacctcggtatccaccaagtcaggctcaagcagctcttcaagacagtccccctgaagagtactcctataagaaatcaataagaaacctgtttaaaaacattccttttgtccttctgttgatcacttatggtatcatgactggtgccttttattcagtctcaacgttattaaatcaaatgatattgacatattatgagggagaagaagtcaatgctggaaggattgggctaacgctagtagtagctggaatggtgggctctattctttgtggcttatggctggattatactaaaacatacaaacagactaccctgatagtttatattttgtcttttattggaatggttatctttactttcacattggaccttagatatattatcatcgtgtttgttactggaggggtgcttggcttcttcatgactggttacctccctttgggttttgaatttgctgttgaaatcacttaccctgaatctgaaggtacttcatctggtcttcttaatgcttctgcacagatatttggaattttgttcacattggctcaaggaaagctcacatcagactatggtcctaaggcagggaacatttttctctgtgtctggatgtttataggcatcatattaacagcattaatcaagtctgatctgcgaagacacaacataaatataggaattacaaatgttgatgttaaagctataccagctgacagtcccacagaccaagaaccaaaaacggttatgttgtccaagcagtcagaatcagcaatttgaagagaaaggcaaagttactgtcccgtagtaattggggacaatgtgatcatccttggagagagatgtgagcaccaaggctgggtttgtatgtggtgggggaataaacacacttacttgaaaattaaaaaaaaaaaaaaaaaaa

SEQ ID NO: 222163 - DNA, 1000 bp, Homo Sapiens
gcctcgaaagcaatcggtccaaattagaacaggaagttagaagactccgtgaagaatgtcttcaagaagaaagtagataccattatacaaattgtatgattaagaacctagaagttcaacttcgtcgtgctactgatgagatgaaggcatatatctcttctgatcaacaagaaaaaagaaaggcaattagggaacagtataccaaaaatactgctgaacaagaaaaccttggaaagaaacttcgggaaaaacaaaaagttatacgagaaagtcatggtccaaatatgaaacaagcaaaaatgtggcgtgatttggaacaattaatggaatgtaagaaacagtgctttctgaaacaacaaagccaaacttccattggtcaggtaattcaggagggtggggaggaccggctaatactgtgaattcttgtgtcatcgtttggggttttacttgataccactagctataagcctaatctcataatgtatttcttttttgaaactgatttgtatagcattttgttttcagaagagccattctttattaagttttcatagaaaataatgttaaggtagatttagtttgaatgttttttcatatgaaaaagaggcttttattcttttccatagtttagacatcactggcgtcttctgagttttatgagacaggaaactaagtttactatctgtaaatgtaaacatatgtccattaagaaacatgtagtttttttttagaatgtaataacccagtggcttactgtttttcttaatctcttttaaaaaaactttagaagaatcttttaggaactaatatctcttgttctgaagaaacatttatctgacgttcagcagttcctacagttttacttcagtttatttttcttctgtaaaatgcaagaaaatttaatattttgactaacatgtcttttctgtttgtatcatttaaaggcaaataaacttggtacgtatttcatatctatttaaaaaatgtaaaaaaaaaaaaa

SEQ ID NO: 222164 - DNA, 1000 bp, Homo Sapiens
tacgctcgatagtaaccactctggtaccctccgagctcatctccgccgtaccgaccacaaaaagcaatcatggtggcatagcatctgagtcacttgcgggtggcctagtggaggagaaggtgggatcccatccagaacttctacccagcatagccccgtcgcagaatttagtctcaaaggaaacttcaaccacagcactgcaggcctctgttgccagaccagagctggaggtaaatgctgccatagtctctggacaaagcagtgagcccaaagagatagttgaaaagtccaaaatcccaggccgaagaaactcccgaactgaagagccaactgtggcctctgaaagtgtggaaaatggacatcgtaaacgatcttctcgacctgcttcagcctccagctctactaaagacataaccagtgcggtgcaatccaagcgaagaaaatccaagtaaacaagcaggactgcgacttgatacttggaaatgtgtgtgacttttacaaagagcaattttgagctgtgacttttttaaatcaatttctgtacagttagtaattttaataatgtggcccttttcctagtccctgcaacctgtttcataaagtgcaatggggaaagcaggactgttgagcccttttggtgttgcgagttgaagttcaaggtttctaaaatgttgtcttgtattgaaaggagctaatgccattataaatgttactagttttcacatttcctaagcagcctagagtacagggtgagcatttttagatctcctaatgatgtattgtgccgtggaagtactgtgtgtgaatagcagtagtgggggcaaaagcaatcttctcatttggaaatgttgtaaataattttattatatagtgttttggatgtatttgttgtagaaatggaccagtgaataaagagaatctaaggatttgtacaatgtgaaataacgtgttaaataaatgtcattgtcatagaacataaagttatgttattggtaaggga

SEQ ID NO: 222165 - DNA, 1000 bp, Homo Sapiens
ttttctccttaatatgtttgaaattattgattttggcatttttctaagcaatttatgtaattttatttgaagaaaatgttttgtataatgtttttcccagcctaaacagggagagtcctaacagtgttgtgcttgtatgattctgagactttatttgcgtaagtgatactactatactttatttttgacccatgcctttttaagctgtttcatattgaaaggtggaatattgtaaaaattttgtcaaagatgtactgtagtgctatttgaagtacctgtaacaaaacagttggccctctgtatccatgtactctgcatctgtggattaaaccaattgcagatcaaaaatattagaaaaaataaaaataatacaaataaaaatacagtataacagttatttaaatagcatttacattgcattaggtattagtctagggataaagtatacaggcggatgtgcgttggttatatacaaatatgtcattttatgtaagggacttgagtatacttggatttttggtatctgtgggttggggggacggtccaggaaccaataccccatggataccaagggacaactgtacttatttacctttattgtcattgcaagcttcttatggaaactttataggaatgaaaatatacatgttaagaagattaaacattagatagtagatggtttgttgcatgctagaactgttagtattgttgaatcaattactttggtttcatgaaaaaataaacgataaatatctttaaagagaactagaagaattttttgtttgagtgattccaggctgtagtatgatcatttactgaagtagtttgattggctggctaacttagaattattgtttcttgttttgtactgcaataggggttataattgtaagataaaaatgtgtgtgtgtttaagggaagtaggtggtggttaaaattcttggaaaattttcagaatactttaaaaataaagttccaagttacaaaaaaaaaaaaaaaa

SEQ ID NO: 222166 - DNA, 1000 bp, Homo Sapiens
tccgacgtcctttcccagctgcctgccaagcagcgcaagatagtggtgattgccccaggacggatcaatgccaggaccagagctgccctggatgctgcagccaaggaaatgaccaccaaggacaaaactaaacagcagcagaaagatgccctcattctcttcttcaacagaacagctgaagctaaaatcccatctgtcattgaatatatcttggacctactggaaagtggaagagagaagtttttagtatttgcacaccataaggtggtcctggacgcaattacgcaagagcttgagagaaagcacgtgcagcacatccgcatcgatggctccacctcatcagctgagcgggaggacctgtgccagcagttccaactgtcggagaggcatgctgtggccgtgctgtccatcaccgctgccaatatgggcctcaccttctcctcggctgacctggtggtgtttgctgagctgttttggaacccaggggtgctgatccaggctgaggaccgcgtgcaccgcattggacagaccagctccgtgggcattcactacctcgtggcaaagggcacagctgatgactacctttggcccctgattcaagagaagattaaagttctggcagaagccgggctttctgagaccaatttttcagaaatgacagaatccactgattacctctacaaggacccaaagcagcagaagatctacgacctattccagaagtcctttgagaaagaaggaagtgatatggagctcctggaagcagcagagtcctttgacccaggaagtgcttcaggaacatctggaagtagttcccagaacatgggagacaccctggatgaaagctcattgacagccagtccacagaagaaaaggagatttgaattttttgataactgggacagctttacgtctcccctgtaaaaggggcaaaaagaaaaaaataaaaagcattttaaaatcatggaattgaaataaaataatgtattttgttttaaaa

SEQ ID NO: 222167 - DNA, 1000 bp, Homo Sapiens; identical to SEQ ID NO: 116934

SEQ ID NO: 222168 - DNA, 1000 bp, Homo Sapiens; identical to SEQ ID NO: 116935

SEQ ID NO: 222169 - DNA, 1000 bp, Homo Sapiens
gcctaggcggaaactgtacaccatggtcttccagatgggtgactgatggctttgggtagctgatgcatgctttaatatttgcctatagcccggcagcaaggaagtcggggcggggggacttttttaccctgccagttatagcattgtgattctttctgggcactggcattttgtgaaactctcaagggaaggtgatgcaggggagaaaatgtgaattaaattacatagatgggtgtttttatgtcttctacccctttcctagaattagtacaactcttaactgtgccagtccccagttcaccagctttgtatccagtcgtcatctcattcaagtatggctttacttggtgacactggccatagctaagttaacttggcatgtttgacttttgacaataacaaaaatggttttggattttgttttatttccaaaaaatgtatacaatatcagaacttcacattttatatactagtatctggctattagtattttacaggaaccatagttcttggtgactacatatatatatatatttttgtgaccttttttgtaaactaagtgccgtttcaacgttacaatcatttttagggttattgtaatcaatgtgaatatcatgttttttcaaatctgttctgagcctatagtgtttgctttgtgaacatgtgtattgtatatattctgtatagttatattgtactgaaattagcttgtttgatataaggaaaatatgtattgagtacctttttgctagcctgattgtttaatctttttaaaaaaggtttaaactttttttaaaaaaaaaatctttaaactggcctttattacatggtcacacataaagttgcagttaggaaagggatgggcagggaaaaactagttttgagtgtctttagatagaaacatgagactaaggtttgattttgttttcgttttctcattaaaatatcttatgctttatggaataaaaaaaaaaaaaaaaaaagaaaaaaaaaaaaaaaa

SEQ ID NO: 222170 - DNA, 1000 bp, Homo Sapiens; identical to SEQ ID NO: 116936

SEQ ID NO: 222171 - DNA, 725 bp, Homo Sapiens; identical to SEQ ID NO: 116939

SEQ ID NO: 222172 - DNA, 1000 bp, Homo Sapiens
tagttttaagccactaggtagatatttaggggaatagtcaaaatttactgttgaaaaagcagttgctatgtgctttcttaccctgttctgttccagttttgctggatttgtacatagccattctagaaatagagtcgagggaaattatccatatacatatcactaataggcttcttggaattatttagaaaagcatttttaaactggcagtggatgactgaataggcatcatatttctttttgtgtgtcatttaaaagtaacaaaaactgccatttgacagtaaaggctcttggcttctgttggaggcatgggaaattgtctcaatttgtacagtttgtaattgtaatttttgtaaataaatttgtttgtacattgtatgctttttttttagtttaaatatactgtcagtgtaggtaggaaattatttctgtaaatccagttgcattttataatacttgagtgactaactgaattgaaacctattacaattaatagggttctcaaaggcctattcctattagaagaaataattttttttaataattgaaaaaatttaccacagccttgtctgattttaagaatagattgtgtgaagatttagaatggaaagcaaccatttcttcccttcaccttcctcttcttacagttccccaggagtcatttttaaccacttttaatttctgttggtaacctctgtgtttaggtaatatgcttatacaactatttcttgatgtatcagttttagacaatgtatcttctgatttcaaaggtaatacaacatttaatgtgaaacatttagtgaatacagtaaaggagaaaataaaattgttagcattctacccagagataatatcaattcatattgtagtgtagatttttttaaagttcacatacacttttttgtaaaatgagaataatgtttatttcctgagatactgctgtattttttaattgctaatctgtattcttcaaatgaactgagaattccatttttccatc

SEQ ID NO: 222173 - DNA, 963 bp, Homo Sapiens
ggcttccggcaccggccgaggtgcgggtcgcctccagagatcctgtgccttcaaaccctacgagtccatactttaaaacaaaatgaagaaagtaaggcttaaggaactagagagtcgcctgcaacaagtggatggatttgaaaagcccaagctacttctggaacagtatcctaccaggccgcacattgcagcatgtatgctctatacaatccataacacttatgatgacattgaaaataaagtcgttgcagatctaggatgtggttgtggagtacttagcatcggaactgcaatgttaggagcagagttgtgtgttggatttgacatagatgaagacgcattggaaatatttaataggaatgcagaagagtttgagttacaaatattgacatggttcaatgtgctgtgtgcttattatctaacagaatgtccaagtcattcgatacagtattatgaatcctccctttgggaccaaaaataataaagggacagatatggctttctaaagactgctttggaaatggcaagaacagcagtatattccttacacaaatcctcaactagagaacatgttcaaagaaagctgcagaatggaaaatcaagatagatattatagcagaacttcgatatgacctgccagcatcatacaagtttcacaaaaagaaatcagtctgatcatctaaatcacccgaaaatttcagcaagcatccaatcttttcttctagagatttctataaaaatatacaaagtgatcaaaaagtttcttaaaagcaacaacagaccagaaatgactcacaccaccttatagctatacaagaaaaagactagaaaccaaaatgctattttaaagtagtttcttccgccggggcagcaagagcgaaactccatctcaaaaaataataataataataaataaataaagtagtttcatagaaaaaaaaaaaaaaaaaaaaaaaaaaaaaa

SEQ ID NO: 222174 - DNA, 801 bp, Homo Sapiens
atacgggccgcgccgggcaagaagatggcgggatcagtggccgacagcgatgccgtggtgaaactagatgatggccatttaaacaactctttgagctctccagttcaagcggacgtgtacttcccacgactgatagttccattttgtgggcacattaaaggtggcatgagaccaggcaagaaggtgttagtgatgggcatcgtagacctcaacccagagagctttgcaatcagcttgacctgtggggactcagaagaccctcctgccgatgtggcaatcgaactcaaagctgtgttcacagatcggcagctactcagaaattcttgtatatctggggagaggggtgaagaacagtcagcaatcccttactttccattcattccagaccagccattcagggtggaaattctttgtgagtacccacgtttccgagtgtttgtggatggacaccaactttttgatttttaccatcgcattcaaacgttatctgcaattgacaccataaagataaatggagacctccagatcaccaagcttggctgatttaaaccacctctatttcaaataggatcacgtgccacaactatctgactgttggtctggaagaagtgtcctagcaagatctggagacttaaaaagaaaacaaaaacaaatggcaagtttcacttaagggtggtttgcccttaagaagaaagctgttgggacaaagacaccgagccattatacccagaataaaataatacatttatgctggattttattcagaccaaactaaaaaaaaaaaaaaaaaaaaaaaaaaaa

SEQ ID NO: 222175 - DNA, 1000 bp, Homo Sapiens; identical to SEQ ID NO: 116941

SEQ ID NO: 222176 - DNA, 1000 bp, Homo Sapiens; identical to SEQ ID NO: 116945

SEQ ID NO: 222177 - DNA, 1000 bp, Homo Sapiens; identical to SEQ ID NO: 116947

SEQ ID NO: 222178 - DNA, 1000 bp, Homo Sapiens; identical to SEQ ID NO: 116950

SEQ ID NO: 222179 - DNA, 1000 bp, Homo Sapiens
gggatcaggaatacctctactaacaaccaatttgtccccacaatgcctctccctcctgcacgcaatggtggcctatgatcccgatgagagaatcgccgcccaccaggccctgcagcacccctacttccaagaacagaggaaaacagagaagcgggctctgggcagccacagaaaagctggctttccggagcaccctgtggcaccggaaccactcagtaacagctgccagatttccaaggagggcagaaagcagaaacagtccctaaagcaagaggaggaccgtcccaagagacgaggaccggcctatgtcatggaactgcccaaactaaagctttcgggagtggtcagactgtcgtcttactccagccccacgctgcagtccgtgcttggatctggaacaaatggaagagtgccggtgctgagacccttgaagtgcatccctgcgagcaagaagacagatccgcagaaggaccttaagcctgccccgcagcagtgtcgcctgcccaccatagtgcggaaaggcggaagataactgagcagcaccgtcgtctcgacttcggaggcaacaccaagcccgaccgggccaggcctgggtgatctgctgctgagacgccacggagggctggggatgcgcctgcgtccgtttcgcgctggccggggctctgggtgctgccctgcgccctgccgcacccgcggcccgcgcagctgcctaggatgttctgggctaatatacttgtaaaaccaccgcattctagggttttctttcattttcgttaagaatttggggcaggaaatactttgtaactttgtatatgaatcaaaacaaacgagcaggcatttctgtgatgtgttgggcgtggttggaaggtgggttctgcgtgtcccttcccagcgctgctggtcagtcgtggagcgccatcatgtcttaccagtgacgctgctgacacccctgacttttattaaagaataagctgtcgttaaaaaaaaaaaaaaaaaaaaa

SEQ ID NO: 222180 - DNA, 1000 bp, Homo Sapiens; identical to SEQ ID NO: 116957

SEQ ID NO: 222181 - DNA, 1000 bp, Homo Sapiens; identical to SEQ ID NO: 116962

SEQ ID NO: 222182 - DNA, 1000 bp, Homo Sapiens
tacccagttggcaaaattcaagatgttgcaaagtataccacagacatcagaagttggttggagctatttggtttccaattacacaatgtactacctggatttcccaaacctgaattagaaaatttagaattaacttacgagcttctacggcttcagacaaaaactcaagagtgggatcctggaaagactatcctgggcattcagtgtgaactccagaaacagctcaggaatttcatttccttggaccaactacctatgactccccgatacaatgatggacggtgccttgaaggagggaagcaaccaaggtttgctgctgtcccttctgtttttgggaaaggtataaaatttgccatcaaggatggcatagtaacagctgatattataggagtagccaatgaagatagcaggcggcttgctgccattctcaataatgcccattacctggaaaacctacattttaccatagaggggagggacactcactacttcattaagcttgggtctctggaggaagacctggtgctcatcggtaacactggggggaggcggattctggagaatggtgtcaatgtcactgtgtcccagatgacttctctgttgaatgggaggactagacggtttgcagatattcagctccagcatggagccctgtgcttcaacatccggtatgggacaactgtcgaagaggaaaagaatcacgtgttggagattgccagacagcgcgcagtggcccaggcctggactaaggaacaaagaaggctgcaagagggggaagaggggattagggcatggacagaaggggaaaagcagcagcttttgagcactgggcgggtacaaggttacgatgggtattttgttttgtctgttgagcagtatttagaactttctgacagtgccaataatattcactttatgagacagagcgaaataggcaggaggtaacaaaaatatctctgcctttgcgtcaccaaagactgcctgtttttaaaacataaaa

SEQ ID NO: 222183 - DNA, 1000 bp, Homo Sapiens; identical to SEQ ID NO: 116965

SEQ ID NO: 222184 - DNA, 605 bp, Homo Sapiens; identical to SEQ ID NO: 116966

SEQ ID NO: 222185 - DNA, 1000 bp, Homo Sapiens; identical to SEQ ID NO: 116967

SEQ ID NO: 222186 - DNA, 1000 bp, Homo Sapiens
aggcgggtggattgcttgaggccaggagttcgagaccagcctggccaacgtggtgaaacgctgtctctactaaaatacaaaaaaatagggctgggcgcggttgctcacgcctgtaatcccagcacttttcagaggccaaggcgggcaaatcacctgaggtcaagagtttgagaccagcctggccaacatggtgaaaccccatctctactaaacatgcaaaaattacctgggcatggtggcaggtgcttataatcccagctactctgggggccaaggcaggagaattgcttgagcctgggagatggaggttgcagtgagctgagatcatgccactgcactccagcctgggcaacagagcaagactctgcctcaaaaaaaaattaaaataaatttaaatacaaaaaaaaatagccaggtgtggggtgcatgcctggaatcccagctacttgagaggctgaggcacgagaattgcttgaacccaggaggtggaggttgcagtgagccaagatcacaggagccactgcactccagcctgggtgacagagtgagactctgtctcaaaaaaaaattaaataaattattataacctttcagaaatgctgtgtgcattttcatgttcttttttttagcattactgtcactctccctaatgaaatgtacttcagagaagcagtattttgttaaataaatacataacctcattctgaataatgtccctcattttgactataactgtgcttggtttcaaaagcaaaattaaacaaaaatctcagtcccctccgaagtgaactttgtgttaccctgcgtcagaaatgccaagttgtgtttacttttcattcagattttgtgaatatgaacatgctgttataggatctacagatgaatatttaactcaatagaaaaattattttagaacacattgtattggtattacaaccagattatattcttgacgttgacttcattaaaattatctacaatttcctaataaaaaaaaaaa

SEQ ID NO: 222187 - DNA, 1000 bp, Homo Sapiens
cttcaagaactaaagaaatacggccagcctattcaaatgaagtacatggagcatgaagagagaccaaaagccttaaatgacttgggaaaaaagatccaacttgtcatgaaagtgatagaagcttatagaaacaaggatgaaagatatgatcatctggatcctactgaaatggaaaaggttgaaaaatgtatcagtgatgccatgagttggctgaatagtaagatgaatgcacagaacaaactaagtctcactcaagatcctgtggtaaaagtttcagaaatagtagcaaagtcaaaggaactggataatttctgtaaccccatcatttacaagcccaaaccaaaagcagaagttcctgaagacaaaccaaaagctaatagtgaacacaatggcccaatggatggacagagtggaactgaaactaaatcagattcaacaaaagacagctcacagcatactaaatcctctggagagatggaagtggactaagtcttaattttaccttcacattaattcaaaccgtgcaagtaaccacggggtccatcttttacatctggtacacacaacagacgctcagttgttcttaaccacttttgtcatttgttttttggagtagttttgaaaagtgttttatattgagtgcacttctgttcatttccattgctgcttatatgcagtgttagccgaattagatttacaagacaatctaagctttccggataattttatatatcaaacatacaggatggatacatagttggcaacagtctaccttatttaaagcttctactgggataaacctcaattcctttattcaggaaaggatactttattgcattattgttgcagaagcatagatttaattgcatctttattttgaaaaacaaatgaaaattgatggggtttaaagctacagaggcactgacctttttctagttattgtattgctacaatttaaatattaaaacaaataagagctttcccaaaaaaaaaaaaaaaa

SEQ ID NO: 222188 - DNA, 1000 bp, Homo Sapiens
gtgaaactgctgccaaaaagataccaataacactaacaataccgatcttgaaaaatcatcagcagtgcggattctgacatcgagggatggcattacctccgtgtttctccctttcgagccggcgggccacagacgtcggaagaaactcccgtatttgcagctggaactgcagcccacggcgccccggttttcctccccgccctgtccctctctggtcaaacaacatactaaagaggcgaggcaatgactgttggccagttctcaccggggaaaaacccactgttaggatggcatgaacatttccttagatcgtggtcagctccgaggaatgtggcgtccaggctctttgagagccatgggctgcacccggccgtaggctagtgtaactcgcatcccattgcagtgccgtttcttgactgtgttgctgtctcttagattaaccgtgctgaggctccacatagctcctggacctgtgtctagtacatactgaagcgatggtcagagtgtgtagagtgaagttgctgtgcccacattgtttgaactcgcgtaccccgtagatacattgtgcaacgttcttctgttattcccttgaggtggtaacttcgtatgttcagtttatgcgatgattgttgtaaatgcaatgccgtagtttggattaataagtggatggtttttgtttctaaaaagaaaaaaaaaatcagtgttcacccttatagagacatagtcaagttcatgttgataataatcaaaggaattactctcttcttgttaaattagctaaatcatgtaaccgcagataggaagggctcacctggggaaactctggtttccgatgggacaggaaagtcatacgggcaacagtatgcggaaagtacgtttttttaagtaaaaaacaaaggcaaactttgtactatccagttatctaaggaacaataaaaacattaggagaaaaaaaaaaaaaaaaaaaaaaaaaaaaaaaaaaaaaaaaaaaaaaaaaaaa

SEQ ID NO: 222189 - DNA, 1000 bp, Homo Sapiens; identical to SEQ ID NO: 116970

SEQ ID NO: 222190 - DNA, 1000 bp, Homo Sapiens
ggccctggcggggtgctggacactggccattttcactagagtttgcctggcagggaccgatctctgccccctcctctccccaggcctctggctgcagtgatgccgcagaatcctgagccaggtgcctcctgagcagcccgtgcgcctctccacagcggcgtttgccacccaatgcggctcgcttcagatgctctgatgcagagggcacgcccatagtccctctgcagagcctcgcactggggccagggcaggcaccagccccaggcggccagtcggccacggcctgtcctcttcctcgtagcgtctgctcctcactttgtgttgatggtgacttaggagaatgttccgattttccatgatctaagcaggccacgtttaaaataacatcaaggcaagcgtacgtgtcaccctctgtactgacatctcctcccctgaaatgcttttcagtttgacagcccgtttcctagacaagtgcacctggggtttcaggaactttgtgttttttcggagggggttggtggggaggtcgggatgcctgggatcccttcctggagaggcaggctgtctctggaaaaagcctccattgcccacccgccaggcggaaagtcaccctgttcccagcgcggtttcagcatttaattttaagggagctaaggaagcgcggcgcgccccctggtggtggtaagccgccaacgcacctgggggctgcaaccccaccggacgggtggtccggagggaggctggagcggggaggcgaggagggggctgtgagtcctcagaggccctgggccaccacatttctggcagcgtttcccagacacccctctgctaggccatccctggatagcaagtgaattaacttaagggcactgtgatgggaagccttgcccccctctttttttttttttttttaatatctgcggaataaacccaatggttaatttttgaatgaataaaaggcttttgttgaataaaaaaaaaaaaaaaaaaaaaaaaaaaa

SEQ ID NO: 222191 - DNA, 892 bp, Homo Sapiens; identical to SEQ ID NO: 23242

SEQ ID NO: 222192 - DNA, 1000 bp, Homo Sapiens
cggctttaagtccccaacccttacagacaccactgccaccaccaccaaccacgaccaccaccaccaccaccactcaccaccatcatcacctccggaaagtgtagtcctgccctaacccaagtcacccccgacagtaaattttaccttcatgttgagaaagcttcctggtgcttaatcaagagctggagttcaatgagtcctagacagtgagaggggcctgagcttcagctcaatggaagcctgctgtgtgccacaagacggaaaagtggaagaagctgcagtgggagacaaagcctcggtcccccacccatccacacacacctacactcacacacgcgcacatgggcgcgcacgaactaccattcaggcagtcagtgggcaagaggaaagataagtaagtaccatacacacctaaaagatgagagaattcatccagacatattacagccagtttggggcccctgactgcaatgtgaaacctctcgctgctgctaggtttacaaacaagcccattgtcctgtgcctcctaatatcatttgtactgaagaccccatctggggacttgagactttggtcccagcccagactcctcagacttttctctcagttgggatgcttcactcgctgggggtgtttgtttgccctctcatttttcagtacttctacagaattttctctagagtcagtcattatgaaatgtacttccctccatcttaacctatcaactttctgcccctccttcaaggcccagtataaatgccacctcctccatgaagccttccctaattccaccccaaacccccaccttcaacaatatttcaacgcttctgcaatgatgaaaaagaaacatagttgtagtacttagcctacctagaccagcaagcattcatttttagctcgctcattttttaccatgttttccagtctgtttaacttctgcagtgccttcactacactgccttacataaaccaaatcacaataaagttcatattcagtaca

SEQ ID NO: 222193 - DNA, 1000 bp, Homo Sapiens
tcagggtggtcagcccaacctgtcggaccttcacttcacatcatggtggggaccgagatagagagggagaccccattccaagctccctcttcctcccggtgtttggggaggatgctgaagaatccattcccgagggcctcccggcttgtcccagcccctcttttgcttctgaccacggaggctttctcacagcccagcctgcctgaagcaaaggaggctcccgtgtcctgggcagcttctgtttccctctgctgcctgggagctgaggcacccgtgccagtggcagaggccacagccccagccttaggccaggccctgggagggcaggcaggcaaaggggagaccagagggtctgtgttctccaggagaatgagggtgttggtcccagaattgggaccggggccccgctggccagccctgggccacttcccgggtctccattgtgcgtgggtggcgtgttccaggcgtggctggagctggcttcctggctgtgctgccatgggcccctccctcagaagcacgttggcaggaggccgatcagaaccctagcgcctttggtcctaagaatgggaggctgccttccttcccaatctccctgccagggcccacagcgtggccctagccctcccctccccgggatgtagaacggggaccctcgcagggttggggcgggggctgatactcctcggcccctccctaccctgccctgtgtgttggctttgtggccgtccaagtgccaattggcttttcgcccaaataagggctggtatttctcctctgtccttggaggtgatttccccctgaccccctcccccaggtgagtgaccacctgggtgccagttacaggtgtttccagagaccatagaaatgtgttttcctgagagttcgtgtcattcgtgacttttttgtaaagaagttgtgttttcagaggtgattttatgacaggaaagtgaaagaattagttttgcaaaaaaacaaaaacaaaaaaaaaaaaaaaaaa

SEQ ID NO: 222194 - DNA, 1000 bp, Homo Sapiens
attcactactgcagtttttatttttaaaaaacagtaattgagatattgaagacattacaatttagtttgtgtggtctttttttaaattgctgtatcgttcagtctcttgtggcaatagcactttgaagaaaatagagaatttaatatatggtgattgggatatgtagcattcaaaaaaagtgaattgccaagatactggtgtcatgtaaattcccactttacataaaaacccatcaggacagaatgatgctcaatattttaaaattctaaaaatagggtgggatttttcattgtctctactttataattatcaaaacttattttgtattgctactaccttaaattgaaataaaatgtttatacttacggatattgcatagtttaagttagatttattgaaagatttcatctgtcgtgtttcatgtaaatgagaacagattatttgcatgaaaatatatacttcaacaaaaatctgttctttaacagagtagtggtagattattacactaatgagatttcactttggtaaatacttcatgctttcagttttagcctattaattttaggtggacaaatttaacaagttttctgttactttttaaaaagaaaaaatccagaacataagaactatattatgaacacatgatttgaacctgttgtggtaaagatcttgtacaggatgcaaactaaaaacctaatccctgccatcaaatttattagaagagacctatatatgaacaacttaaaggcactgatttctataatagagctctaaaaacatgccaccagtgtatgaataagggaaagattaattttggctggaccaatataaaaaattgtatttgaagaattgatactttaacttggaccttgaaggtaaagcttcaaaagacaggttactgaccattgagtgtttactatgtacccaatgtgtatatttttctttttaatcttcccaatagctgaataaagtatagatactaaaaaaaaaaaaaaaaaa

SEQ ID NO: 222195 - DNA, 1000 bp, Homo Sapiens
tccagcttgccaaagaactaatacaactgatcaaagagaccaattcagagtctgaaatggaaaattgggttgattatgttaatgatagacccaccaatgacatgagatacccaatgaagtcagaaaaaatacatggcttaggatggagacctaaagtgccttggaaagaaggaataaagaaaacaattgaatggtacagagagaattttcacaactggaagaatgtggaaaaggcattagaaccctttccggtataatcaccatttatatagtccgagacagttgtcaaagaagaaagttatcctacctcgccaagtggtatgaaattaagtgaccaaatgaagtgcactcttttcttttggaattagattcatgactttctgtataaaattcaaatgcagaatgcctcaatctttgggagagtttcagtactggcatagaatttaaatgtcaaaattctttctgaaaccctttctcctagaaactaggaaataataggtgtagaagactctccctaagggtagccaggagaagtctcctgattcggacaaccatgaggggtagtggtgctagggagaaggcaaccttcactggttttgaactcagtgcctaagaaagtctctgaaatgttcgtttttaggcaatataggatgtcttaggccctaattcaccatttcttttttaagatctgatatgctatcattgccttaataatggaacaaaatagaagcatatctaacactttttaaattgataattttgtaaaattgattacgttgaatgctttttaagagaagtgtgtaaagtttttatattttcacaatttatcatgtttactgtttaaatgattgtattataaaaattgtcaatatcttaatgtatttaatgtagaatattgctttttaaaataatgtttttattttgctgtagaaaaataaaaataaatttgattatatttttaatcgttctttgccctaaagactttaaaaaaaaaaaaaaa

SEQ ID NO: 222196 - DNA, 1000 bp, Homo Sapiens; identical to SEQ ID NO: 116975

SEQ ID NO: 222197 - DNA, 1000 bp, Homo Sapiens; identical to SEQ ID NO: 116976

SEQ ID NO: 222198 - DNA, 1000 bp, Homo Sapiens
ctctgtggacagcctgaggtcttcttccatcactgttttgtccacaatctatgccctctgcttttcctggctcccagcgggcgcaaccttactcctgctgagctgcctgccaagcagcgagaacagcttcttgggatctgtgatgcagccctctgccggcaggtgcagctgctgggggtgcggctggtggtgggagttgggcgactggcagagcagcgggcacgacgggctctggcaggcctgatgccagaggtccaggtggaagggctcctgcatccctctccccgtaacccacaggccaacaagggctgggaggcagtggccaaggaaagattgaatgagctggggctgctgccactgctgttgaaatgagtgcccttggggccttgcatgggacacattcaagacctcgaagtcattcttggccaagcagatgacaacacatctcctggactggagcaaaaggtccttctgtgcaccctggtcgctgggaaacgtattctttgatctgttgaactgtcttccaacctgccatggcagttttgacactactcctgtttgccctcctgattcctgctttctttaccttttaacattgcccctttcaggggaccccactttgtagggaatctgcagaaggtgtgcttttgcacttgcagactgctctacctcagtgtttccttgggagactttattcagctgagagtgccctagacagtaacttctaaggtcacgtttactatttcagaggaaatatcttgccaggatacctacccatccttatagaacagttacctttagctgacccctttcctcacagggaccaagacaaagcatgggacatgaaattaagagtgaacttcttatgggaggctgcagctggatcagaggaaaaatccagtgtgacagagtgcaagtcagaagacctggcttttcatcccagctttgaaacttggaactttttgattgacaaattaataaacctctctatgcctcaggc

SEQ ID NO: 222199 - DNA, 1000 bp, Homo Sapiens
gctggccgtggaggtgaaggtacccacagagccgctgagcacgcccctggggaagacagccgagctgacctgcacctacagcacgtcggtgggagacagcttcgccctggagtggagctttgtgcagcctgggaaacccatctctgagtcccatccaatcctgtacttcaccaatggccatctgtatccaactggttctaagtcaaagcgggtcagcctgcttcagaacccccccacagtgggggtggccacactgaaactgactgacgtccacccctcagatactggaacctacctctgccaagtcaacaacccaccagatttctacaccaatgggttggggctaatcaaccttactgtgctggttccccccagtaatcccttatgcagtcagagtggacaaacctctgtgggaggctctactgcactgagatgcagctcttccgagggggctcctaagccagtgtacaactgggtgcgtcttggaacttttcctacaccttctcctggcagcatggttcaagatgaggtgtctggccagctcattctcaccaacctctccctgacctcctcgggcacctaccgctgtgtggccaccaaccagatgggcagtgcatcctgtgagctgaccctctctgtgaccgaaccctcccaaggccgagtggccggagctctgattggggtgctcctgggcgtgctgttgctgtcagttgctgcgttctgcctggtcaggttccagaaagagagggggaagaagcccaaggagacatatgggggtagtgaccttcgggaggatgccatcgctcctgggatctctgagcacacttgtatgagggctgattctagcaaggggttcctggaaagaccctcgtctgccagcaccgtgacgaccaccaagtccaagctccctatggtcgtgtgacttctcccgatccctgagggcggtgagggggaatatcaataattaaagtctgtgggtaccaaaaaaaaaaaaaaaaaa

SEQ ID NO: 222200 - DNA, 1000 bp, Homo Sapiens
tgggcacttcttaaccttctatttgacctctgcgcatttggccctgttgagcactcttcttgaagctctccctgggcttctctctcttctagttctattctagtctttttttattgagtcctcctctttgctgatcccttccaagggttcaatatatatacatgtatatactgtacatatgtatatgtaactaatatacatacatacaggtatgtatatgtaatggttatatgtactcatgttcctggtgtagcaacgtgtggtatggctacacagagaacatgagaacataaagccatttttatgcttactactaaaagctgtccactgtagagttgctgtatgtagcaatgtgtatccactctacagtggtcagcttttagtagagagcataaaaatgataaaatacttcttgaaaacttagtttactatacatcttgccctattaatatgttctcttaacgtgtgccattgttctctttgaccattttcctataatgatgttgatgttcaacacctggactgaatgtctgttctcagatcccttggatgttacagatgaggcagtctgactgtcctttctacttgaaagattagaatatgtatccaaatggcattcacgtgtcacttagcaaggtttgctgatgcttcaaagagcttagtttgcggtttcctggacgtggaaacaagtatctgagttccctggagatcaacgggatgaggtgttacagctgcctccctcttcatgcaatctggtgagcagtggtgcaggcggggagccagagaaacttgccagttatataacttctctttggcttttcttcatctgtaaaacaaggataatactgaactgtaagggttagtggagagtttttaattaaaagaatgtgtgaaaagtacatgacacagtagttgcttgataatagttactagtagtagtattcttactaagacccaatacaaatggattatttaaaccaaaaaaaaaaaaaaaaaaaaa

SEQ ID NO: 222201 - DNA, 1000 bp, Homo Sapiens
cctctgttatatgtcaagtttaaagcagggcacattgttgcagcaaaatgtgtatttgacaaattatacttgcaattttgggtcatgaaagtttgcaatatagtaaatgcacgattgactgttgctttgtgcctcagtatttaatttgtttcagtaaacttactttattactgtttatgatttcagataaaaatagttgctgagtaaattttacttgtaatctacaattggctttttaaaaataacctgttgatatataattgtcagtccaaatgaatatgtgaaacagctggaattgtacaaattttggttgtatttaaagctcagtttcctttttgttttattgtatgcgttgggtttgcagcatgaacttgcacagataatgcacgttttctggttaagtaaacatgatgcacactattctgtaacagaaagccctattgtgccttacctgtgtgcttttgtgggcaccttgtttatgaagaataaaaaatgatttgttatctgaagagaataaattttaaattctcagtttatgtctcagatgctaacgtgtgaaaatataaatatatataatatataaagtaaccagtcttcctgtattttatgtgcatcatagtgatttatctgagcttagtgacccccatcttgtaacctgttgcaagagtgaatgtaaaaaatagttgtggcattttaaaaggtcgcctttgatgcagatgcatctttttcttgcttctaaaacatatttcatgtaaacattgtacatttattattgtaatatatactattatgcagcttattttacctgaaactgttaagccgaccaagatccctccctgcaagacagatgggaatgtgtataataactaggtatttgagaagttctgaagtttgatgtaatctgttacttgtcctgttaaaaaaaggaaaaaattctaattaaaaatttattagtttttaaaaaaaaaaaaaaaaaaaaaaaaaaaaaaaaaaaaaaaaa

SEQ ID NO: 222202 - DNA, 1000 bp, Homo Sapiens
gtggccggcagtgttcgtgctgaggtgcagcaccagctgcatgtggctgtgggcagcctgcaggagtccattttagcacaggtacagcgcatcgttaagggtgaggtgagtgtggcgctcaaggagcagcaggccgccgtcacctccagcatcatgcaggccatgcgctcagctgctggcacacctgtcccctctgcccaccttgactgccaggcccagcaagcccatatcctgcagctgctgcagcagggccacctcaatcaggccttccagcaggcgctgacagctgctgacctgaacctggtgctgtatgtgtgtgaaactgtggacccagcccaggtttttgggcagccaccctgcccgctctcccagcctgtgctcctttccctcatccagcagctggcatctgaccttggcactcgaactgacctcaagctcagctacctggaagaggccgtgatgcacctggaccacagtgaccccatcactcgggaccacatgggctccgttatggcccaggtgcgccaaaagctttttcagttcctgcaggctgagccacacaactcacttggcaaagcagctcggcgtctcagcctcatgctgcatggcctcgtgacccccagcctcccttagctgctaagcctgccttgcccaggggtgggatggcactgaaggccagcagacaggcctaggctggggcagggtcacggctggcctttacctgctcaggcccccatctctggggtgtttgggggtcagggagcagggagcactggccgtggtctacagcgtgtggtagtcagaaggtttagctgggcccagggcaggtattgcgcctgcttgggttctgccatgcctggagcatgaccctgagatcgtgacaccacttgagtggaattttccatgttcctttttacctctaatttggatctttttgtttttgaaaaacattgagaaattcaattaaatgcttttggaataaaatggaaaaaaaaaaaaa

SEQ ID NO: 222203 - DNA, 1000 bp, Homo Sapiens
ggagttatgtttaagtaaaaatccttgagaatttattatgtcagatgttttttcattcattatcaggaagttttagttatctgtcatttttttttttcacatcagtttgatcaggaaagtgtataacacatcttagagcaagagttagtttggtattaaatcctcattagaacaaccacctgtttcactaataacttacccctgatgagtctatctaaacatatgcattttaagccttcaaattacattatcaacatgagagaaataaccaacaaagaagatgttcaaaataatagtcccatatctgtaatcatatctacatgcaatgttagtaattctgaagttttttaaatttatggctatttttacacgatgatgaattttgacagtttgtgcattttctttatacattttatattcttctgttaaaatatctcttcagatgaaactgtccagattaattaggaaaaggcatatattaacataaaaattgcaaaagaaatgtcgctgtaaataagatttacaactgatgtttctagaaaatttccacttctatatctaggctttgtcagtaatttccacaccttaattatcattcaacttgcaaaagagacaactgataagaagaaaattgaaatgagaatctgtggataagtgtttgtgttcagaagatgttgttttgccagtattagaaaatactgtgagccgggcatggtggcttacatctgtaatcccagcactttgggaggctgagggggtggatcacctgaggtcgggagttctagaccagcctgaccaacatggagaaaccccatctctactaaaaatacaaaattagctgggcatggtggcacatgctggtaatctcagctattgaggaggctgaggcaggagaattgcttgaacccgggaggcggaggttgcagtgagccaagattgcaccactgtactccagcctgggtgacaaagtcagactccatctccaaaaaaaaaaaaaaaa

SEQ ID NO: 222204 - DNA, 1000 bp, Homo Sapiens
cagtgccactgtccccatgtccaagaagaagcccagtcggggttttggggacttcagctcctggtagcagcaggttggccgctgtggaccttggtggggttgcagggctgggggcccatgtccacatctccatttccagcctttctagcctgccctctgctgccagccaataaattgcttgcctgctgcctgcatcccctttcctggcccctgggagcccacagccttcccatcccttaacctgttgccaagggccttggccctgtttccaggacctggcccagccagagcccactgctgggaccttcaagcacaaggcctgccctacacccaggctggtgcctcaggcctcccctctagtaggcaggccaggttagtgaggaaggactgtgtctccagattgtggtttcctctttaagacagggtcttgctctgttgcccaggctccagtgcagtggtgtgatcatggctcactgcagcctcgacctcctgggctcaagcaatcctcctgcctcagcctcgcaagtagctgggactacagccgtgcaccactacatccagctgtatatgtctggttttcttacccctacttctgtcatcttctcagggacagcctatttatacaaccagtgtggtcccctgaccaacgccattacctgggacaagttttcagaccccagacttactgagcctaagcctctgcagggtgggcttctcggtctgttttgacaaaacttcaggggcttctgaaggctggtgttggacggcagcattgagtttcctgccgtgccctgcctgagctctcagggccctgctcacctgctctggctgtgaaccacctgggcttcatctcaagcctgcctggcgtctctgtgcccctgtgagaatcttgaggggacccacactgggttgaggccagtgtctcctgctgtgagaacaagtggatgtccctctccccgccctcctgctgaagtggccttgctgctctcaggcccggcca

SEQ ID NO: 222205 - DNA, 1000 bp, Homo Sapiens
gatctgccccttcagtctgttattgcaaagtaataaaatgtcacctacagggagcctctgagcctactctagttcaagaggctacctgaaaaaaaataaataagataaagggtcagcaacaacaaagaaaaagacaattacagaaaataagcaagatttggaaaggaagtataatggcacttttttcctcaaaggaagttcttgttttcctcaaaggaagttcttgttttcacataaaatatgaaaagcagatcctgcaggagtaacccccttctttaagagccaagtatttgccagtgcttaaattacaccataccgttctaattatatataatcttttgttcttcagttttttgttttgtttcctttttgttattgttgccgaaggtgagtagttttgcatttctgatgacagccttggaaagtatatttgtaactccatgtctggtaatgccaacccaagtcgacatgggtcttaggacactgaccacctcacatgccataccctcagttaagcatgttaacatttataggaggaaaaaaatcactttgggagaaaataaaattcaactcaagcataaagcttctgtttactcaggccttctaaaaagcaggttaaaatgctctaaaatgagaaagcctgtggtttcacttatttatataactcactgggacattgccaaatgagtaagcacttaattcgctgcttctgagacttctctgtcaaaacagccccactgataatattagacagaacgagaatgcaggggtctcttccctcccctggggtttaggaagctcatgaggagctcggcttaaaatgtctttgatgtctcttcctttgtctcaaaaagtaatgtcaattttatatactatttcaatattactatctgcatttgttttaatataaaaatgtttgctgcctacctttttctcccaaaaaatctttaagtaaagatgatctgggaaaatgtaaaaaaaaaaaaaaaaataaaaaaaa

SEQ ID NO: 222206 - DNA, 1000 bp, Homo Sapiens
agtaaatgttcatggaagctaaaaaatttacctcctttccttttccctttccccttaaaacaccagacaaatcgataacaacttatatatatatatatatatatctgtaaaaatgtattttgttaatttttttggccaatttattttctcccactttgtcattaaaatcacatgtctaactggctcaccacatagtgtgctttgattgtattttggctttgactctgccatttctgaaatgtgggggaggatggaggcagctgacctctccagttgctgtgttgtattcctacccaatttcctgggcagttgatgcatctctgggaaaaacaccagaaagcttgctgaaatggaaaacttggaagaattgttcatctcttaggcttccatttggatgggcctgccttaacattgtttgaaatgcagcgtgagtagctcttttgtttactgtttacaccccttattggcatgtcaactcctgtacttcccttactctgttgcctttcttgagatgcattgtcctgctaacccacaaacctgtttggaaataaacatggaagaatatctggcaggcttacttttagaagacgacaaatcggtaaggcttattcatggttcattgccaggagcagatatgcttttgagatcacttttatttttgaaatggcctttgttcattgtattgtgatccaataacactttgtattaaattgtttagcagccatttgtgttgtgaaggggtagaagatctctgaaacttgtctttagattgaactcattccctgttccacaaacccatatgtatcctttcctcaacctcctcctttcccaattaatttcaaccatagtacgatgtttggggttgtatattttgttaaaaagattaaagaatttatgagttggcttggacaagtttaactttatttttaatgtgttaattacttggaataaatgcattaatttcagaaaaaaaaaaaaaaaaaaaaaaaaaaaaaaaaaa

SEQ ID NO: 222207 - DNA, 1000 bp, Homo Sapiens; identical to SEQ ID NO: 116983

SEQ ID NO: 222208 - DNA, 1000 bp, Homo Sapiens
ttctttttaacctcgcccccttttctacaatcaaatccattcattattgcgccctccaggtcccctcctttttgcagaaggtgtaaaagagctgcccttggtgggtgcccttgagcatgttgcaacgcctgctggtgcccttctgtctgtccacgtctgcctagggctcaggagtgcttgttctttccctggcgccctgggtttctctttatcctgtcccctctcctttctcctggcagcagaaaaggaagaacacaagagcaaacacacaacaatgatggtggcaaagtacctgtatatagccctttcccatttttgcattatgttcttaactccttaatgtggaattttccagcaaaatgtttaactcaggtgtgatttttgaaaatgtctctgtaatattttatcttctttaaaaaaaagggggggaaataccaaagtgtgaaatactgtgctaccttccagagttcccacatgggctgggatttttttttctttttcttttttttttttttttttgagacagtcttgctccagcccaggctggagtgcagtggcatgatcttggctcactgcatgctctgccacttgggttcaagcgattctcctgcctcagcctctcaagtagcggattacaggcgcccaccaccaaaaattagcccagctaatttttgtatttttagtagagatggggtttcaccatgttggtcaggctggtcttgaactcctgacctcctgatccacccacctcagcgtcccgaagtgctgggattacaggtgtgagccaccgcgcctggcctgggctgggaatctttgttgacttctttgggaacattatctctagagtctgcttttttgtgggccagtttgtagagatgtaacatgaagccattccagaaatggtaacttaaaaaaaaaaagactacatgtctaggaaactgttgagattcaaaggaatctcactgttcctaaataaatgtgtatagtgattatgaaaagt

SEQ ID NO: 222209 - DNA, 1000 bp, Homo Sapiens
agagagcagtttcaacaacgagcttccccaggacagccaggaagtcacctgtacctgagatgccagtactggcccatccttgttttgtccccaaccctagggcttctctgattccaggatacattactttagctgaactcagatttagtgcaagtaaaatgttagagggtgcgggggtgaggactgaccacagattccctggatagtgtagtggtagatttctccacaggatagcgcaattggcaaatcatgcttggttgtgttaggccaaaatactagttttgctttctttaccttttctatcttgatgaaaatgttgcacattctatagttgcaaaacacataaaaggggacttaacatttcacgttgtatcttacttgcagtgaatgcaagggttacttttctctggggacctcccccatcacccaggttcctactctgggctcccgattcccatggctcccaaaccatgccgcatggtttggttaatgaaacccagtagctaaccccactgtgcttccacatgcctggcctaaaatgggtgatatacaggtcttatatccccatatggaatttatccatcaaccacataaaaacaaacagtgccttctgccctctgcccagatgtgtccagcacgttctcaaagtttccacattagcactccctaaggacgctgggagcctgtcagtttatgatctgacctaggtcccccctttcttctgtcccctgtgtttaagtcgggatttttacagagggagctgtctccagacagctccatcaggaaccaagcaaaggccagatagcctgacagataggctagtggtattgtgtatatgggcgggacgtgtgtgtcattattatttgagttatgctgttgtttaggggtaaataacagtaaataattaataataataataataataataaaggagctgacgttcttaaaaaaaaaaaaaaaaaaaaaaaaaaaaaaaaaaaaaaaaaaaaaaaaaaaaaaa

SEQ ID NO: 222210 - DNA, 1000 bp, Homo Sapiens
tgggccttgaatttgtatttccagacactagtgattctctggtccttgtgggaaaagtaccactatgttttgtggaaagagaagccaatgaacttcggagaggaagatctactgtgaccaagagtattgtggaggaatttatccgagaacaactggagctactccagaccaccggaggcatccaagggacattgccactgactgtccagaaggtgttggcatcccaagcctgccatggggccattaagtttaatgatggcctgagcttacaggaaagttgccgccttattgaagctctgtcctcatgccagctgccattccagtgtgctcacgggagaccttctatgctgccgttagctgacatagaccacttggaacaggaaaaacagattaaacccaacctcactaaacttcgcaaaatggcccaggcctggcgtctctttggaaaagcagagtgtgatacaaggcagagcctgcagcagtccatgcctccctgtgagccaccatgagaacagaatcactggtctaaaaggaacaaagggatgttcactgtatgcctctgagcagagagcagcagcagcaggtaccagcacggccctgactgaatcagcccagtgtccctgagcagcttagacagcagggctctctgtatcagtctttcttgagcagatgattcccctagttgagtagccagatgaaattcaagcctaaagacaattcattcatttgcatccatgggcacagaaggttgctatatagtatctaccttttgctacttatttaatgataaaatttaatgacagtttaaaaaaaaaaaaaaaaaaaattatttgaaggggtgggtgatttttgtttttgtacagttttttttcaagcttcacatttgcgtgtatctaattcagctgatgctcaagtccaaggggtagtctgccttcccaggctgcccccagggtttctgcactggtcccctcttttcccttcagtcttcttcacttccctt

SEQ ID NO: 222211 - DNA, 1000 bp, Homo Sapiens
cgttacccccagaaccagcctgtgaggatgcggatgaggatgaggacgactatcacaacccaggctacctggtggtgcttcctgacagcaccccggccactagcactgctgccccatcagctcctgcactcagcacccctggcatccgagacagtgccttctccatggagtccattgatgattacgtgaacgttccggagagcggggagagcgcagaagcgtctctggatggcagccgggagtatgtgaatgtgtcccaggaactgcatcctggagcggctaagactgagcctgccgccctgagttcccaggaggcagaggaagtggaggaagagggggctccagattacgagaatctgcaggagctgaactgagggcctgtggaggccgagtctgtcctggaaccaggcttgcctgggacggctgagctgggcagctggaagtggctctggggtcctcacatggcgtcctgcccttgctccagcctgacaacagcctgagaaatccccccgtaacttattatcactttggggttcggcctgtgtcccccgaacgctctgcaccttctgacgcagcctgagaatgacctgccctggccccagccctactctgtgtaatagaataaaggcctgcgtgtgtctgtgttgagcgtgcgtctgtgtgtgcctgtgtgcgagtctgagtcagagatttggagatgtctctgtgtgtttgtgtgtatctgtgggtctccatcctccatgggggctcagccaggtgctgtgacaccccccttctgaatgaagccttctgacctgggctggcactgctgggggtgaggacacattgccccatgagacagtcccagaacacggcagctgctggctgtgacaatggtttcaccatccttagaccaagggatgggacctgatgacctgggaggactctcttagttcttaccttttgtggttctcaataaaacagaacttaaaaaattaaaaaaaaaaaaaaaaaaaaaaaa

SEQ ID NO: 222212 - DNA, 1000 bp, Homo Sapiens
atggtattcctgtgcactactgttacgtgaacacacaaacacctaatttgtttaagccattaggccaggcctctattagccattcctgactgatacagaagacaaaaatggcatcacagactcctgaactccaaagacactgcctattctttcgtctgttcttggcaagcaccaacattgagactgtacttcagggttgatgctggccatttggtggcgtgaggagtgggcactcacatgtctctgctagcagttctgacgtgtccattccacactggatccatagaacgagggaacacaagtgtcttctcataagatttatagaaacagtgatcgttgcagaaaaataattagcaagagaacagacttcagctctctgaaggctgatgaccacctgtttctcatctcttctagtgtatgtcaaagctaaattaggtcaaataggaaataagtcagaatccccaattcgatagaaacttacaggtcttgtgatctaatctgccacttgatccgtgaattacctataggtcatccctaagaggtggcctccagcttctgcttgaattccttcaaggatggggtgctcattgtggcttttctaatcatctctgattgttagaaacactgtgaaacttttatccatcagtcctgtttctgaagctgtacggtacaaattttttttttccccacttaaggctcaactattggaatacatctaccatgtctcctatgaaacttgcttctccaggccaatcatccttacttccttaaacttttttttttcctgaaaagttattcttttaatcttattaaaaaagcaacccatgcccattccacaaatacaagtgaaatagtgaaaaacaaaaatcaaactacatctatttggtgatcattattaatgtcttatgtttcctcccagattgttttctgcatgaataataaccaacaatgtgtgtgtatgtatatatatgcttttgcattaaaaggtggttttgaaggt

SEQ ID NO: 222213 - DNA, 1000 bp, Homo Sapiens
gccacccccaccaccctcaggtgccacaccaccccctatagcccccactgggccaccaacagcctcccctcctgtgccagcgaaggaggagcctgaagaacttcctgcagccccagggcctctcccgccacccccacctccgccgccgcctgttcctggtcctgtgacgctccctccaccccagttggtccctgaagggactcctggtgggggaggacccccagccctggaagaggatttgacagttattaatatcaacagcagtgatgaagaggaggaggaagaggaagaaggggaagaagaagaagaggaagaagaggaagaggaggaagactttgaggaagaggaagaggatgaagaggaatattttgaagaggaagaagaggaggaagaagagtttgaggaagaatttgaggaagaagaaggtgagttagaggaagaagaagaagaggaggatgaggaggaggaagaagaactggaagaggtggaagacctggagtttggcacagcaggaggggaggtagaagaaggtgcacctccacccccaaccctgcctccagctctgcctccccctgagtctcccccaaaggtgcagccagaacccgaacccgaacccgggctgcttttggaagtggaggagccagggacggaggaggagcgtggggctgacacagctcccaccctggcccctgaagcgctcccctcccagggagaggtggagagggaaggggaaagccctgcggcagggccccctccccaggagcttgttgaagaagagccctctgctcccccaaccctgttggaagaggagcctgaggatgggagtgacaaggtgcagcccccaccagagacacctgcagaagaagagatggagacagagacagaggccgaagctctccaggaaaaggagcaggatgacacagctgccatgctggccgacttcatcgattgtccccctgatgatgagaagccaccacctcccacagagcctgactcctag

SEQ ID NO: 222214 - DNA, 1000 bp, Homo Sapiens
gggttcgtcctcaagaacacccagtgcatcccagaaggcttggagagctactacgcggagcaagactccagtgcccgggagaaattttacacagtcataaaccactacaacctggccaagcagagcatcacgcgctccgtatcgccctggatgtcagttctgtcagaagagaagctgtccgagcaggagactgaagcggctgagaagtcagcttagcgggatgggcaagttccttacaatgtgtcacttgcaaataacaaagggactttgagggacatttcattaaatataattactgatactttagaggttactcatttacggtgcaattgcttctgtttgctaatgctgctttgcaaataaaacttgctgccgaccacccacgggcataaaatcaagtgcatttcagcattgcctaaagagctctgacaccacttttcatgttaagatcttcatttagctcctttactgggatttattggatgctgtaaaaaaataaatttacactggatatgcgaagggtttggatctcagataaatgcattttgtggaattgattttctgaaccgaccctgctgtctgcaaaccttcctccatagccatatctagagtgatctctcgctgtgctaagagcaagcctacttcgcatttcttcctcggccatcagcgggtaacagtgctgactgctgccaaggtgcactgtagtaaggtgtctggagacacagaccgtgaccttggcgcagcggtgtgcatcagaggcgtgtgctgagaagggtggtgttaagctgtggaaaatgactcaagagcaataaatcagtgccaaagcttccctgcgcatctgaatagacacaagtgaagcccgtgtgcgcacagtgcagaggccgagcctgtatttccaggtagacgtggactttattgactgtgaattcatttacatgtaacttctgacatttcactctgtgcaaataaagaacatgaggataaaaaaaaaaaaaaaaaa

SEQ ID NO: 222215 - DNA, 1000 bp, Homo Sapiens
tgctccctaagcaccctgggccttattaaagagcaacttctatttccagtcgggggagtaacactaaagctacaagaaatatgtaataatgataggtaataatgtgttccaaagctttttcaaactagaataaggaggcaaatagaagaatgagatactgatgtccacagttcattggcagaatctaaccccttctgttatcttttttaatactatttttgtttagatagaagtttcaaagaagataaaaatgcttgaagagcctgagagtaaaaagattatgctgcaaagctatgatataaactgctcttgcagtccaaagggatacctgattaaagaagtttcttatttaaacatctcagacgcaaaaattacattaaatttttgtatatttcaacaacattttaaatgtattttgttatgtttgtattatataggataaagcaaatgtcaagttaaaatgtattgtgttgtttgtaaagtaagaagttactggccaggagcggcggctcatgcctgtaatcccaggactttggtaggccaagacaagcagatcacttgaggtcaggagttcaacatcagcctggccaacatgatgaaaccttgtctttactaaaaatacaaaaattagctgggcatggtggcaggcgcctgtaatcccagctactcaggaggctgaggcaggagaattgcttgaacccgggaggtggaggttgcagtgaaccaagatcgcggcgctgcactctagcctgggtgacagagtcagactccgtcccaaaaaaacaaacaaacaaaacaaaacaaaaaaaacagaagttacaaatgaatactcacggatatgtatagttttatgtttgttttcttagaaacaaatgtgtttctttgggtgggtaatattgtgttttactatgtttaccttttataaaacataacctgtttatttatattctttggctttgtttattaaaaagcatgattttgctgtgcatgtaccattttg

SEQ ID NO: 222216 - DNA, 1000 bp, Homo Sapiens; identical to SEQ ID NO: 116991

SEQ ID NO: 222217 - DNA, 1000 bp, Homo Sapiens
caggcccagggttcacgctcagtggctcctgttgccaggggtcccgctgtaactctgacctccgcaacaagacctacttctcccctcgaatcccaccccttgtccggctgccccctccagagcccacgactgtggcctcaaccacatctgtcaccacttctacctcggccccagtgagacccacatccaccaccaaacccatgccagcgccaaccagtcagactccgagacagggagtagaacacgaggcctcccgggatgaggagcccaggttgactggaggcgccgctggccaccaggaccgcagcaattcagggcagtatcctgcaaaaggggggccccagcagccccataataaaggctgtgtggctcccacagctggattggcagcccttctgttggccgtggctgctggtgtcctactgtgagcttctccacctggaaatttccctctcacctacttctctggccctgggtacccctcttctcatcacttcctgttcccaccactggactgggctggcccagcccctgtttttccaacattccccagtatccccagcttctgctgcgctggtttgcggctttgggaaataaaataccgttgtatatattctggcaggggtgttctagctttttgaggacagctcctgtatccttctcatccttgtctctccgcttgtcctcttgtgatgttaggacagagtgagagaagtcagctgtcacggggaaggtgagagagaggatgctaagcttcctactcactttctcctagccagcctggactttggagcgtggggtgggtgggacaatggctccccactctaagcactgcctcccctactccccgcatctttggggaatcggttccccatatgtcttccttactagactgtgagctcctcgagggcagggaccgtgccttatgtctgtgtgtgatcagtttctggcacataaatgcctcaataaagatttaattactttgtatagtgaaaaaaaa

SEQ ID NO: 222218 - DNA, 1000 bp, Homo Sapiens
aattactaagatgctgaaggcaatagaagatttaccaaaacaagacaaagctcctgaccacggaggcctgatttcaaagatgttacctgggcaggacagaggactgtgtggggaacttgaccagaatttgtcaagatgtttcaaatttcatgaaaaatgccaaaaatgtcaggctcacctatctgaagactgtcctgatgtacctgctctgcacacagaattagacgaggcgatcaggttggtcaatgtatccaatcagcagtatggccagattctccagatgacccggaagcacttggaggacaccgcctatctggtggagaagatgagagggcaatttggctgggtgtctgaactggcaaaccaggccccagaaacagagatcatctttaattcaatacaggtagttccaaggattcatgaaggaaatatttccaaacaagatgaaacaatgatgacagacttaagcattctgccttcctctaatttcacactcaagatccctcttgaagaaagtgctgagagttctaacttcattggctacgtagtggcaaaagctctacagcattttaaggaacattttaaaacctggtaagaagatctaatgcatcctatatccagtaagtagaattatctcttcatctgggacctggaaatcctgaaataaaaaaggataatgcaataaacacagttgcaggaaagtatgttagctatatactatgaagtactcttagtttacttatgttgaatggcttagctattaatactcaaattgagttaaaatgaaaattcctccttaaaaaatcaaacgtaatatgtattacatttcatggtacattagtagttctttgtatattgaataaatactaaatcacctaggtgtctatgttctatcacatctacaaacatgtcacttcctaattaacaaaatgttcttcctttagtttgcttttgcacttaaaatatatataattgacttttttggaaaaaaaaaaaaaaa

SEQ ID NO: 222219 - DNA, 1000 bp, Homo Sapiens
gtgttttgaaaaatgtttagtgttcaaatagaaaccattcgtgtcccttcactctctgaacatagtctgcaaatctctccctctctggtatgtttctgttttgtggattagactgctaaataagcgaagagttaattttgaagttcaggtcaacaaattcctgtttggagacgggctgttcctgaataccaggttgttatctgtctattacagccccttcacttctgggctcctggccctttgcgaagtacttcagaaagcctagagagaagagagggccctcaaatcccattccagcccctaaatgaaagtggcatcacaaggagaaaagtggaggtagaaatgtaccatgggggacgttgccccattgcctttcttcccctgactactgggcttcctctatcagcttttaacgcctggaagtagctgagtctccagtcactggtggccttccccaagtgagctcagcagcatgtgctaataggtgccaatactgtgctggctccagtgggattcctctctgcaaagctgctggcttagcttgactgtttccctattcctctccttagaactttcatagccagtcaagcatagaattgcatccattcttctgaaataggtactgtgcctaatttttcattggcttggccaagattctgttacctgtaattatgtcatatgggctgactggtgtaggtttggtaggcctcactgctctccagaggctagtgttcctatcccaggatggctgttgggattaggagtggaatgaggaatagtttaggaccacaagagatttggcctccttggaacatgtaggaaggcctcaaggatgtaattctagcccagggaagaaaatccttttcagcagacgcttcccttcccttcccctagggaatgtgtccctactatagtaaactcttccttaagagagttttatgttttctctgtcagatcaatttgtttttcttaatgttgttcctatcaaaaaaaaaaaaaa

SEQ ID NO: 222220 - DNA, 1000 bp, Homo Sapiens; identical to SEQ ID NO: 116997

SEQ ID NO: 222221 - DNA, 1000 bp, Homo Sapiens
ggatttgctatcataatatttactatgcagatgaattcagtgtgaggtcctgtgtccgtactatcctcaaattatttattttatagtgctgagatcctcaaataatctcaatttcaggaggtttcacaaaatggactcctgaagtagacagagtagtgaggtttcattgccctctataagcttctgactagccaatggcatcatccaattttcttcccaaacctctgcagcatctgctttattgccaaagggctagtttcggttttctgcagccattgcggttaaaaaatataagtaggataacttgtaaaacctgcatattgctaatctatagacaccacagtttctaaattctttgaaaccactttactactttttttaaacttaactcagttctaaatactttgtctggagcacaaaacaataaaaggttatcttatagtcgtgactttaaacttttgtagaccacaattcactttttagttttcttttacttaaatcccatctgcagtctcaaatttaagttctcccagtagagattgagtttgagcctgtatatctattaaaaatttcaacttcccacatatatttactaagatgattaagacttacattttctgcacaggtctgcaaaaacaaaaattataaactagtccatccaagaaccaaagtttgtataaacaggttgctataagcttggtgaaatgaaaatggaacatttcaatcaaacatttcctatataacaattattatatttacaatttggtttctgcaatatttttcttatgtccacccttttaaaaattattatttgaagtaatttatttacaggaaatgttaatgagatgtattttcttatagagatatttcttacagaaagctttgtagcagaatatatttgcagctattgactttgtaatttaggaaaaatgtataataagataaaatctattaaatttttctcctctaaaaactgaaaaaaaaaaaaaaaaaaaaaaaa

SEQ ID NO: 222222 - DNA, 1000 bp, Homo Sapiens
aacgcagcacagaggaagaggcctgctccacttgtctgggaacctgggcaggaggcacagaggaagccaaggcctggagctgcaggtcccccggcatctctctctgtcccggcagcccaggatggcctggtgcccccacctgctgcagcaggagccccaaggagtgctagctgagggtggttgctggggtggtcctcatggacagtgaggtgtgcaagggtgcactgagggtggtgggaggggatcacctgggttccaggccatccttgctgagcatctttgagcctgccttccggtgggagcagaaaaggccagaccctgctgagttagaggctgctgggatccactgtttccacacagcgggaaggctgctgggaacaggtggcagagaagtgccatgtttgcgttgagccttgcagctcttccagctggggactggtgcttgctgaaacccaggagctgaacagtgaggaggctgtccaccttgcttggctcactgggaccagcaaagcctgtctttggttaggctcgtgtacttctgcaggaaaaaaaaaaaaggatgtgtcattggtcatgatatttgaaaaggggaggaggccgaagttgttcccatttatccagtattggaaaatatttgacccccttggctgaattcttttgcagaactactgtgtgtctgttcactaccttttcaggtttattgtttttatttttgcatgaattaagacgttttaatttctttgcagacaaggtctagatgcggagtcagagatgggactgaatggggagggatcctttgtgttctcatggttggctctgactttcagctgtgttgggaccactggctgatcacatcacctctctgcctcagtttccccatctgtaaaatgggagaataatacttgcctacctacctcacaggggtgttgtgaggattcatttgtgatttttttttttttttttgtacagagcttttaagcattaaaaacagctaaatgtg

SEQ ID NO: 222223 - DNA, 1000 bp, Homo Sapiens
tggctactttaagaggccatctttaatactttatgagtagttctggagtgtaaacataaacgagtattcttttgtagtcagaaaagtgtcctctcaataatttagtaggggcttattgtctctcaaaactaacctaaaagaaaatgacacattttataatagaatattacatttatttctggaagtgtgttttcaaaaagatatttacatagtctgtaaactagaaagtgttaggtaaagctctaggttactgtgttactattataatattaaacattcgaataggcagtcgttcaaagactctttggaatatctatgaatgaatatcctctattcttataatattaaaacccataagtaaatataggacatacaagagaaatgagttaaatgactatgtaagggagagtttattaaaatttgatgaaatttactgtaggaactaaactatgccataaaacaatagctttctagttcatttccagtaactgttcccatctcctttaccacttgttaagaaaattaaattcttcagtcacgctgctttaaaatgggacaaaatctattaagttgaaccatatataattgtggatatttggctgtttttaatctgacaagcagtaacttcatatggtttgccttaatatatatttgttttagtcatgaactcataatccattgatgctctttcatgagaagagatatcacccatatttccttattgatattattggtacaggcagacaaccctggtaggagagatggattctggggtcatgacctttcgtgattatccgcaaatgcaaacagtttcagatctaatggtttaatttagggagtaattatattaatcagagtgttctgttattctcaatctttatagaaacgattctgctggttttgaagaacagatgtattacactaactgtaaaagtagttcaagagtgagaaagaataaattgttattaagagcaaaagaaaaataaagtgattgatgata

SEQ ID NO: 222224 - DNA, 1000 bp, Homo Sapiens
ttcttgttttttggctgccgctggcgggaccaagacttctactgggaggctgagtggcaggagctggagaagcgggactgtctgaccctcatccctgccttctcccgggaacaggagcagaaagtatatgtgcagcaccggctccgggagctggggtcgcttgtgtgggaactgctggaccgccagggtgcatacttctacctggcaggcaacgccaagtccatgccagcggacgtctcggaagccctgatgtccatcttccaggaggagggtggactctgcagcccggacgcagccgcgtatctagccaggctccagcagacacggcgcttccagacagagacgtgggcctgaggcccgcggctgcccgtgccccctctgacagccatcctcctgggagcccaggaaggcatccacgagggagctcctggccagcagccgtcatcctctcggaccagccagctggtcctctgggaacagccagctcccgagcacagccgcactcctgttgaccctggatcccaccctttgagcctgaccccactgcagcctctgcccagccagccctgagctcccccaccctgacagtgagatgtgtcttcgtccccccacccccttcccagtcaaggtggtggcctgggccgctccacctcaccggtgcagtgacccaggacggcatcagcagcccagtgagcaccaggggtggcatagggcacccatgaggctgcgctgcactcctctgccctggggccacctcggctgctgcagcctgcccagcagcacattccagtcactgcccccgcactcccacagggctcagggtgggctcagaggccactgagatgccagttccttgagagcagtgggggtgtcccaggccagagcagcctcttcctctcctggtcccagaaaaacccttgcagtaaatggtggcctctgggtggttaaaaaaaaaaaaaaaaaaaaaaaaaaaaaaaaaaaaaaaaaaaaaaaaaaaaaa

SEQ ID NO: 222225 - DNA, 1000 bp, Homo Sapiens
gtgaccttccctggggccagcgtgaccacgaacaagaccgtccatctcaacgtgtcctacccgcctcagaacttgaccatgactgtcttccaaggagacggcacagtatccacagtcttgggaaatggctcatctctgtcactcccagagggccagtctctgcgcctggtctgtgcagttgatgcagttgacagcaatccccctgccaggctgagcctgagctggagaggcctgaccctgtgcccctcacagccctcaaacccgggggtgctggagctgccttgggtgcacctgagggatgcagctgaattcacctgcagagctcagaaccctctcggctctcagcaggtctacctgaacgtctccctgcagagcaaagccacatcaggagtgactcagggggtggtcgggggagctggagccacagccctggtcttcctgtccttctgcgtcatcttcgttgtagtgaggtcctgcaggaagaaatcggcaaggccagcagcgggcgtgggagatacgggcatagaggatgcaaacgctgtcaggggttcagcctctcaggggcccctgactgaaccttgggcagaagacagtcccccagaccagcctcccccagcttctgcccgctcctcagtgggggaaggagagctccagtatgcatccctcagcttccagatggtgaagccttgggactcgcggggacaggaggccactgacaccgagtactcggagatcaagatccacagatgagaaactgcagagactcaccctgattgagggatcacagcccctccaggcaagggagaagtcagaggctgattcttgtagaattaacagccctcaacgtgatgagctatgataacactatgaattatgtgcagagtgaaaagcacacaggctttagagtcaaagtatctcaaacctgaatccacactgtgccctcccttttatttttttaactaaaagacagacaaattcctaaaaaaaaaaaaaaaaaaaa

SEQ ID NO: 222226 - DNA, 1000 bp, Homo Sapiens
tcttaaaaaaaaaaaacaaaaaaacaagaaaaggcaacatctcattttaaatagtacaattcagaagggatactaaatcaataaaaaccaggactcagacactacagttttcatcagtgtaattttatgtcttgtttctttctatatgaacttgtttatttagtctttttttcataatattctcatagagtttctgctagatctagagctctgctcagtgcctcttataaaaacaatatataagtctcatatgctgtcttgagaatccaagagaatcacatgcagctctgcaacagtttttgctcaaaaatgttactgactaaagcaactgtccttcctgtttccttattgctaccaaggaccagcagggagaaatgtcttctcccagcagtgaattctgttatgcaatttattcttgatgctcaggcctggttaagctgaggcttacctttaataacagcctccaagggaatgaattattcagttaatgtaatagcacacattaaagagtgtaaaatcaattgaggcattttattaatatcttggttcttttatacaaacaatgtatcattatcttcattctataaggtcattgttactacttctctcaaattgcactttctggtaaaaagttaaaaatttttaaggaaaaaataatttcaatggttaaagttttttttcctcattgtattcatagacaaatttttttcaatatattttgcaagaaaaatctttgaataagactaactgcatttaaaaggaataacctccttctccctttccccaactacaaaaatgtttggcaactttgtgtttacatttaaagatcatttgcacctttttcaaggaaaaaaagtattgagtaaacaattgtttacatatatcatttatgcttttttctagcatgtataacttttttaaataaaggtagtatttaccattaaaaaaattttagctaaaaaaaaaaaaaaaaaaaaaaaaaaaaaaaaaaaaaaaaaaa

SEQ ID NO: 222227 - DNA, 1000 bp, Homo Sapiens
ttcgttacactgcctatgaccgagcctacaaccgggccagctgcaagttcattgtgaaagtacaagtgagacgctgcccaactctgaaacctccgcagcacggctacctcacctgcacctcagcgggggacaactatggtgccacctgtgaataccactgtgatggcggttatgatcgccaggggacaccctcccgggtctgtcagtccagccgccagtggtcaggttcaccaccaatctgtgctcctatgaagattaacgtcaacgtcaactcagctgctggtctcttggatcaattctatgagaaacagcgactcctcatcatctcagctcctgatccttccaaccgatattataaaatgcagatctctatgctacagcaatccacctgtggactggatttgcggcatgtgaccatcattgaactggtgggacagccacctcaggaggtggggcgcatccgggagcaacagctgtcagccaacatcatcgaggagctcaggcaatttcagcgcctcactcgctcctacttcaacatggtgttgattgacaagcagggtattgaccgagaccgctacatggaacctgtcacccccgaggaaatcttcacattcattgatgactacctactgagcaatcaggagttgacccagcgtcgggagcaaagggacatatgcgagtgaacttgagccagggcatggttaaagtcaagggaaaagctcctctagttagctgaaactgggacctaataaaaggaggaaatgttttcccacagttctagggacaggactctgaggtgggtgagtttgacaaatcctgcagtgtttccaggcatccttttaggactgtgtaatagtttccctagaagctaggtagggactgaggacaggccttgggcagtgggttgggggtagaagttcttcctttcctaacccgggcccctgcccagctctccaaagtctttcagaaaagtaaatcctaaattcagtgaaaaaaaaac

SEQ ID NO: 222228 - DNA, 1000 bp, Homo Sapiens
actgccccagaagagccctgtccgaagcctctccaaacgactgctccacctccccagtcgctctgaactcatctcttctaccttcaagaaggaaaaggccaaaagctgttccattatgtgaagtggaaattggaggggggagacaaccccctacttcctcccttggggtgcagaggcacggggagagggaggatgagacaatttaggacactggacatgagtttttcagatggccacggtgagggcttggaaggagacaggaatggggcgaggaaggagccaggcccggcatgaggacctgacgctgagagagaaccatcataccccaagccaggcactagattttggagggggcgactaccccagtgccccccccgctccagaggaaggaaagctgtgggggacggggggcatgctggcctcatgggcttgggggcctacagcagcctcaccttcagcttcatgcctcttccacacagcgtttccatgcaggtcaggggatgggaggggtccctgagcccttcccttcccctctaaggaggcagcaacggagagtggggaagtggagcggcagctcccttgggggcttagcccaggtgcttcgtaactgcaatcggaagtgcaggggctggtcagagccaatgagaaggaaacctcatctttgcatagcccatgcctcatggagaggtgacatcatacattcacatgcttctcacctaagtccccagggtccaagggagaagccccagacccccttctcttgcagagtgtgggggtggtggtgctgcaggggcagggctgggtgggggtcaccagactttttctgcccttagggtagtacagctggcatttgttttatagactcttgtctttggaattggggggagggggggagtgtttcaatctgttatatgttctgtgtttaatgaagaaaacctatttattaatgaaaaatataatacatataaagaaaaaaaaaaaaaagaaaaaaaaaaaaaaa

SEQ ID NO: 222229 - DNA, 1000 bp, Homo Sapiens; identical to SEQ ID NO: 117005

SEQ ID NO: 222230 - DNA, 1000 bp, Homo Sapiens
acctatggtgaaaatgatgaaaatactgatgataaaaataatgatggagaagagcaagaagttcgagatgacaaccgccccaaaggccgagaggaacactacgaggaggaagaagaggaggaagaagacggggctgcagttgctgagaaatcacatcgaagagctgaaatgtagcggcacccaatttctagacaacgctcagccaacggattcttttcaagctgctcaaacataaatctgcctactgaactctaggatatttaattacaaaaattaagaacttagacttttttaaaacttttgtattagaaatgcgcatacatttatatgaatatattttgataacgtaggtctagagcttcttttatattcaagctaaacatgaaaaagaagaaaaacaataaagtaaacctgagcccccacgtcccaatttttttaatagattatgtgatgttggaaagctcattgattttgtatatgtttcagcgtgttacctttctggcttccagttcccaggtgttctttgtttgcctttgataaaatacaggatttaagaacagagagtactgcaaaatgccatgcagactttaaagagaatggcctgtttactaattgctgcccttctgatgtctttatgtatagctctgatagaattttcaccagtctatgtatctctggagtgagatctatgtacaaagtgacatacaattggaaatccatttttgttgtaaagacattgtttttcagacttttcagatcaattagaaaaatgtcattgctttaaaatcatagctgttctgtttaagaggaattgaatttaaaaatgagagagtattaaaactcatgtggcagtatcctggtcttaatcaggtattgcagtgttcaaacaaggtatggacacatcaacatattcaccttttggaaggactagtgacttggttaaaaactaatgagtgtttgcgtgtggtgtttctatgcgagcacccattctcaatttttt

SEQ ID NO: 222231 - DNA, 1000 bp, Homo Sapiens
agctgtcccggattgcaaaactggaagctgcttattcgccgagaaaccccttaaagagaacatgcatctttaagttcctcggcgccgtagcaatggatcttgggatagacaaggtaaagccgtatctcccaatgatcatagctcctttgtttcgggaactcaacagcacctattcagagcaagatcctttgctgaagaatctatcccaggaaatcatagaattactcaaaaagctggttgggcttgagagcttctcattagcctttgcctctgtacagaaacaggctaatgagaaaagggcactccggaaaaagaggaaggccctggagtttgtaactaatcctgatattgctgccaagaaaaaaatgaagaaacacaaaaataaaagtgaagcaaagaagagaaagatagagttcctgcgtccaggatataaggccaagagacaaaaaagccatagcctgaaagatttagcaatggtggagtaatgtctccctgtgctgatacaagcatgaactttctggaatattctgctagtctgaaattacagcaggttgtctggggtagggggaggcgttttttttttgagacaaggtctcactctgtcacccaaggcggagtgcagtgacgacatcacagctcactgcagcctcaacctgggttcaagtgatcctctcacctcagcctcccaagtagttgtgcctcctaggcacacaacactatgcccggcaaattttttgtattttgtattttttgtagaaacaggatttcgccatgttggccaggctggtctcgaacacctgggctcaactgatccgcctgcctcggcctcccaaagtgctgggattataggtgtgagccaccctgctcaaccaggttttattatttaagttagttaaactttggatagattgtataatatatagtttaatgtaatcatgctcatattttttaaataaataaaacactatagtaaaaaaaaaaaaaaaaaaaaaaaaaaaaa

SEQ ID NO: 222232 - DNA, 1000 bp, Homo Sapiens
tcttttacaaaccaggagttatcctcctggtggttaatatggtgtaaccaaagaatcttgcactcaatgcacagtgtgatgttaactaaaacgagttaaatatttaggaggcttgacagctacctgcattgtagaaccttttcttatctcagtggaaccttctataacctaaatataccattgatgattcttcttccattcagtgacatccacagattatgcagctatacttgtgaaatcgtgcatgaggccccagggcaccgttctagaacaacgtcacttcacacaggcagctgagaaaggttctcttgcttttccagtatcttcctaaggatggagcccaaaattgcagagcagtaactttggaataaaaccagggtgggtataaaacttcttattcttaaatttacatataagatctattaagcttgacacatctgtgtcatcacgcactgaagacaggaagcagttcactgagtcagctggttcccaagctcgcacagaaggtgataagttactatcaaatgccagtgagaatcttcttatagaataacctgggcccaagtgattttagtacaaaacttgcccttctttggtttaattttctatgtgcttttaggtgtgaatccagatatgcggtcttaattcctttggaaatacacagttcgtttagttactgtacactctgtttgttcaataaactgcatatcaacttcccacaaaagctgacttttttgggtctcttacatataaagtaggtcattgagttgatttttttggaggtatctcatattggtcgaattcttctggtatggactcttgccttatatagaggcttctatttctcttaagtcaccatcaatacaacggccggagtttctgtttttgcaataagaagatgttggtattttatgtagggtaaatgtgactggaatacacctttggaacggaattctttatcaataaagtttcacaatccgtccctcttccaaaaaaaaaa

SEQ ID NO: 222233 - DNA, 1000 bp, Homo Sapiens
gggggcggggggggggttgtagaaacagtctgatatggtttggctctgttccccacccaaatcccatctcaattttaatccccatgtgtcagaggagggccttggtgggagatgactggatcacgagggcagatttctcccttgctgttctcatgatagtgagttctcatgagagctgatggttttaaggtgtagcccttcctcgctgtctctctcctgtccccttgtgaagaaggtccttatttctcttttgcgttctgccatgactaagttttcggaggcctccccagccatgtggaactgtgtgtgagttaaacctctttcctttgcaaattacctagtctcaggtagttctttatagcagtgcaaaaatggacgtaataagtcttatgtacttattggtgagagagaaaatccgtgcattgttttcaaaagaattcattaacgtatcaattcaatttctataacctttgaagtggcagtaaatatgtagtaattgatacttgggagatagttgcccacttgggcaaaaacgcatgcagaaggcggagtttttaaatttaaaacatttttaaaatagcaaatgttaatattccagtttccattggtaggaaattttttaggtaagttcaggcatatgtatgcaatggaaagccactagaaatcttcaggcacacagataatgacaatgcaggttgctcatgaagtatttagtgaaccaggagagttttagaacaacaattatagcatgaccccattttgttagtatgtttttctgtgtgtatgtttagagcaacagagaaaaaaagatgtgggagaggacatataactacttatctctagtggtgggattctgaatgtataatacatatgttgtacttttatgtatttcactttgtaacaaagtatctttcagttttataataacagtagagctattttttataaattagcctgatggaacaatcccttatgattaaagattcatgttgtaacctct

SEQ ID NO: 222234 - DNA, 1000 bp, Homo Sapiens; identical to SEQ ID NO: 117011

SEQ ID NO: 222235 - DNA, 1000 bp, Homo Sapiens
gcagtgccgtggctcagagcaggtgctctgggggctgccctgctcctgggtgcaggtgcccgcccatgagtggggacacgcagaggagctggccaaggtggtgcgcggccgcatcctgcaggagcaggcccgcctcgtgtgggtggagtgcggcagcagcagaggctgccccagcagcagtgaggcctgaggctcatctgatacctgcaccttctccccaagccagcgtggaccctggtgtctatggtgaagctgggccctcccaccctgagccttcctagacccttggactctcagatgcagggcccttggctctggcctctcacccccaaggctgtctctggccctgccgagcctatgggagtcccgggacagagtgcccactcccctctacttgctgctctgggcctccccacctttcctggggtctccacattcccactagtgggtcttatgtgtgtctgtgtcttctccttaaacactcgccctggagtctgttctcacacctgtgcgcaggtttgcacactcaagttctcatgggcaggctcaggtctgtcccgctgccctgggcacgaggtctcctgaggacctgggcctgttctgctcctaggagacctgagcccgttaccgcgtgactcccaccatccagctcgcgctcctcgtggattcagccatgcatggactggggtgttccctggcccatggtcacctgtgcccctcgtgtctcctcacatgggtgtctgtggttctctcctgtgtaaatgtcacgccccacccctgtttcatgtgggcactaacacgtgtgcgttcctggcgggcacactcaggaccgtgcctcacagggcccactccctgcctatgcctccctcttggggggccgaggagggcggctgctctgtcatgagaatgtacggcccgtggatgattaacgggcctttttcacttagaagctgcacattatggagcattaaacacttttgtcatagaaaaaaaaaaaaaa

SEQ ID NO: 222236 - DNA, 1000 bp, Homo Sapiens
ttttctgttttcctaaccactagactaccagggatgagccttctttttattattgagttgggtgagctatttgtatattctagacgccagtcttttatcaggtatatgactggtaaaaatgttctccccttctgtggattgttttcagtttcttgttggtgtcctttgagacacaaaactttttaactttgatgatttccaagatacgtattttttttctattgtcacttgtgcttttggtgccatatctagaaaaccattgcctaatccaaggtcaagaagattaatgcctgtgttttcttctaagaacttgtatagttttagttctcacaatggtctttgatccatttcgagtatatttttatatatgatgtgatgtaggggtccagcttcattcttttgcttgtggatctccacttgtcccactgctgattattgagaaaaatatcctttctccacggaattgtcttggcatccttgctaaaggcctctgcttcttactggatcttctttcctgggacatggtgtcgttgggaagcttacctttttttttttttacttagtctgtgtttggttccaccagttttatgctgcctttctactctgttcttgctgtctccctctttacctgagtcaacggtactgagtcctatctctctctgatgttccccagtcttccttggtgcatgttctagctccacacactagtccttggaggaaggttgagaccaatgatttcctgttatgagtcatgaggaaactgaatcacctagaagtggaataatgtgctcagggtcaccatagcccattagtggaaggaccaggactagacctttagtcttctgaggtccagccccttaggctgtctgtcatcactgtacccaagtgatgtcactaccaaggccaaatgatggtgggctaaattttaattctcaaaagtgtaggaggctaatattgtcttctaagttccaaaagaagatgtaataaaagtctgttacct

SEQ ID NO: 222237 - DNA, 1000 bp, Homo Sapiens
acattttatacttttttctgtattgtaataggtagttttgtatgaaatcttttctcctctcccgttgtaccgcattctttccagcattgtgctttttccctgggcttatttgaaaattttactgttttatacaagctcgtttagtacatttttctatgttttaccacaagttacaatttgaaaagaaaactattttttttaaatattccattgttaactgaatgttactgtttccactccagcaactacatgtcctcccttcaactgcctgccttttggggaaagaccaccttttgtgtgtttgttttttctctctctttctttccctttctctttctatctctctttatttttctttctttttctttgtttttgagttttctataggaaataaatagctttctatatatgagttgctggggaccttcacattctcttttagaaagctgtggcatgcagtctcattgcaggactcctggaatattgtctggttcttggtatttactgtatgtaagcaacaacttgaaaggtggcaatatggtgtcgatttggactatgaatcaaaagacctttttcaggttctttcactattgtctgggggactcagaacaagattgttctctgtatttattgtttgtccatttaggtaacatctgtcttaccttcctcacagactttgtacagaccaaagcaacaaatatttattgccatgtatagcagaaaatgaaacatgcaacaaaagcactttgaaaaatatataaggaattgttgagcctgtctgaatttgggccccctttctgactaatgcagttttgcacaaggtagaagttagtgaccctgagaccatcttaccaccctggacctggtccaaatacagacttacacagtggaccattctttcctgagctagccaacaagagcaggagtagtatctggaaactttcccctttgtttaggggtaggctttgatgaccaggaaaaaaaaaaaggtatttctgca

SEQ ID NO: 222238 - DNA, 1000 bp, Homo Sapiens; identical to SEQ ID NO: 117013

SEQ ID NO: 222239 - DNA, 1000 bp, Homo Sapiens
gggcagccgccctttttggcacctactcccacagaaacccagctgaaggtgatcaactgggagaacacgctccacattccagcccaggtgaagctgagccctgaggccagggacctcatcaccaagctgtgctgctccgcagaccaccgcctggggcggaatggggccgatgacctgaaggcccaccccttcttcagcgccattgacttctccagtgacatccggaagcagccagccccctacgttcccaccatcagccaccccatggacacctcgaatttcgaccccgtagatgaagaaagcccttggaacgatgccagcgaaggtagcaccaaggcctgggacacactcacctcgcccaataacaagcatcctgagcacgcattttacgaattcaccttccgaaggttctttgatgacaatggctacccctttcgatgcccaaagccttcaggagcagaagcttcacaggctgagagctcagatttagaaagctctgatctggtggatcagactgaaggctgccagcctgtgtacgtgtagatgggggccaggcacccccaccactcgctgcctcccaggtcagggtcccggagccggtgccctcacaggccaatagggaagccgagggctgttttgttttaaattagtccgtcgattacttcacttgaaattctgctcttcaccaagaaaacccaaacaggacacttttgaaaacaggactcagcatcgctttcaataggcttttcaggaccttcactgcattaaaacaatatttttaaaaatttagtacagtttagaaagagcacttattttgtttatatccattttttcttactaaattatagggattaactttgacaaatcatgctgctgttattttctacatttgtattttatccatagcacttattcacatttaggaaaagacataaaaactgaagaacattgatgagaaatctctgtgcaataacgaaaaaaaaaaaaaaaaaaaaaaaaa

SEQ ID NO: 222240 - DNA, 1000 bp, Homo Sapiens
tagcctgtcacaacagtgctcaagattgtattgaagtttttctgcattatacaaccctaaaacacagagatctcactgacccgttgccctgtaaccactttctttccttcttttgcctaatacagctcagctaagtccttccataaagatgctaaataactttcatcatcacataaatgtcttcataaaccaaggactattaagtgtattaaaatgaaacagtggggtttagtactccaaatgaactcttaaagaaaaaaactaatcttggcatcctatcactatgtgatattttgtacatcttactgtatttacaagtttatttatcaaggattatccatcttgctaatggcctattatttatttcactttttgttggtctttatatccttttattaatgtgctaaaggaacctgtatatctattttggaactctttgaatagtctaaaatagactaaaaatggagtattttatagtttaaattacaaaccaaggtggttccccctaagatatatatcttggtttaccatgattccaaacaaaactaacttgtttaaaaatatttggagtaaagttttatttgcattacaaataggatacaaaaatagttgaatcaggatacagaaatctgctgtgttttgactagttatccctgttttatttttttagatgtgcttaattttatggtgtaactaaagattttgtttgtgtaatgcatgattaagacaataaagtattttttctagtcttccgagaaacttttctgatcagtttgcgagttttgatgagttttgtaaggtttttgttttacaaactatgaatcagcaaatttttaagattgtaccacatagcaaacatacagctgttgaaaaataatgtatataaaatgcatataataaatattaaattgtgtacctgtatgttactgttggctacatcattttgtgttgaataataaagtgcaatactttattctccataattaaactaggaaatgga

SEQ ID NO: 222241 - DNA, 1000 bp, Homo Sapiens; identical to SEQ ID NO: 117017

SEQ ID NO: 222242 - DNA, 1000 bp, Homo Sapiens; identical to SEQ ID NO: 117019

SEQ ID NO: 222243 - DNA, 1000 bp, Homo Sapiens
tactggcattggcggtatcacaacctctactcagttctactacaaactatctcaagaactaaatggggacatggaacgggtcgccgactccctggtcaccttgcaagatcaacttaactccctagcagcagtagtccttcaaaatcgaagagctttagacttgctaaccgctgaaagagggggaacctgtttatttttaggggaagaatgctgttattatgttaatcaatccggaatcgtcactgagaaagttaaagaaattcgagatcgaatacaacgtagagcagaggagcttcgaaacactggaccctggggcctcctcagccaatggatgccctggattctccccttcttaggacctctagcagctataatattgctactcctctttggaccctgtatctttaacctccttgttaactttgtctcttccagaatcgaagctgtaaaactacaaatggagcccaagatgcagtccaagactaagatctaccgcagacccctggaccggcctgctagcccacgatctgatgttaatgacatcaaaggcacccctcctgaggaaatctcagctgcacaacctctactacgccccaattcagcaggaagcagttagagcggtcgtcggccaacctccccaacagcacttaggttttcctgttgagatgggggactgagagacaggactagctggatttcctaggctgactaagaatccctaagcctagctgggaaggtgaccacatccacctttaaacacggggcttgcaacttagctcacacctgaccaatcagagagctcactaaaatgctaattaggcaaagacaggaggtaaagaaatagccaatcatctattgcctgagagcacagcaggagggacaatgatcgggatataaacccaagtcttcgagccggcaacggcaaccccctttgggtcccctccctttgtatgggagctctgttttcatgctatttcactctattaaatcttgcaactgc

SEQ ID NO: 222244 - DNA, 970 bp, Homo Sapiens; identical to SEQ ID NO: 117022

SEQ ID NO: 222245 - DNA, 1000 bp, Homo Sapiens
tcgctcagagcttgtctccttggcttccaaccccagaaatgcctgctgggccttaagctttccaggggccggggcagtggggagcccccatcccttcacaccgccaccaactaaccaagcttggcctctgactcccgtctctgtgcttgcccccatctcagggaccatgatgtctcagtcactccacgctccccacaggccaaccctggcacaggtcatgtctgcagcccccagaatgttctggacatgcaccaccagccggtggtcccaatgtccacccctgcctccccttcactggggactggggttttcgccccatgctgcatcgtgttgtattgggatggggctgaggaacatgctccctccctccctcccataaaatgcctgctcttcacctcccacctttgtggggggcttttgaggacccagctgcgtcaggagttttgcttcaagatgtcagaaagtcaagttcagctaagagacacctaggtccccagcttgccctgagcagcccttcagggcttctggttccttctgccgcccttcctgagaccttagaaaccagaagagccatacagtcagtggaaggcgggggggccctggcctctgcaccgggatcccagtgggaaccttcatgccttatttatttctaatgggtaaaggggttttcttaccaagcatccctgacctcctggagacaccacctgctttccgggcggcactgtgatgggagctggtggcgactgagtccttctgtacgtgcaactgggaaacttttgtcctttgaggctaggcagctccctgccctccgtgtgtgtctgttatctgggggagaggagtgtggaagggttgggggaagagctccagcctgtctgctccccagctctgtagtggcagaccagcgtcacctttgaagtatacgtgagagaaatatatttacaaatgctttattctcttctttaataaaaaatgcaccagtattctaaaaaaaaaaaaaaaa

SEQ ID NO: 222246 - DNA, 1000 bp, Homo Sapiens
ttatgccacctgtgtgtcaggatgcacctgaaagccctcggctcggtccttagaccatcttcctacattacctggaagggagctgccatctgtccctctgcagagggataccttccaatagtaaattatctggttcctcactgaaacaagttatttttgcttcatatagtcagagtcagactgacatgataaaatatcatgttcctaatctgttgtctcagataagtgaccaagacgggactttccacattttagtctacattctaatcttaaaggaataaagcactgaattgggactaacattctgataggttgcacccttaagagtattcagagagcatcaaaaggagcccacaccttcagcagtgaaggattctaacacagggaatctgcagtttgtagcagaatggtattttcctcaagtagctcataatactgccaaatctcaaaagttaagctgaatttcacaccagatcctacccctttccctgagccacatgtttcacacaagtgtagaaaatgccagggatccaccacaagatggagatggtcagcacaaaccgattctgttcctctttaaagtgtatattagccacttagcaatctctatattctttcaagtaaccaagctgttgactttcttactacttgcagtagcctgtccccaacttttccatccagtgcttaacctaaaaaactccttaactctgccttgacctgaggaagaccatgctaactggtgttattttgtatgtaccctgtgcttaattctataacagtaaaccccatacgcaggtgggagggaggaacaccggtgcctcggtcactctgggggcagtttagatgctgtgaaattaaacctgttctaagtgtacttgtttgaattaattgtattgtaatattatttgttgaatgtagtaattaggtatttatgaatatattgctgtaatttctgacaacatccaaaaaataaaatcttcctaaattatgttaaaaaaaa

SEQ ID NO: 222247 - DNA, 1000 bp, Homo Sapiens
tccctccgtgcgaggagtatttgcagggcggctacctaggcgagcagggcgccgactactacggcggcggcgcgcagggcgcagacttccagcccccggggctctacccacggcccgacttcggtgagcagcctttcggaggcagcggccccgggcctggctcggcgctgcctgcgcggggtcacggacaagagccaggcggccccggcggtcactacgccgctccaggagagccttgcccagctcccccggcgcctccgccggcgcccctgcctggcgcccgggcctacagtcagtccgaccccaagcagccgccctccgggacggcactcaagcagccggccgtggtctacccctggatgaagaaggtgcacgtgaattcggtgaaccccaactacaccggtggggaacccaagcggtcccgaacggcctacacccggcagcaagtcctagaactggaaaaagaatttcattttaacaggtatctgacaaggcgccgtcggattgaaatcgctcacaccctgtgtctgtcggagcgccagatcaagatctggttccagaaccggaggatgaagtggaaaaaagatcataagctgcccaacactaaaggcaggtcatcgtcctcatcttcctcctcatcttgctcctcctcagtcgcccccagccagcatttacagccgatggccaaagaccaccacacggacctgacgaccttatagaagtggggaccctgggcccatctctccctgcgcaccaggctgagccgaagctgcgggggcaggccgggcctgctgtcacctcgctgggctctaaggtactgtggggtggacctgggacaagcaggccgccctcggactaggttagcatcctgcccgagggcagccccctccctagagcgggatggggatgggagggggggcgggattctctctctaagtatattatatggcaggagctactgagaacataaaatcttggcgagtcattaaacttatgaaaa

SEQ ID NO: 222248 - DNA, 1000 bp, Homo Sapiens
ctatctttgccttttgaagataccatccagaaaaagaagtgcctttaatttgctactgtcatttcctctagtatcacttttgctgtgatgatgtgttcttgtgtattataactctttattttttgccataaaagtaaaggatgcttactccacttcgcttctctgctccaggttcactttggatatgatctttcttttcccaacatatgccctcagaaaagtgacagtggtcccagaacctattccctttcttgagggagttcaaaacattcataggcagtaatgttcctcccagggtttccagggaaacaacatgaaaaacaggtgacatgaactacagactaaagattgcagcatttatgttagagaatgcttgaattagagaattttctgcattatctttgtctgttcactttctatcttatatacttatcagggccatactggtaagcttgcgtaggaggagttagagggaagttgaaagccaacatctggatcaatgtaatgtcaagatcacaaagacagagactgcaggggtccactgtgagaggtgacactgttggggaccttcctgattcattcttcttgggctttgctagcctgtacaacctacatgtcttttcttccactgcctgaaagacttgggttgaactataactgttggagagagatgttcctctttaatcatgaaacaccttaagaagtctataatgcaatccttagtcctaccctgaacctatgtgtcctctaagtcaggccctgatctagtgcagtaaagggaagggtgggcttaatgggagctttgcctgggacctgaacctggagcacttaccgcattaggaagaaaggagctccccgtaatcgttcctgacccttgtgtctcatataccctatcctggtggaaatgaccctatttgatatgctgtcccttaaaataacttgtatcaatattaaaatgactatttctaccctttgatgagtaaaaaaaaaaaaaaaaaaa

SEQ ID NO: 222249 - DNA, 1000 bp, Homo Sapiens; identical to SEQ ID NO: 117033

SEQ ID NO: 222250 - DNA, 1000 bp, Homo Sapiens
gatttcccgcagaataaactactctctaaaggcctgtctcatactcatcctccatctcctccctctcgccttccgtctcctgatccagctgcttcttcctctccatcaactgttgactctgcttctcctgccagaaaggaaaagaagtcaccttcagggttccattttcatcccagccatttgagaacagtgcatcctcagctgacggtagggaaagtgtccagcggaataggggctgcagctgaagtcctggtcaatctgtacatgaatgatcacagacctaaggcccaggccacctctccagacctggaatctatgcgaaagtcatttccccttaacctgggaggcagcgacacgtgttacttctgtaagaaacgtgtgtacgtgatggaacggctgagcgccgagggccacttcttccaccgggagtgtttccgctgcagcatctgtgccaccaccttgcgcctggccgcctacacctttgactgcgatgaaggcaaattttactgcaagcctcacttcattcactgtaaaaccaatagcaaacaacggaagagacgggcagagttgaagcaacaaagagaggaggaggcaacatggcaagagcaggaagcccctcggagagacactcccaccgaaagttcttgcgcagtggccgccattggcaccctggaaggcagccccccagttcatttcagccttccagtgctacacccacttcttggctgacacacttctgctctaagagtctccctccctttatagaatgtcaaccaaagagtgccctcctcccctctcagcctcctctttagctagcctccccatctcatcacaacgcatgtctgtgacctttggtaatcatttacagtgccacacggaaccctgtattttgcacacagcaaaacaaacaatgtttagctttatttatggtatttgatgctgtaaatggaaataaatattgttctttataaaaaaaaaaaaaagaaaaaaaaaaaaaaaa

SEQ ID NO: 222251 - DNA, 1000 bp, Homo Sapiens
ccgatgagaaccagaacaagtctggcagcgaggccggcagtccccggaggccacgaagacagcggtcagatcaggactcagacagtgaccagccatccagaaagagaaggccctccggttctgagcagtctgacaatgaatctgtgcagtcagggagaagccactcaggagtttctgagaacgactctcgcccagcttctccaagtgccgaatcagatcacgaatcggagagaggatctgataatgagggttctggccaaggctctggaaatgaatcggaaccagagggatccaacaatgaggcctcagatagaggctcagaacatgggtcagatgatagtgactaggttttatttcatcaataagcttcatctctggaggaaacttttttaatatatgaaagctgtgataaaaatgtttcagatgtttagtcaattgtgaaatttttcttaaggcaattttcttttctatcagtttgtatattactaagccccaagagacatttcctgtgctagagtccaatatttgagtctctcgtgcaaatgagactattctttgtggtacaattccacctatcatatgtgaaaactgcagtaaaaataaacccagatgctaaatcattcctacaaaggtttgactgaaactgtggcagatgtctcatcttctttatatgttaagcagcatactcttctgatttttattgcaatcttttaccaagtggtgcacaaacttggtattgatgtctttattccattttgagtttagattgagaatatttttattttctgaaggcagagatatctactgtataattgcaccaaagtacatttgaaaggaaggttttcaatagtgtaatactgcagcgatgtagataaaatcacaaatgtataatgtgttaggttgaataaggtgtggaaaatgcttttctgttagtagaatgcaaaaacctacctaagccacataataataaaattcttttaccaacaaaaaaaaaaaaaaa

SEQ ID NO: 222252 - DNA, 1000 bp, Homo Sapiens
acctgaccactcaacaaacagtccccaccacacctatctccttaggcaagactttgcctctctcctagtcctgagtataaatcctgtgcatagattcctctagaaaggcatcaaaaggctcaacagactgaatggcctcttggtctgcgaaaattcagttgcaatgaggatgaagtcactatcctagaggctgcttggcccagaagagccaggcacagagctgcagttgggcacgccaaggattccaaaggtggaatgagagagtagggtcaaactgtcacagtatctgctccataggtttctgtttttaatttcaatgttaaatacaactacaatatgagcgagaactgcattttcttgggtgttgagaacttgtaccatggacttcagaccgccttgcagccgtatgctgcacaagcgtgtacaccccctgggcagcctcaaaaccccgcttacagcagcaacacaggagatcatctgtccattttagaaccattaatctctttatccattgctgaacgactgtgactattcagtaacgaagtaatagtaattaattagtatggtataatctttaataaatttcgtgccaaaatgcatggttttccacttagcattcaaaatgttgcatagagagtagttttcaatttcttatgtactcttcaaagtaagttgaaaatcagtttctacattttaattcgtttcctgttaaatctgttgcactctcctgggctgtctttttctccagcagacccctgcatgcagttgtgtaaggactttctctaattcttgtgaatcgtctcacccgcagtaaccactgaacgtcaatcagccctccatggggttctttcgatttttggtgaagtattttgttacctcagtcttgtatcaagttgctgtatttttcagcttgttacattgataataattatttcactaattaaatactttaatgtacaaacatctttgtttactttgaaattaaatgtgttttccaatg

SEQ ID NO: 222253 - DNA, 1000 bp, Homo Sapiens; identical to SEQ ID NO: 117037

SEQ ID NO: 222254 - DNA, 1000 bp, Homo Sapiens
aagtccttaaaacagcaggaaaggtgggcctgtcccccttttgtgcagctacctatctgctgaggagcatctgggcctcattcctccaagtccacgggagggtccagaagagggagtcagagatgtatcctggtggagctgggagaaaggcagaaagcctttctgacggctatggaatacgattagccaaggtccacttggcccagcactaagaaaaagatgcgtagtttgcacagaaggttttgtgatcctgcctctcaacagccccagcagcttgggaactagcaagagcacatttcttgcctcatcagctgtcctgagatggaaaactcagtgaatataggaccctgattccgatgaaaggggcacgtggtcccaatgctggagctcctctggcaggttctaaaagcacactactgagcagcggtgccctgccggacactgctggcgggggctcagtgagcactactcacagatccacacctgaccctgttgggtcgagtcaggctgggccttggtctgcactgtagcacctgtgttctttgagttcacatcatgaatgtggtgacttcccagataccatctcaggcttaacctagcacatcctatttcttttcttctatgatatccaaattggactgacctcacttcaaagttgctgtcccattttgtcaccctatcttatctcggggaaattgcagactgatggccagaccaactctgttgaaattcttgcatagagcaaacctgtgctcatttttaagtggcatgggagaggccccaagcctagtaaagcctagtctgtgtcttcacagtgctggtagaatgtgtttgtgtgtataaatatatgatatagatttatatatgttgctaacgccatatattgaaggccaacataactggtggacagggtgggtgacagaaaatgaaagtctttttggtgattgttaaagcaagatgtgtataaagaaataaatagtttttctttcacaaaaaaaaa

SEQ ID NO: 222255 - DNA, 1000 bp, Homo Sapiens
gtgacaaagtgaatacccactgggctaagtttcatatctaaagcttgtcactaagaattttcatttttaggggtcaaaaacctattttgaaaatagtgttgtgtgaatgctgtaagtgttgtacatgtctctggtttcagaattaaaagaattcagagttaccttgtgagataaatgttctttgcttcatattcacagtttcacctccatttaaatttatggggaagaataaatgtttcctgactcagaaacaattttgcctccatatttcagtgcaaatatattttgaagttacttttaaatatttatttaaaacctctgtttctgtaactgtatgttaaacgtattcttctgtaatgagaatagactggaacatgtgagggaaaaatattaaaaaaaagatggcagtcatctagacatgtaaaatgccaagaatgtcttagaattgcacaatttagaatttatagagcctttaatcaccttgtctagcaccttgtattagtccattttcatgctgctgataaagacatacctgagattgggcaatttacaaaagaaagaggtttaatggacttacagttccacatgactaaggaggcctcacaatcatggtggaaggcaaagaggagcaagtcacatcttacatggatggcagcagacaaggagagagagcttgtgcagggaaactcccatttttaaaaccatcagatctcatgaggcttactatcacgagaacagcatgggaaagacctgcccccgtgattaaattatttcccaccaggcccctcccacaacatggaataatgggagatacaagatatttgggtggagacacagagccaaaccatatcacaccttaaggtcatggtcatatagctagttatcttgtaaaaccaatgtttcttagttcatacttacaactgcaatttcactttcatttagaaaagaataaatgtttcttaattgaacaactaaaaaaaaaaaaaaaaaaaaaaaaaaa

SEQ ID NO: 222256 - DNA, 1000 bp, Homo Sapiens
acctggaccgacgagatgatgcctattggccagaaggaaagcgtgtggcaatggaggaccgatatcgtgcagactttccccggccagaccaccgctttcacgacttcgatcatcgagaccggggccagtaccaggaccacgccatcgacaggcgggagggttcgaggccaatgatgggagaccaccgggatgggcagcactatggagatgaccgccatggccacggaggacccccagagcgccacggccgggactcccgtgatggctgggggggctacggctccgacaagaggctgagtgaaggccgggggctgccccctccccccaggggtggccgtgactggggagagcacaaccagcggctagaggagcaccaggcacgcgcctggcagggtgccatggacgcaggcgcggctagccgggagcacgccaggtggcaaggtggcgagaggggcctgtctgggccctcggggccggggcacatggcaagccgcggtggagtggcggggcgaggcggctttgcacaaggtggacattcccagggccacgtggtgccaggtggcggactggaaggtggcggagtggccagccaggaccggggcagcagagtccctcacccacaccctcatccccccccgtacccccacttcacccgccgctactaagtcccactcgctgtgagttttcgggtgggcagacgcactgttgaatctggtagccagggttccctcgaacttgggggatctttttaaaagcaaagtaaatcctgccaccatgttgtagctcaatacaatgtgaactcacttttttttttttttttaataaatgtgttcttgttctgccatttttaaatcaaggtttctgttaacgaggcattccattttccattaataaagtttaccattcgcaaaaaaaaaatgtgttcttgttctgccatttttaaatcaaggtttctgttaacgaggcattccattttccattaataaagtttaccattcgc

SEQ ID NO: 222257 - DNA, 1000 bp, Homo Sapiens; identical to SEQ ID NO: 117039

SEQ ID NO: 222258 - DNA, 1000 bp, Homo Sapiens
ttattcctctccattttcactccttccagcctctgtccctgaactgccactggcaacccatgggacctcaggaccagagactgcttgactcatctggggagggtaagttcacgggggacaaaaaaatgattcctaaagaagaggcttcctagaccagcacaggctcgagaaagacatcccctaggcctggacttctgagcagctttagccaggctccggacggcagccagaggaggcctttccccattgctcctttccccattgctcaatggattccatgtttctttttcttggggggagcagggagggagaaaggtagaaaaatggcagccacctttccaagaaaaatataaagggtccaagctgtatagtatttgtcagtatttttttctgtaaaattcaaacacacacaaaagaaaaatttatttaaataaaatactttgaaaatgaaaagtcttgatgtagtcagatggttactctcttaacattaggtattacccccactcagacatcactcagaaatgatcaatgcagggactctttctgtgacacaaatgtcccagccctccctggtcaccgccttcgccatggtagagtcataggtctgaggatgaggaatgtggctgtctcacccttgcttgcaaaacagatggccttggagaccagactccctcaaaggtgccagctacaggaaaaatatactgatgttccttggcaacacttacagaactttccatcaatgaggtccatcaatggcttcttaaaggaaaaggggggaaatagcaaaaacctaaggaagaatggacctttgagttaaatccagtgtttgttgggaaaggagggatcaaaaacctctatagtagccactagggcaaaaactgtgtgtatgtgtgtgtgtaagtgtgtgtacactgttcaatatggttcaatatggtaccaatagccacatgtgactatttaaattcattgcaatgaaataaaattaaaggtatactagctc

SEQ ID NO: 222259 - DNA, 1000 bp, Homo Sapiens
ccttttgcttgtcaggtttggatagaatataattgattggtttgttacttggactaacaaggcagtagatttgcctgtgtggaattttttttcctatttttcttctttttgctttttttgcacttatcagaaatatttgatgtgtgcattgttgaaaaatactggatacatgtcttgtcagaattgtcgtattaagtaatgtctttccctcttgcttctttggcaaatgttgatacacagtgtttggacttactgaagagttactgaagcctgtgggacttaataaatacaatatgctactccctgttgtgattgaacaatacaaataacaaacaagaaagacaatgcattccattagtctgctattctgtttccttcaacttcatacatagattcatatatgaagtactgcattgtaaaacaactatagactcatattaaatgttatttctatttataatattcagcaaaagtgaaagacttgtgaagcatatgacattctatttttgacttattagtcctagtgtgaaagcattaatattattagcatgaaatttttacttcagattttaagctcatgaataaagatatatctgtgttgatctctagatatttttagtaatacccaaatatattcagtccttattgttttaatataagctttctgtgttcagtataattttatttttctcaaccttaaatatgaacttaggaaataaggagggaagtacaaagattattgactatacaacctaccagctgaaagaaagatcttcatcaacatctgtatctttccagaggtatacagaattaaaatttgatcttcaagctttaatgatccagttttaagtcaacggcagaagtatgttgaatatttcatcactcaatcttgaactgatttagaagagactctttgctgaaattgaattgcacttatacatgtaaattgtcaacatgtaatttggaattttctgattaataaatgtggttttggacatct

SEQ ID NO: 222260 - DNA, 1000 bp, Homo Sapiens
ctggttcctgctgaggtccagcagtgctagggaggacagccccgctagagcctggtcctccagcagctcaatgctgttttcttgcaggtgaagctcctgcagtcgctgaagtaaggacagcagatcgtgaggaaaaagggcgccgaggttgggggcatgtctctcttcttaccaagctagactgggttgccttttctaactattccagccctacagggcgaggggccataatggagtatcccgcccctttagaccccaggcgctcaccggcaggtgcaagaaggtgaaatccagcagccgcgccagctggttgcccgccaggtagagcacgcgcagctgggccaggcctacgaaggcgccgctgcgcaagccgcgcagccggttgctagtgagcgccagctccagcaggcgcggctgcgcgcggaaggcgccggcctccagggcgcgcaggctgttgttgtgcaggtagagccggcgcagagcggcgagtggcgccagggctcccggctctaggcgggcgatgttgttgtcctgcaggaacagtgtctgcaggccggggaaagaggaggcgcttaccccgctgcgggggtcttcctctccctgggggcaccccgtcctcccgcagctccacacggtgcccacctgcgtccctggcgggattcccagcgggacgacgcgcaaccgcagggcgccacactccaccgtggcgctgtagcagcggcaggctgctgggcagccggcggcgcggagcggcagtagtagcagcagcagcggcagcagttcgggggccctcagggccatctcccgaggcccggttcctcaccggcccttccgcggttcagccgcagacgcgtgccctcctgaaacacaggttggcaggccagtctcggcagtcgagagccagccaatagatggaatggaggcctgcacctgcgtctaacttttgacactataaataggttcaagaaactaataaaacgttctggttttctcctttgac

SEQ ID NO: 222261 - DNA, 1000 bp, Homo Sapiens
agaatggtttttaaagccacagttgagaggccacccattgcccggcgcctggacagtgatcatcttgttcatcttgttcagtcctttcttgtgtgattggaattattcatcccctttgaaagatgagaaggttgagatgcaaagagtctacctttccaagttctcactgctggaaagagctagaagcacagttcaaagttctggcttctggactctgcagtccaggtctcccttctcccacttgcctaccctcaatgccacactgtttttgaagtggcccataacttgaaggaaaagtttaaagacagttcaatttaatcatcagaatgcattcttttttttttcggagacggagtttcactcttgctgcccaggctggagtgcaatggtgcaatgatctcggctcactgcaacctctgcctcctgggttcaagtgattctccagcctcagcctcccgagtagctgggattatgggcgcccaccaccatgcccagctaatttttgtattttttttttttagtagagatggggtttcgccaggttggccaggctggtcttgtgaactcctggcctcaggtgatctgcccacctcatcctccaaaagtgctgggattacaggcatgagccactgcgcctggcctcagaatgcattcttacacatctatcctagacatttataagcactctaatggataacaatccaagaataaatgattgtaaaagatgatgccgaagagttgatgtcaatctttttttcctaagaaaaaaagtccgcgagtattaaatatttagatcaatgtttataaaatgattactttgtatatctcattattcctattttggaataaaaactgaccttctttaatcatatacttgtcttttgtaaatagcagcttttgtgtcattctccccactttattagttaatttaaattggaaaaaaccctcaaactaatattcttgtctgttccagtcttataaataaaacttataatgcatg

SEQ ID NO: 222262 - DNA, 1000 bp, Homo Sapiens
tataccgtggcctgcctcatgatggtttggagatactgtctgtggatgtgaggtggggacttcattcattgtcctatttctatctccactttgtgcctggagagctttcaggggaggtggaggaggagggtctgccaagctactgcaacatctgtcacccactatacccagttacttgggggaggacagacactgtggtgtcattaaagttgtttgaaccaaagtggcggctgcatctttgtcccgatgctagccgtgccggtctcccatcatccgctcgccctcctttcccctgggctgcgcccacttgtcttcctggatatttgggggtgactcgccatgcttggcaccctctgcttcctggtgctgctctgactcgaagacgggacagtccctggtgcacatccagggaagaggagtgtcggtagttcttgcagtaggcactttatcaggacctgacctgttgctgggtgattttagtctctacaaacagaaagcgtttcaaagcgtcagctgtgggagcagagtgaccctttgctgatgctggggggaggggatctaaatcctcatttatctcttctatgtctagtattttactgtcactggaggctctgtgggctgtcatagttaattgaccataattagcaatatacttttaaagtgggaaagctgaatgacacttttaagacaatgaacattatcaaaacaaaatgtataatttcttaatttgaataataagcgtttaaatgctatttgtagtcttgatatacagaaataaaataattagggttggtcttttttattttaggttttatgttgaatgttctatatcttattagttaatttgtatattttattagtattttggaaatagcatatctgagactgaggagaaattgacaattcacttatttgtggtttttttctcagctattctgagcttatttatttatttgtatgttctaatggctaaacatttacattaaatattttttttccc

SEQ ID NO: 222263 - DNA, 1000 bp, Homo Sapiens
attttctatgtatttaaagaaaaatgcaccaggatggtgtctgtgcacgtgactattagaggagcgtctgtagaagtacctggtttggtcagtgcagttgtgcaatctgagggccttgtttcctcctcccctttccccttctccccaccaaaggaaaatatccctcttaatgatttcgtagttcagtttactgaatgattaccacctgtaattcctctttggattgtgtagactcaacatgagacattcctttctgctttctggagggcaccaggggcctttctctttgataaattttttttgtctgttgacaaaaacaaaaatcttttttcaaatgtagtgctggtgaaaaggtagggctgagtgattaccttagccacagggtggctgagcaggaactttagaagaaaatcctgagctttcctgtccattcccagcatccagctcctattctagtgcctcttccctgcagggcagggaccccttgggaaatcgaggaggtgggacgggctgggccctgtgtcccaggtttcacagggctcagggttatgctcccgcttgaatctggacgtgaatctggtaaaaatatcaagtacctgtggaactccctgattctataccctcttccttctttctgcaaggcagaggaataatatttttaaaggttattttgttttagttttaaatagcaaaacacaagctgcatttttatttattttgcataagaaaggtaaatctttttacaaaaaaaagtatagagttggaaactctgggaaaacttacggaaatacacaaatgcttctctgtaatgtgcaatatgctttgcaactgtagatgatattttatgtttaatctgtaaataagaaatgtatttaaattaaaagggatctttttgtaaaaggaccaaatgttcttttataaatgtaataaggaatatcttgctctttaaaatttattaggatttttatgagtaatttttattaaaagatttctttttttg

SEQ ID NO: 222264 - DNA, 1000 bp, Homo Sapiens; identical to SEQ ID NO: 117045

SEQ ID NO: 222265 - DNA, 1000 bp, Homo Sapiens
tttacttacctgcttgaatacttgaataaaccattcaccaattttaatccttttattttaatccttttacataaaataatctgaactctttgacaaattgcacagagctctttggcattaatctaattttaatgtactgataaaaacaaacatggttgtcctttactttgacaaagtaatgtaatttttaccttatttatctgtatgaaattccagtagttaatttgaacatttatttatatgacgtttgtatttttaggtctttaatacagtgtttctacctctcatttgtaactgcatgcattattcttgaaactaggtaaaactcactgaattgttgtgtaatagcctttttattattgcctgtacaaatgtatattaaggtaaaataaaactgacaaagtgtttctagggtgtagctgggtacatattaagtggcttgttgagccaggtacttccttagtgagtttagagacttggccatgaatatcctttgtcctgccccaggatttagatcttggctactgtcatgcaggcttccaggaacatagactgttttacctccacaaccctatttgttattagtgatactttattttatataatattttttattcacagtgaaatttcattcatgttctttcagttatcacctgtgttatctcagttgtaggtttattctatcctctcctcttcctctcccatttcttttttaacacaggatgaaacaggttcagagaggggaagtgattggcctaaagtcaggaactaggcaagtggtcaagccatgctttgtgactttcaagttaattcttcttgttcttgtatattaaaggtcttggggtagatggtgtgtgtgaaacagtgaagtctcaacagcagaaaagaacaaaatgtaaattcatgaataatggttctggttatacttccattatcaaggctaattaagagattttgccttgagtatagcaataataaacaaatgctttatgtttccctg

SEQ ID NO: 222266 - DNA, 1000 bp, Homo Sapiens
ctgggccaatggcctatgcacgagcttttcttgaagaaaccaatgcaaagaagtaccctgacaaccgagtaaagcttttgaaggagatcttcaggcaatttgcagatgcatgtgggcaggcccttgacgtgaatgagcgcctcatcaaagaggaccagctggagtaccaggaagaactgaggtcccactacaaggacatgctcagcgaactctccacagtcatgaatgagcagattacgggcagggacgacctgtcaaagcgcggagtggaccaaacctgcactcgagtaattagcaaagcaactccggccctacccacggtctccatctcatctagtgctgaagtctgagggctctgcagcatcagacccacctctaagagaactttctgaatttgcagccaatctcggggaagagaaagataggtttaatttatttgaagttttcatggtgttaatatttttgtttacctcgctagcttcagaattttgccaacctctgaatttgcacattttgtataatttttttttctttgagcagtgttgatcaagccaagttgaatatttgccatgaaattccagtgaatgtgtagctcaaatgcaaaccctaagtttgctgtcagttattgtatggtcagtaccccagtcctagtacacatattttaaaggttaaagtgaatgtttttgtaacatttaagcatatttcagatgtaaataaaagattgtaaaatatacggtttttaccaaatttaaaagatcctttttagttaatactatgacagtactaaaaatatatgaataacatttcagataccattatattaaaatatttgtgtatgtgtacaaaagcgttgataaatactaatctttaaagtttgtggagttcctttatttgtaatatatgtgctcttaaaagcaatgggatgtgaaattatgaaagtattttattgttcatagaaataaaaaacacagttactttgcaaaaaaaaaaaaaaaaaaca

SEQ ID NO: 222267 - DNA, 1000 bp, Homo Sapiens
tcttccaaaactgttttgaactgactccagctttcagtcagctcacagctcgcccccttcatttgcatataattccaacagaacctttcccaactactagaaagaatggagagagaccatctcatgaagtacaaataataaaaaatatgccccagatggcaaactttgtatacaacatgtacatgcatttgatacagactacacatcattatcatcagactttattacaactaccacctgctatggtagaagagggtgaggaagttcaaaatcaagaaacagaattggaaacagaagaagaggccatgactgttcaagctgacatcatacccagtccaacagacaccagctgccgtcaagaaactccagcctttcaaactgacaccacccccagtgagacaggagccacttccactccagaagccatccctgctttatctgagaccacccctactgtggtaggagctgtatctgcaccggcagaagctaacacacctcaggatgccacatctgccccagaagagaccaagtagccaaactgtagtccttctaaaggaggacatggcagtcaaaaagtctgagtaaagctgttttttgtattttatatttgcttctgccattttactgtcactaattaatgtttagttcttatatttgttaactgatttcggtgtcttgaatatatttttttaaattatgtgtatgaacaattctagtttcatttgttcaatcagaagagcaaataaccattcctttcatgttttgatcactgagtgtgtctgtaatcatacctacattaaaatcattttctatgaatatataatatatacttcacatttttagtgaacttctctaaagaagaggacagaatatactggacttaaccacgaatacccttgagtgtccaaattgggaaggaacttgtttcttctgttatactatcaaatgcttaaattctgtttccttttttcttaaaaaaaaaaaaaaaaaaaaaaaaaaa

SEQ ID NO: 222268 - DNA, 1000 bp, Homo Sapiens
atgagatcgccgtgtaggtgccgagggcgaggagatggaggcggcggcgtggctggaggggccgtgtctggctgctgcccgggtaggggatgcccagtgaatgtgcactgccgaggagaatgccagccagggcccgggagagtgtgaggtttcaggaaagtattgagattctgctttggagggtaaagtggggaagaaatcggattcccagaggtgaatcagctcctctcctacttgtgactagagggtggtggaggtaaggccttccagagcccatggcttcaggagagggtctctctccaggactgccaggctgctggaggacctgcccctacctgctgcatcgtcaggctcccacgctttgtccgtgatgcccccctaccccctcactctccccgtctccatggtcccgaccaggaagggaagccatcggtaccttctcaggtactttgtttctggatatcacgatgctgcgagttgcctaaccctccccctacctttatgagaggaattccttctccaggcccttgctgagattgtagagattgagtgctctggaccgcaaaagccaggctagtccttgtagggtgagcatggaattggaatgtgtcacagtggataagcttttagaggaactgaatccaaacattttctccagccggacattgaatgttgctacaaagggagccttgaagctttaacatggttcaggcccttggtgtgagagcccagggggaggacagcttgtctgctgctccaaatcacttagatctgattcctgttttgaaagtcctgccctgccttcctcctgcctgtagcccagcccatctaaatggaagctgggaattgcccctcacctcccctgtgtcctgtccagctgaagcttttgcagcactttacctctctgaaagccccagaggaccagagcccccagccttacctctcaacctgtcccctccactgggcagtggtggtcagtttttactgcaaaaaaaaaaaa

SEQ ID NO: 222269 - DNA, 1000 bp, Homo Sapiens
tccctgctccatggccagtccctccccagcccagcagtccctccaggctacatccaggagtaagctatggggaacaggttgggaggtggccagtgctcctgccagctgtgcacacatctctgtatcccgctagagttctgtgtttttgtatcatgttgtcagggacgctagctgggtcagggttaccccatagcaggcagggacaaggaccactcataatatgcccattggaccacagttaagatccagcctctctcacctcttcagggctgagtgcatgagtctgcacctccaggcaggctctgtgcagtactcaccccctccgtctgctccctccaaggtgtgggggtgggcagtgctcagggcctcctcggagccaaaggacagcatggtcggcacagaggaaggggtacctgggctgggtgcagggccatcccactgcccttgagctgtggctctggcaggaaggaggggcagcccatccctcttctccctcctggggattctggggaatgggatgcaacttaagacttctgcctgagaagcctcctccctgctgcctccagggggcaccaaggcacaagcctgtgcagtaggggcgggatgggggtgtggaagagcaggtccaggctcctagcacaactggcctggggccttggcacctctgtaggccctgcctgtgcctgtccgctggcctggggggcctgggcttatctgggccttctcactcagggactctcttgacgctgacttgcccccgcagcggtggccagtgctgcctctgctccaagctgcccctgcgctgggaggggtgggggcggtgccattggtctggtgcagcatagccctggccagtggcctcatccccagcaggcctcccgtgcctctgccagcaaggaggggccggccagctctgcttgcacagggggccccatgtggggtcagcgcacgctcatgtcactgagttccagccgcttttagagtaaagtcgtttatcatc

SEQ ID NO: 222270 - DNA, 1000 bp, Homo Sapiens
ccatcagaaacccccagaggcccaggagagagtgtggagagagccaggggaggacaagcggtgacgtccatggcggctgaggacaaggagcggcccttccgctgcacccagtgcgggcgctcctaccgccatgctggcagcctgctgaaccaccagaaggcccacaccacagggttgtacccgtgctccctctgtcccaaacttctccctaacctgctgtctcttaagaaccacagcaggacccacacggaccccaagcgccactgctgcagcatctgtggcaaggcctttcggacagctgcccggctggagggccacgggcgggtccatgcaccccgggaggggcctttcacctgcccccattgtccccgccacttccgccgccgaatcagcttcgtgcagcaccagcagcagcaccaggaggagtggacggtggccggctccggagccccagtggcaccagtgacgggcagaggggacttgccattgccccctccacccacccccacgaccccactcctggatccttcaccccagtggcctgcagacctcagcttctccctctgaacttcaagtctccaaagatcagaatctgggggagggagcgcgtgcagggaggggcttgatctccacattttctcaggagtagttcgggcatccccatatcttctcctctccccttgtgaagaggacccagatctggcttctttcccaaggagggggtggggtgttcctcgcgtccctgtccttgaaggacctccttcccccagcctcatcaccgtgctcttctcagcgccaccctcagcagccagattgcaacaccagggagaggcggatgcagagccccaccggtgggaaagttgcctgtggaagggagccttttgctacaatttgtaacttattttctaaagtctattttgtaacaatttatttaagtttaaaaaaaggaaaactgctgccccccaaaaaaagaaattttcaaaacaaaaaaaaaaaaaaa

SEQ ID NO: 222271 - DNA, 1000 bp, Homo Sapiens; identical to SEQ ID NO: 117049

SEQ ID NO: 222272 - DNA, 1000 bp, Homo Sapiens
gtgggaagagtaagggttggttcatcatcacaagaaataaaaaacatagtgattttttctcttaatgtgtagaggtggttttactggcaataattaataatagatttctatttcagtatgtaagcatattaactaaaatatgaattacacttccaaagttagatttctgcttcagtaggtttgtttgctgtgaagattacttctcaaaagacagatgttcatattagcttaattttcggtttaaatatgtttgtaaatgatgtaatatatttcttttgactaaatgtggaaaagtaatgtgtgttatacattgagaagtttttactggctttgactggaggttgtttttgcagagatggtattttatatgattccagtatttggaaaagaattagtcaaaaggaattcacatagtttaaatactgagaaattaatatccaaatatgtacttgtctgatttctaaataagctgggggaggagggaggggtgggaattgaaatgtgcaaatgagtagtgaatgctacactcattttcaactctttaacatgaaactgttcaatcttaacacattgttactttaatatatgtataaagaagtattactgtttgtaaagctgctgtttgcttaaaaaaaaaaaacacccttgtcatgtattttctgtatgttgggccaacaggttagaacatcaactcatttaaaaatttttatctttttttgatttaaaaaaattctgtgaaataatttatttacagacatcttcctcctccctcatcccttccaacctttacatacatcacagaatcaaccaaactgtttgcctaatctgaaatctgaatcctaatgagaaaaatttaaattttgttggcacatcacaccttgaaagtatttgtattattttataatttaatttctaaatataccacataagtttataatttaatgtcttaattgtaatgctctaataaaaaactagcaaaattagtgtgagttataacatg

SEQ ID NO: 222273 - DNA, 1000 bp, Homo Sapiens; identical to SEQ ID NO: 117050

SEQ ID NO: 222274 - DNA, 1000 bp, Homo Sapiens; identical to SEQ ID NO: 117051

SEQ ID NO: 222275 - DNA, 1000 bp, Homo Sapiens
ttacccagctgtcaaccgatattcttcctcctcactgtcctcacaagcttctgctgaagtaagcaatattacagggcaatcagaaagctctgatgaagtctttaacatgcagccaagtccatctacctcaagcttgagttctactcactcggcttcacctaatgtgacaagttctgctccatcgagtgccagagcttctcctttgttgtctgacaaacacaaacattcccgagaaaactcttgcctgtcaccaagagagagaccatgcagtgccatctatccaacacctgtggagccttcgcagaggatgctgtttaatcatattggagacggggccttgccacgcagtgacccaaatctctctgcacctgaaaaagctgtgaaccccacccctagcagctggagcctggacagtgggaaggaagccaagaacatgtcggatagtgggaaacttatctctccccctgtccctccaagacccacacagactgcttcaccagcaagacacacgacatcagtatccccctcgcctgccgggcgatctccattgaagggctctgtgcagtctttcaccccctctccagtggagtaccactcgccaggactcatctccaactcccctgtcttgtcgggcagctacagcagtgggatttcttctctcagccggtgcagcacgtcggaaacctcaggctttgaaaatcaggtgaatgaacagtcggcccccctgccggtgccagtgccggtgcccgtgccgagctacggcggggaggagccagtgcgcaaggagagcaagactccgcccccgtacagcgtctacgagcggactctgcggcgccccgtcccgctacctcacagcctctccatccccgtcacgtcggagccgcccgcgctgccccccaagcctctggcagcgcgatccagccacctggagaatggggcccggaggactgaccccggcccgcggcccaggcccctgccccgcaaggtctctcagttataa

SEQ ID NO: 222276 - DNA, 1000 bp, Homo Sapiens
tatgagaagtgcttctcaatttacccgagatttcattcgagattcaggtgttgtctcacttattgaaaccttgcttaattatccgtcctcccgagttagaacaagttttttggaaaatatgattcgcatggccccaccttatccgaatctaaacataattcagacatacatatgtaaagtgtgtgaggaaacccttgcttatagcgtggattccccggaacagctgtctggaataaggatgattagacatctcactactactactgactatcacacactggttgccaattatatgtctgggtttctctccttattagctacaggcaatgccaaaacaaggtttcatgttttgaaaatgctactgaatttgtctgaaaatcttttcatgacaaaagaactactcagtgctgaagcagtgtcagaatttataggcctctttaacagggaagagacaaatgacaatattcaaattgttcttgcaatatttgagaatattggcaacaatatcaaaaaagaaacagtgttctctgatgatgatttcaatattgagccgcttatttctgcattccacaaagttgagaaatttgctaaggaactgcaaggcaaaacagacaatcaaaatgaccctgaaggggaccaagaaaattagtaatggttaattgctggcctcagattgtccttatgttcctgagttatgatccttgagtaatgctttgattttaatagttggttctgtgttgcaacatatatctttagtgctgacactaactttgtccaactctgtctgtaagctggagcatttttctgatgccagctgaatattagagctgaaaacacatttgttgatatttgtcttgtccacattgtgatgttcagtatttgagcttatagtgaactgagcaatcataaataagccacccttctgattgtcgttctactgtatatatatatatatttgagtgttgtttgtgtttcaataaagtcctatgttaaagttggc

SEQ ID NO: 222277 - DNA, 1000 bp, Homo Sapiens
attgctgctgacgagatggtcatcgaatacgtgggtcagaacatccgtcagatggtggccgacatgcgggagaagcgctacgtgcaggagggcattggcagcagctacctgttccgggtggaccacgacaccatcatcgatgccaccaagtgtggcaacctggccagattcatcaaccactgctgcacgcctaactgctacgccaaggtcatcaccatcgagtcccagaagaagatcgtgatctactccaagcagcccattggcgtggacgaggagatcacctacgactacaagttcccactggaagacaacaagatcccgtgtctgtgtggcacagagagctgccggggctccctaaactgaggtggggcaggatgggtgcccacacccctatttattccccctggtgccctgagctcccagcacccccccagccttagtgggctcagcagggcccacatgcccccatctccaagcgtggggttgggggccccaagcccagcgagggagcctcagtccctggaggcagcttctgcctctcctgtcgcccctgcccaccaccccctgattgtttttctttgcggagaagaagctgtaaatgttttgtagcagccagcagctgtttcctgtggaaacctggggtgccggcctgtacagattctgtcctggggggctacacagtcctctcgctttgtgttaatggggacttccccttacgccctgcgtgtacccctccccagtttaggggtctctggggcagtggccatgttctccccctgggggggctctgcacccccagtcctggggactccgtgcctggaaccctgcctcatctgttcctgccagaccctgagggtcacccttccaccctggtgtcactccccggctcagccaggccaggatggcggggtgggtcccttttgctgggctggactgtacatatgttaatagcgcaaacccgacgccacatttttataattgtgattaaactttattgtac

SEQ ID NO: 222278 - DNA, 1000 bp, Homo Sapiens
tgaccgaggcctacaagtgcctggccaaggccaaggccaagagccccctggaccaggagaccaggctggcgcagctgcagagcaggatggcactggtgaagaggttcatccaggcccgcaggacgtacacagaggaccccaaggagtccatcaagcagtgtgagctgctcctggaggaaccagacctggacagcaccatccgcatcggggacgtctatggcttcctggtggagcactacgtgcggaaggaggaataccagacggcctacagattcctggaggagatgcggcggcggcttcccttggccaacatgtcctactacgtgagcccgcaggccgtggacgccgtgcaccgggggctgggtctcccactgccacgcaccgtccccgagcaggtccgccacaacagcatggaggacgccagggagctggacgaggaggtggtggaagaggcagatgacgacccctgaggggcctgggccccaggaccagcgtgctgctgcagaaaggcatcttctggaatttttttgtcagctgtggcaaagccagcatttttgctgggaaaaaacatgtctgtgttggaatacgcgacagagctgggcgagaacgcagcggcccgggccggcggagggtgtgacccgtctgcaccttgctctgtcccacctgcctctgggtgcccggcagctccactagatttttggattcattcctttgaagggagtcgggttcacccttccatcgtattctcccaactacacattgtaaagcctgagaaacttctagaacctcaggaagctgcagctggagggctggggcacctgcccccctgctccccacacatcatatcctccccatactcctgcagggcccacggctcctgagcaacagctgggacacccgggccttggcggctgcaccccctgctaggctctgcccaccggccaccaacactcctgtaattccaataaagcagtttattttctgaaaaaaaaaaaaaaaa

SEQ ID NO: 222279 - DNA, 1000 bp, Homo Sapiens
ctgacgccccccagatcctgctgagtggcactgctcattttgcccgcccagctgtggactttgagggaaccaacggcgtccctttgttccctgatcttcaaatcacctgctccatttctcaccaggtggaggccaaaaaggatgagagttggcagggcacagtgacagacacacgcatgtcggatgagattgtgcacaacctggatggctgtgaaatttctctggtgggggatgacctggatcccgagcgggaaagcctgctcctggacacaacctctctgcagcagcgggggctggagctcaccaacacatctgcctacctcactattgctggggtggagagcatcactgtgtatgaagagatcctgaggcaggctcgttatcggctgcgacacggagctgccctctacaccaggaagttccggctttcctgctcggaaatgaatggccgttactccagcaatgaattcatcgtggaggtcaatgtcctgcacagcatgaaccgggttgcccaccccagccacgtgctcagctcccagcagttcctgcaccgtggtcaccagcccccgcctgagatggctggacacagcctagccagctcccacagaaactccatgatacccagcgccgcaaccctcatcattgtggtgtgcgtgggcttcctggtgctcatggtcgtcctgggcctggtgcgcatccattcccttcaccgccgcgtctcaggggccggcgggcctccaggggcctccagtgaccccaaggacccagacctcttctgggatgactcagctctcaccatcattgtgaaccccatggagtcctaccagaatcggcagtcctgtgtgacgggggctgttgggggccagcaggaggatgaggacagcagtgactcggaggtggccgattcccccagcagcgacgagagacgcatcatcgagacccccccacaccgctactaaggcctacacctctccccacgcagagggggaattctgccctg

SEQ ID NO: 222280 - DNA, 1000 bp, Homo Sapiens
gacttctgctcccaaatacatatgaccatatgtaaataccaccttgcatttcattgttcttcacaagtgctttgtgcccctttaattaaaaacacatgaaatgaataacaaaacaagacccaaatagagtttattttattctcagagtttggactacaattttctaagatgtttctggttcaagactgtcattttctatttcaaccgaaaagtaagcatttaacccggtgaataaatgtagatcctgccattcattggtattttaaagaaccacttgaaatcggatcattttatttaaaaataaaaaatgttaatgccagttggcctactataaaaagccaggaccatgttagaattaggaaaagtaaccagcattactgcacctcttgttagactctgtgcattaataaaacacacctagagtctgttgtcatttcactaataggataagacaaattttttgctttgaaaaaatttttctgcatgcccaggtgtctgtctctggctgaggttttgtctattttacagtgtttcaatccagccataaaaattaacttgtgattttttttttcccaaagtcatgcttttccttaattatatttttattttattattttagtgtcttgagaaaaataccaagagatataatgtttcttttaattgtctatgcttaatcatctttaaacactttttaaatttctaaccacaagacctctctataatggtaaatgtaagacatcaccattttatcactcaaagtatgttattgaaagtttctatttggttgataaaaggaacaattttttcccacttttgatgcctgtgatgcaattttttattgcctacaatgagatacacttagtacaaaaaatgaaaatctggtatttcaaaattgcatttcttgtataataggtcagatttattaactactcatactttttctttacactaatcgatacatttagaaaaaattttctaagttagagacaagtttaaaagt

SEQ ID NO: 222281 - DNA, 1000 bp, Homo Sapiens; identical to SEQ ID NO: 117055

SEQ ID NO: 222282 - DNA, 1000 bp, Homo Sapiens
gtctggggagcacccacaggctgcctttggggtcccagagcctgctctgtgcactgaccccagttcctccatcctgtggccagcctagggctcatggcatgggcccccactgggggagggaggcatcttgtttcttgtggttccctgcaggccagtcctgtcctcctttccctgttctgcccactctggggaatagggaggggaggagaggagaggagagggaggatcctggaggactgggaagatctagcctaaagaggcttctctgagggccagggccctacagcatgcccctacggccaggggactgtctgccagcctcccaggcccatgccctcctggtgcccctggcactgaggcacagatcgtcaaggcaggtaccccctcaacccttcttccactggagcccctgacaccacaggtgccctggagcccttgtgtgactcagcctctgttagctgggtgggtgtcatcagcccctgcctcccaggccagaacctgagaacgggcccagggtgctgtggagatcaacttcaaaagagctaaccccttcccacactccacccacccacctacatttcctctgtgaaatctacctcagagttgtaccctcagaaggacgggtaagcaggaggccagggggtccccagggctgaggtggggagccttctacggcgaaagcctgccaccccacaatgaatccaccctgctccactgcgcgcctctcccaggtctcagctctgggtggggagcagtggccgctaccgacagcgcatgtcccgctcttatccaactcttccaggccccacctccctgcacccctcccctctatagagcaggggagtgaaggggtatgtcaggcggggaaggggccaaggacacgtcattgtaccctgagcgtccccagggagtggaaatggggaagggggcctggagaggggaggcaggggcccctgtgctctctgaacaagttgaaagtccaaataaaacttacctgttc

SEQ ID NO: 222283 - DNA, 1000 bp, Homo Sapiens
tgagctgctctgtctcgtcagggcaaccaaggagaagagggaggagtcacgccctgaagcgtacgaccttacactttctcagtacaagcaactgttatccattgagtccagacagttgggaagtgcctgtaggaaaatggcgatggctgagaaaagcccggaggagatgctcctagctatgacttccagctttcaagtgctctgttgcctaacagaagcttgcatgcgattagttaaagtcgtgaactcagaaacacagcggcaggaaattgtagggaagatcgatgaagtggtcataaattacatttgtctactgaaagctgccgaagcagccactggaaagaaccctggggaccctaatgttggactctcggcgcgacactcaaccaccatggccgctctcgtaagcacactgacacgttctctcaagaggcttttaaacaaataaatatggaagtcacgtcataatctacctttgcaaagccatacatgaacttttatttactttgtgtgtatgatgaacagatgtctcctttcttctctctgtatattttgttattttatataaaataggagataaaagtcacactgatgaaatgttgaaatgtactaatcagatgtattctgtttatattatacatatatatacacgtaaaagaaatatccaagaaagtgatgacatttggctatttttcatatagttaaaactccaggtatatgatgtgaaattttaaattctaccatgttagagcaaaacaatgaatcctatcccctttctttccaagtagctacttggaaaccatatcattcatatttagaagtaaaacacaaaacaaaaaagagagagaaaagaaaagaaatcacaatgtatataaaacagtacttatgttttaaaattatgatttttaagcattggaaatagcaaaaagacatttaaaattcaagaagctattatgaattactagagaatatatctgtaataaattaattttttgctcat

SEQ ID NO: 222284 - DNA, 1000 bp, Homo Sapiens
aaagtaaaagtcaaaccaaacttcctcaagctgcatgcttttcacaaaatccagaaagcatttaagaattgaactaggggctggaagaagtgaaagggaagcatctaaaaatgaaaggtgagtaaccagatagcaaaagaaaagggaaagccatccaaatttgaaagctgttgatagaaattgagattcttgctgtcttttgtgcctctacaagctactactcattccagaattcctgggtcttccaagaggattcttaaggtaccagagatttgctagggaaccaaaagtgcttgagaatctgcctgagggcttgcatagctttcacattaaaaaaagaaaaagctagcagatttactcctttttaggggatcatatcaagaaagttagtctggttggaaaccaagagaatggctgatgtctctttcttggaatatgtgaaataaatttagcagtttaactaaatacaaatatatgcattgtgtaatccactcagaattaaacagacaaaaggtatgcttgctttggaatgattttaggcattgtacaaccttgaatcacttgagcatgtaataactaataaataatgcagatccatgtgattattaaaatgactgtagctgagagctctaattttcctgtcttgaaactgtataagaactcatgtgattaagttcacagtttattgtttgtctgtttagtattttagaaatataccagcactactaattaactaatgtcttttatttattatattatgataaagtaaaaatttcacttgcattaagtctaaactgagaaggtaattactgggaggagaatgagcagctttgactttgacaggcggtttgtgcaggaaagcacagtgccgtgttgtttacagcttttctagagcagctgtgcgaccagggtagagagtgttgaaattcaataccaaatacagtaaaaacaaatgtaaataaaagaaaacacatcatcaataaaactgttattatgcgtg

SEQ ID NO: 222285 - DNA, 1000 bp, Homo Sapiens
agtgggacagcgctcccacaggggctgggggtgggggtggggtttcttagttactgttggaaagggaaaaattcaccatatccaaggggagagacgatgggctgggtttgtttactccaacttcccttctacacccctcctgcaggacagtacgatttggggagaacccagctccccactttatctgcagactctgggacctgacaaaacagtcagagcctgagtgcactgcagcctgaactcccttgagcagcgctataagggactttgcactttaaaaaggggatgcctgtcagtaaatcccctgtgcattgactagaactggggggctgcgcccgctccctccttaatcctagatgatttgctcatgaaatagaggtgggggacgaccgcatgcactctgggaggtgcagccctaaggggtggactccagatctccctgcaagagacagcttggcttggctttggctgttggggaggagtccctgccatcccggtgagcctggggctgttgcttagggtcttctgggtggacacgtggagaaagagaaggcaaacgttggaacactaggaaaagctagaaattcagacaacacacatggatccccttaaaacatgtaaatgtgtcagaacacggttgacctgccgccttcttgaacctggtggcccccgttggaactatcagtggcgtctcccatgcacacgccctctgctttctctttcctagactcgcggtgctcacatccagacattaccttgttggtagcccccaagtggcgtgcagtgacaccagtatcttctctgttgcatttttgcaatcttgtgtcccgctcggtgatgttctacaaactctgttttaaggttgagaaagtttcaagggtgaagatctcaaaacagtgctaaaatcaaaggtgtttgctgtgaagaaaaacatgtgtatatattgcaccttgagttgtcagaaggtagaaactgaaataaactaactttaaaaaaaaaa

SEQ ID NO: 222286 - DNA, 1000 bp, Homo Sapiens
atttttaaaaagttggcaaacgctgaaacgcactgtggtatgaagcgcattgcatttccatagcactgaagtaccagtttccattcctgggctgagattgtttttcccgtggttgtattgttctgatttcacgtacaccagagtaactgatttttttttgtttgttttcttgtggagttaacaccaaataaaaattgtaaaaaacagtttgttgtttttatttctcatagcaaagcttcttttgtaaagaactccagcttccttttactcatgagcatccgtggaagagcaagtgcccaggttacatttgttctagatggaggtcatttagctctcattgcagacactgctgaaaacattgtgcagctttgctagggaagaaagtggtgtggcctgctgagaaatcagcggctcctccccatctcacccccagcacacgcagggactactacctgagtctgcaaaacacatagcatttttgtccgtggatggtacacaaagctcaatctttttgttttcttctggggaaaaaattaaatctttatatgttaatatgattgatattcattgtgcaaaaaaaatcagtgtgtttttaaagaagtataagggaaaaggaaaactcatatgtccttctgtcactctgagacatacactggtaacatctgtgcaagcccctttccaggattctgaatgtacagtatatatgaatgcatacacagagaaatttacattcaagagtgtactatacttgttcttctataacatcagaaataggtttttactcagatgtcttcatgtcggtaattatagaactacataattatttttatagctgtattatgtagatttaacaggttcctcattgataaaacaatgtttttttggttgtttattcagtatctgaataacgtttctatggacatctgtaaacatgtatgaggggacttttaaaagttcatggaaaatggaattaaaagaaaaataaaaaaatataaacttt

SEQ ID NO: 222287 - DNA, 1000 bp, Homo Sapiens
tagaggaacagacactgtttacgtccctcccactgctaaccttatatatctctatagacaaatgtgataatgacatgatttcccacctgccctccaagaaaatggtgactcactctcaagtcagctactgtagagagggttctaattggttctgcaatttgctcttaaactctagcagggaactctcctcttaccacatcagcatgtaaggtgaataataactctggttttgccagacagcaggttgtctgaccttcaaccactgggcaattgcctggcagatgcacacagtagctccctggcttctggctctgagtgttcctctcagcacctctgagtaagctgctgccaagcacatatccctatgacaacactttgtaaaagccgcggggcccccatacagcgagtgaccttgcaactgtgcagggttgccattggtcactttctcaccttgggaaggtgtcagtgttttcagttctaaggtaagaggtgtagagctgttcccaccagggctctgggacagactggaaaggaccacagacctggccatccctgggcagcagggccagtgtcacctgctgacctctagtatttcctttgccctagagctagagtcatgatagctgagggtcactcgccctgcaagagtcactaggcacccaccatgccaataaggctctccgctggctccctgcagttggctgggtgtttaatagtcactgaaaactcccagccctgctgcacactagaggcaggtcctctcggtcctctccatcctgtgcttctgtggcccccagcaagctcaccgcctccttggaggagagagacatacaaggacagtgggtcatgggtagtaccagcctcaaattcccacaggctcatactcagacaattgtattactgccttatgttttttaagtgtttttttaaattcttcatagttgagtattatttgcaattttattagttacagtgctattaaagaatatgtgctcctttt

SEQ ID NO: 222288 - DNA, 1000 bp, Homo Sapiens
ggcgctgtggcgcatcagtccccccagccgtgcccagatgaagcgggagctctacaacggcacggccgacatcaccctgcgcttcacctggaacttccagagggacctggcgaagggaggcactgtggagtatgccaacgagaagcacatgctggccctggcccccaacagcactgcacggcggcagctggccagcctgctcgagggcacctcggaccagtctgtggtcatccccaatctcttccccaagtacatccgtgcccccaacgggcccgaagccaaccctgtgaagcagctgcagcccaatgaggaggccgactacctcggcgtgcgtatccagctgcggagggagcagggtgcgggggccaccggcttcctcgaatggtgggtcatcgagctgcaggagtgccggaccgactgcaacctgctgcccatggtcattttcagtgacaaggtcagcccaccgagcctcggcttcctggctggctacggcatcatggggctgtacgtgtccatcgtgctggtcatcggcaagttcgtgcgcggattcttcagcgagatctcgcactccattatgttcgaggagctgccgtgcgtggaccgcatcctcaagctctgccaggacatcttcctggtgcgggagactcgggagctggagctggaggaggagttgtacgccaagctcatcttcctctaccgctcaccggagaccatgatcaagtggactcgtgagaaggagtaggagctgctgctggcgcccgagagggaaggagccggcctgctgggcagcgtggccacaaggggcggcactcctcaggccgggggagccactgccccgtccaaggccgccagctgtgatgcatcctcccggcctgcctgagccctgatgctgctgtcagagaaggacactgcgtccccacggcctgcgtggcgctgccgtcccccacgtgtactgtagagttttttttttaattaaaaaatgttttatttatacaaatgg

SEQ ID NO: 222289 - DNA, 1000 bp, Homo Sapiens; identical to SEQ ID NO: 117061

SEQ ID NO: 222290 - DNA, 1000 bp, Homo Sapiens
atctgaccactatactgtcctttttttgtattctgggtaatgttttttggaaaagatttgtcttttctaagtggaagttaaatttgttatactgcccatcccctaaagccaacagagatttgtagatttaaagggatcacatttgaagacaatagtgtttaagaaagcaagcaagtcccttagcagtcaggtcataacagggcacatttctgaccgaaccctctcaaggcagaggaggagtttggtgggtttcatacaccctgcagattcctgttggctctaaccctcaattacctaatcttatgctttaacacataactgcattggatgtgagagtaacgtaccgtatggtcattgttctatatattaacattgaacactgctgcgattgctcaaggacattttatgttacggctttaaagcaaaggcatgattattagaaactatttaagcttttttctttgaaaaacaagcttcttttacagaatataaacaacagtagtgcctgtggtttagcccaccaatcttgatgactaaaagtagctgatgcattgtgcatatgatgcttgagatggtttttgcaaaagcagaaatcgctgcaaggtaatcacaatagataaaagtggtattttaaacctttgaaataaatggatgtaactgtaccttggtacagcttttcacttgtttagtttttaaacgttagtataatctgaataaataaaatgttgccaaattcaatgtagaaagaatgtgacaacacaccttgggtagttctgcttgtgtttttgcatattgtaaaagcagtgtcacagctaaaaagaaagaaatcgtttctaacagtaaattattgtgctttagttgctagtttgtactgagagttgacctctccctgtgcagttttttgttctaaacttgtataaataacaattgtgtaatgtgtctccctcctacattgtaacaattgcttcagcctacgttataaataaagaaccactagatt

SEQ ID NO: 222291 - DNA, 1000 bp, Homo Sapiens; identical to SEQ ID NO: 117064

SEQ ID NO: 222292 - DNA, 1000 bp, Homo Sapiens; identical to SEQ ID NO: 117067

SEQ ID NO: 222293 - DNA, 1000 bp, Homo Sapiens
cgtccgagttgacctctgaatgtatgtgatgagaggcagagctggatattgcatttctaaggcttgcattgctttcccctcgcccgcggttcttggcgcatggaagaggcggtccagccatctgatgttgatcctgtctcagtctccccactgcctgtcaggatgagttagtcattgtttttctccgaggcggcctgcttgccacagccctgctccccaaggcctggtggctttgccgaagctctgggaccgcagccccagcgaggcccccaacctcacccagacgaggccaggagccccgccaccctccacgggatgtgcaccctcagaccccattctctctgttcgtccttccttgaccagtctgtaaaccttcactgtttggggatcgtcctgtccatccatgtaaatgtaaatgttggccgagtcggtatttattctgattgatttttattttattctattattttctccgagggatgagggtggggggtgtgggaagggtaccacagatcaggccggggcagctgtaggggcgggggcccagacagccaggccgccaccagagcagccccatggggtgccccagacgcgggcctccaagaagccaagtcccagtctgttttctggcatcagacaccggcccgtgttccttgtcagacagacagactctcaggcctgcctggggagtcgtgtccctcagctgcagggcactgtgttgggaaaccattggctgggcctttgaggacacagatcagaagaaagaaagacaactttcctctgcgcggaacactcacacggaagggctggccgcctccctgagccggctgggagtggacgacaggacctacctccccagagcaagggcctggggcttcccgccaaagctgccgcggaaccccgctagtgcgaccaccctccctccgtcggtatgtcctgctttccagctgaacccaaactacaagtgggtttaaaaaaaataaacaccaccaccaaaaac

SEQ ID NO: 222294 - DNA, 1000 bp, Homo Sapiens; identical to SEQ ID NO: 117069

SEQ ID NO: 222295 - DNA, 1000 bp, Homo Sapiens; identical to SEQ ID NO: 117070

SEQ ID NO: 222296 - DNA, 1000 bp, Homo Sapiens
tgcagccgggaatgagagacatctttaaggagctctataatgactatctcaagtaccacaaggccaaacatgaaggagagaaaagatatacggcctaaggctatgggacagaagtgccgccagtgacactgtccagaggctttggctgcatggtctgaaagagctggagaatgaaagacttaagatgttctaattcgtagtattggtatacatagaaaatcctttggggtttatgtagtatattttgatgtattttacatcgtgtttttcttactattttttaatacatagttttatgcagtaagtattgcaatagaatcctgaaaattgaccctgggatgagattaattcaatagaaaaattgctgactcttgggacctttctgtgtttggttctcgtcttggctcagtggtttggtgttccctcgtctgcactggaaactacataaaacttggctttttactttgggtacatgggcgtataattcagccctgtttaaatatacttgcctttcaaattcttcaagtaacatgggaagtattcttgaaatgtcacattttctgccttccctctaagtatgctttctgaagaagtcagggaaagttagagtctgtggcctgaggtgtctgctctgggtggcgatagtgggcacctcaggcaggtcggtgacgtttagcacaggtgccagggctcctgcctgctcctcctgtgttagctctgtgaagttcatttaggaatttttttttcctatgcagtttaagaaataatcctaattgttttttcttattacctaagcaatatatttttattatagcaacctcagaaaagaaaaataaaaggataatttaaaaaactcattcatagtctcagttacccagataacctcggttgtcaccttggagtatcttgttgtagtccctttactatgtgtatgtatatagatgtgcatataaatatatatagtagctaaattggatcataaatgcatttttttaaagtt

SEQ ID NO: 222297 - DNA, 1000 bp, Homo Sapiens
gtgccagtaggtgtaccttgtgttcactcgaactaagaacaatggttaaggcagaataatgactaaaatatgttcatatattatgatgtggaaataattgataacttttaagccatactatgtttttaaagataatttgcacaaacacgtttgtgtctgttctgtccaatatagatttggcaattatttaaagagggataatcttgaaaaaaattaaccaaggtgatttcttatatgtagatgctcgattttggaatttgaaatagtagatgcacctctttaccttttttacttggataaaaacctatgatgattttgtcctgtgtgtaaatgttatttatttagcatagacattaaagataactctctggaaaatgacttgactaaggctctcatgaaattcaaagtgccatttagaacatgcaccaaattgtcaagtaaatctgtctaaatttatattttaaattattacaaattacacatctttgaggaaagagtattatgaacaatagaacatattctctaggttgtagaggaaggaataagcagacagaatcaaccactaaaggtagtttttcagattggttgttagaatgtcatgtttagatgttggagcagattagagcagcattcatgccactcggagcaaccagacttacagcataagtatgtacgaggaatttcaaatcatcagatgtttgcttggctaggttctactttgtttatttgatatcaaataggtttgtagatgtttatggcatttctaattgtaagtagagacaaaatattcatatagtcagatatatgttgtctgctttaaacaatttttaaattttaaaaatgcattaacgtctttttatatccatcaagggaaggatgaaatgttgaatttgaagactaattcagtaagaagtcctaggggtttaactgtacatactacctgaactggcttttctgagagatgaatcaataatgaaacatgtctgttttaaaaactacc

SEQ ID NO: 222298 - DNA, 1000 bp, Homo Sapiens
tttggagggttttctggagggcagcaggaaggctggggaattccccatgtacagtatttatgtttctttttagatgtgtaccttcccaagcacttatttatgcagtgacctggtcacctggggtgggggtgatttgaggaaatgacatgaggaaaagaaacctattcctgccctggggaccaccctgggactctaaccaagccttcctggagggacccatgcgcccctgagccccattccattcatacagacacacacgtacgcacactgcatgtccaaggccctaaacattgcccgttgacataaactttccagggccccagcctgatggggctgccctcagtcctctagatcaagatgctgactattagggggcagtgattgccatctggggacctgtcaggctttgtcatttcccagtttgttggtggtgcctttagtggttccctaatttgggaacactgatggggccttggacagggctttctctcaggtaggagaaatgggcccatgatctcctcacagtcgcccccagtccttggccctgcttccctgtgtctcatgcactggcacatatggtcaccttggagggcagacctaggagcccctctgaccactgaatccgtctccacaccccttctgccaagggaagccccttcaggaaggaccccccaaagctgaggggctgaatgtagccttttcaacagagaaggctcccacttgagagcagcctctacctgaccccctggaccacagagagccactctgaccctcagccccctcgcttcttcagctaaaactccaaaggtttggtttcagatggggtttgttttgttctgtttggttttggttttgtttggggtgggtgggtcattgcggtcttagattatgtttctcttgctaccaaacagtcatgtattaactctctttggatgatgaagtttaaagagtcaataaatagaaacaccagatgactgcaaaaaaaaaaaaaaaaaaaaaa

SEQ ID NO: 222299 - DNA, 1000 bp, Homo Sapiens
tttaagttgggatgcttattgttgactcaagttctttccatattctgcatgaaaaacatacatgtaatatatagaattctttgtctccatttgtgacaaatattgtgaatattttcatgtttggtttgcctgttcattttcttaatggtgtcttttgaatattttttattaagccaccactcctggccaactgtagttgaactcaggtattggaagggcttccgttttgttcttttcccattttttttttttgacttctagatcctttgcattttcgtataaaatttgaagtcaacttctatcaacttcaggccaggcccgtggctcatgcctgtataatcccagcactttgggaggccgaggcgggcggatcgcttgaggtcaggagttcaagaccagcctggccggggtggtgaaaccccatctctactaaaaatgcggaagagttagccaggcgtggtggcaggcgcctgtagaatcccagctgctcgggaggctgaggcaggagaattgcttgagcctgggaggtggaggtttcagtgagctgggatcgtggcattgcactctagcctgggcaaccaagagtgaaactgtctcaaaaaacaacttttatcaatgtctgcaaaaagaaagtcttctgggatttatagatcaatttagggagaaatgacattttaacaattctgagttttccaattgttgaacatggtgtactgccccatttatttagatctgttaatttctctcagtttgcagctctcacattttgttaaattcatgtatttaatatttctgcatgctattgcaagtggtaaggttttcaaaaagctgttttctagttattgctagtatatagaaatgcattagacttgtacattgatcttgtatcaagcaacttagatcagttaacttattctagtagcttttttctagattctttagcattttctatgtagataatcatgtcatctgtgaataaagtattttacttttccaattt

SEQ ID NO: 222300 - DNA, 1000 bp, Homo Sapiens
gagaaatactcactacgccaaatcgttacactacaccctcaaaagctagaaaccagtgcctgaaagaaactccaattaaaataccagtaaattcaacaggaacagacaagttaatgacaggtgtcattagccctgagaggcggtgccgctcagtggaattggatctcaaccaagcacatatggaggagactccaaaaagaaagggagccaaagtgtttgggagccttgaaagggggttggataaggttatcactgtgctcaccaggagcaaaaggaagggttctgccagagacgggcccagaagactaaagcttcactataatgtgactacaactagattagtgaatccagatcaactgttgaatgaaataatgtctattcttccaaagaagcatgttgactttgtacaaaagggttatacactgaagtgtcaaacacagtcagattttgggaaagtgacaatgcaatttgaattagaagtgtgccagcttcaaaaacccgatgtggtgggtatcaggaggcagcggcttaagggcgatgcctgggtttacaaaagattagtggaagacatcctatctagctgcaaggtataattgatggattcttccatcctgccggatgagtgtgggtgtgatacagcctacataaagactgttatgatcgctttgattttaaagttcattggaactaccaacttgtttctaaagagctatcttaagaccaatatctctttgtttttaaacaaaagatattattttgtgtatgaatctaaatcaagcccatctgtcattatgttactgtcttttttaatcatgtggttttgtatattaataattgttgactttcttagattcacttccatatgtgaatgtaagctcttaactatgtctctttgtaatgtgtaatttctttctgaaataaaaccatttgtgaatataaaaaaaaaaaaaaaaaaaaaaaaaaaaaaaaaaaaaaaaaaaaaaaaaaaaaaaaaaaaaaa

SEQ ID NO: 222301 - DNA, 1000 bp, Homo Sapiens
attatgattcctctgtactttcctttcgctattcatcaatttcccattttttttttcagcttaagtaaccacacaattttaggcctcaatttttttttttttctgtgaaggaacttgaagtgatgcatgtgtgaatttaagataccgaagtcttaaagtgacctggacgtgaaggaaaaagtaagatgagaaataaagaaagcctttgtaaggtggttttaaaagccttatatgcaaaccttttaatctgtgtttctgcaagtgccatccttgtacagtgttaagagggtaacatgggttacctttgcaccagcttcagtgttaagctcaccctgttctttgaagcacccatgtcagtattagaagaataggcagcagttccttagtttacatatgtttgtgcaattattttctgtacttttttgttcattaattttgtcagtattacaccaaactgtttttgcaacaaaaaaattttttttgcattcatttaattttaggtcaaataacattttatttatgtggctcattttatatttcctaattttatttatttcatactgtagtgtacagtattatagttcttcaatatatagatatattttagtaaaaaaggaacatgacgttgatcatttgggcaaattttacgtaaagagaagagcatttattgtgttttggaacattaattgtgagatgggatttttcaattttattattttatttttgtttttttccaattactggaaattccaaatttgggaacttttgatacgatcttgtgaaaacactgtattttcgactgaaaattccactttcttcatcttgttttttagctaaaaagagggactgttaaatacaatgtatgataccatgacaaaaatctttcctgaattgtctttgtaaaagtattattgaattttcaatttgtaatttcttttgaaaatgaccatgctcgaataaaaatgtagccaaactaaaaaaaaaaaaaaaaaaaaaaaaa

SEQ ID NO: 222302 - DNA, 1000 bp, Homo Sapiens
gttccttgttgcatgggacacagtgcaaatgcttgataagcacatgtggctagtggctgctatattggacagcatgggccacctgtttctaacttgagcatcagtcctagctatgcctgaattatttgaccagctgtcaaagagaaacaaggaaatgatagctttgttaatctagcctctttctttgtcccacatatacattctacccctttgaataaaaaagttcaatgacgccgggcgtggaggctcatgcctgtaatcccagcactttgggaggccaaggtgggcggatcacgaggtcaggagttcgagggcagcctgaccaacatagtgaaaccccatctctactaaaaatacaaaaattagctgggcgtggtggtgtacccctgtaatcccagctactcgggaggctgagacaggagaatcacttgagcccaggaggcggaggctgcagtgagctgagatcacgccattgcactcaagcctggcgacagagcgagactccgtctcaaaaaaaaaagttaaatgacttgagtacccaaaagaaatgtcgtgaacatgaaagtacttctcatgtgtccttgagaaatgatgttgctagtgcagtgtttcacaattcattttctactaaatgtgtaccattttttaaattgttttaacagaaatatagagtgtgtttcttaggaaatagaatgttatgctttggggctcctgaaacacctcgttttgaaggtgaatctttggttttctcccagaagagggtctgccttgagatgattggagctcttaccatcaaaatcagttattcaagtgcttgcccagtgcttcttgaaactcacctctactctgtattttctacagttggttcttgtgttataaatgttgtgagcaacagattaaatgatgctgaggaatgaaaaaagattctcattataaatgcttacctaggattctcattatagatgcttatctaggttttcataaatgggaatgtaacaat

SEQ ID NO: 222303 - DNA, 1000 bp, Homo Sapiens
ggaccccagagagggcaggcagccacgccctgcactgtggagaagtgacctggtcctaagctgtgcagggcgtgcgggggaactgccctgtggatgcagccaccacctcacaaagccatgaattcccaaagcatcactgaacttgcccagccgggacactggagactgaagaagttccccggagcaggactgcctttgaaggggccttggggctggggtgggagtctggaattgttttcaaagtgatggtcagaccctccaggcttcggggaaatgtgggtttgctggtctctctgtcgccttcccccacctctcctggacctagcaggccctcagtcctagctgtcttacctgcgctcagcttggagtcaggcctcaggtggagagccgcatgtcactgtcagagatgagcccacccccacccttccctgggggcgattagctgctgagtcacccacccagccttggagctggatgcctgtgcagcagaacagaggcaacggtggcaggcaggtggaggctgcgcacagcttctcccggtcatggcacacacctgtgcccagacgccaatgcctcctaagccaggagctgggttatgcaccgccatggcccacattaacgctccaccacaagcccagcctagtcagagccctcattgccccatccctgagtgggcaggagcctggcctggggagggcttgggcctgtgaggattctccccgaaggtgccctcggaggcagcaggtttgaggccctggggggcccgttccccagaagctgccagtgctttcagatgcattgactcttcccgcctcccctccctcagaaaggtagtgcccacactatttttaaaatgttattttatgcaatacactgttcctagtgagcagggctctggccctgaggagtctttgcaatgtattgaaggaattgctgccgtgtgagttttgaatgattttgcagtaaagacctgatctttctcatcaaaaaaaaaaaaaaa

SEQ ID NO: 222304 - DNA, 1000 bp, Homo Sapiens
ttcccatggctgcagtccactggtgggacaagagcaaagcccactgccagtaagaaggccaaagggcccttccatcctagccctctgcaggcatgcccttccttcccttgggcaggaaagccagcagccccagactgcccaaaaacttgcccaccagaccaagggcagtgccccaaggcccctgtctggaggaaatggcctagctatttgatgagaagaccaaaccccacatcctcctttcccctctctctagaatcatctcgcaccaccagttacacttgaattaagatctgcgctcaaatctcctcccacctctctccctgcttttgccttgctctgttcctctttggtcccaagagcagcagccgcagcctcctcgtgatcctccctagcataaatttcccaaacagtccacaggtcccatgcccactttgcgtctgcactgtgatcgtgacaaatcttccctcctcaccagctagtctggggtttcctctccctgccccaggccagaactgccttcttcatttccacccacgctcccagcctcttagctgaaagcacaaatggtgaaatcagtagtctcgctccatctctaatagactaaacctaaatgcctctaggacggactgttgctatccaagcgtttggtgttaccttctcctgggaggtcctgctgcaactcaagttccacaggatggtcaagctgtcagacatccaagtttacatcattgtaattattactggtatttacaatttgcaagagttttgggttagttttttttttttttttgctttgtttttggacaaaagagtctaacattttttgccaaacagatatatatttaatgaaaagaagagatacataaatgtgtgaatttccagtttttttttaattattttaatcccaaacatcttcctgaaaataacattcccttaaacatgctgtggaataaaatggattgtgatgaaaaaaaaaaaaaaaaaaaaaaaaaaaaaaaaa

SEQ ID NO: 222305 - DNA, 1000 bp, Homo Sapiens
agatcatatttttgtctgtattcactttattatttgaacatgtccaaattaggacaaagcatttctgttagctgcttctcagtgtgactgacaacccaaaacatatatacagattgttggcatttgcaaaaggaagcatcaatagtggacccagaggcagtgcataaaaccttaggatagattcctaagggacatgcccaacagagttttaaaatggatgttttcatgatgacaacagaatcatagatttagatttttcaccttgtaagtttggatcaaattttgctggttctttggataatggagttcttgtgttaacaaattacgtgctatatgattttttgttacattgttacaagtgttaatgacattttcattaatggatgaaaacttcagggcttcttttctgtatataacaaattaagtctgtacatatttttgtaccttttatgtaaattttgcacagaaatttttggcataagtttattttctttcagtttagttcagtgcatgcactaataaaactggttgtttaatttaaaaggaatatataagactttacccatgttattttcttggtttttatttcagatgtagattttgtttttgaggtaaattcgttcttcagggattgaacactattgttagcaagtgcctaaaaaagatgtgaaacagtttacatatgtcaactgtaacagtaggtcccaaatgggcccattcccctaatagttttatttttaaagaaagccatacatagaatgcttcaagctatcttgctatgcacattatacttgtactgttttgtgcagtttgtctactttcttagtgaagtattttttgtataaaatgttacaattgtgtttcttaaattgagcctaagaatggagttaattggaaatatacagtatatattaataatgtacatggtgtttaaagaatggtaagcattgttaatttctgtaatgaacattttcaattaaatttatcttgtttgtgttta

SEQ ID NO: 222306 - DNA, 1000 bp, Homo Sapiens
cgagctgaggcgcagtcgggagagggaagggcccgctgcctcgccagcagaaaatgaggaaggggcctcagagccttcacctggaggcatcaagtggggacacctctttggctcccgaaaagcccagcgggaggcccggcccacaaataggctcccctcggactggctgagcctggacaagtccatgttccaactagtggcgcagacagtgggttcccgccgggagccagagcccaaggagagcctgcaggagccacactccccagccctgccctccagtcctccgtgtgaggtgcaggcactgtgccaccacctggccaccggccctggacagctgagcttccacaaaggagacatcctacgagtgctggggcgagctggaggagactggctgcgctgcagccgtggccccgactctggcctggtgcccctggcctacgtgacattgaccccaactccaagtccaacccctggaagcagccaaaactgaggccctgtgcatgctggtggcctcagggaccctcataacccccagactcagagcccgagagcccttcccaagccattggcttggctgcagagtagactgagagctggggccacgtatccctgtgctggcacctgctccctgtgctcagtattaattacgcccccttaactgtcccagtgaccttgtccagacctccacccaggagagggatgggacacagcactgggctgccaggattcccctggcccgtctgggccaacccttccatgggtgaagacaagcaagtccccctggaggcgggtggcccagaaagccatctacagggttccctaggccaggtggagatgaggatgggtaacagtattggggccagatccctaagccccccagctgtaaataggctgtggccagtgcctggtcatcagaagagggaggaggagcccaggcgtctgtttatgtatttatttatttatttattatacctattaataaaaaaggtgctcagcctcc

SEQ ID NO: 222307 - DNA, 1000 bp, Homo Sapiens; identical to SEQ ID NO: 117073

SEQ ID NO: 222308 - DNA, 1000 bp, Homo Sapiens; identical to SEQ ID NO: 117074

SEQ ID NO: 222309 - DNA, 1000 bp, Homo Sapiens; identical to SEQ ID NO: 117075

SEQ ID NO: 222310 - DNA, 1000 bp, Homo Sapiens
caaatgcctaaagagacatatttagtacatcctccccaggatactactgccctagagagcctgataccgtcagccaacagagagccatctgcctttcccaccaaccatgagaggataagtgagaagaaacttccctccacacagatgagcggtgaaacattgcagcggcccgtgtggaacataaacagagaactaggcctgcctcatcctcctttttcccagcagccagtccatgagtcaccacaacttcatcaaaatgagggcctggcagggagagagccagactgttctgcttcttccatgtcctgccacaggttacaggatcatgcttttgattttagtaggactcggaacattcaagatggtagtgagggcacatgaaactcacttcaggatgaaatctgggcagagacttattaattaattttgcatttactacctcagagctcagaagaaactccgaagtcagcatttgctttactctttctttatgattgcatctgaccgcaccaaggtgggccatgcgttgtttggtcttatacctgatgaagaaatggcaacagctgacagaaatgggtacagctcatcaaaaatgtgcagcaccggcagagggaagatacggggcaaatgtgcttcctgatgcttccatggggatgtgctctggtgtgcatctgcttgtcaggaagagtcacattgctgcttaacatgctggattgccctagtcttcagaatggtcctgagaaaacatcactacttcgatgttctactttgctttccaaggagcaaaaataactttggagccttctgggaagtgtgcctgggattcttcagtggtttcaggcagatagttgagactggggctttgatattcaaggtctttggcaagaatcccaggcttgaccaactggtaccaggtcaaagatttttgtattcttgtgaatttttttttttgtccctattgcccagggatgtcattgtaaatatatgtgcatttataaat

SEQ ID NO: 222311 - DNA, 1000 bp, Homo Sapiens
ccgtgtggtgtgccctcagttcctactcctcccacaagggacaggcgtccacccgccagaagaagagacaccgcgaagacattgaggattatatcagcctcttccccctggacgatgtgcagccttcgaagttgatgcgactgctgagctctaatgaggacgatgccaacatcctttcgagccccacagaccgatccatgagcagctccctctcagcctctcagctccacacggtcaacatgcgggaccctctgaaccgagtcctggccaacctgttcctgctcatctcctccatcctggggtctcgcaccgctggcccccacacccagttcgtgcagtggttcatggaggagtgtgtggactgcctggagcagggtggccgtggcagcgtcctgcagttcatgcccttcaccaccgtgtcggaactggtgaaggtgtcagccatgtctagccccaaggtggttctggccatcacggacctcagcctgcccctgggccgccaggtggctgctaaagccattgctgcactctgaggggcttggcatggccgcagtgggggctggggactggcgcagccccaggcgcctccaagggaagcagtgaggaaagatgaggcatcgtgcctcacatccgctccacatggtgcaagagcctctagcggcttccagttccccgctcctgactcctgacctccaggatgtctcccggttttttttttcaaaatttcctctccatctgctggcccctgaggagagtgagcagcctggaccacaagcccagtggtcacccctgtgtgcgcccgccccagcccaggagtagtcttacctctgaggaactttttagatgcaaagtgtgtatgtgtgtgtgtgtgtgtgtgtgtgtgtgtttgtgtgtattttgtaatatgtgagggaaatctaccttcgttcatgtataaataaagctcctcgtggctccctttgtgaaaaaaaaaaaaaaaaaaaaaaaaaaaaaaaaaaaa

SEQ ID NO: 222312 - DNA, 1000 bp, Homo Sapiens
gaacactgcaaggcaggagggtcacttgaacccaggagttcgaggctgcagtgagctatgcctgtgtcactgtgctctagcctgggtgacagagcgagacactgtctctctttctctttttttttgaaaaggtggggttttggcatgtttcccaggctgatcttgaactcctgggctcaagtgatccacccacctcccaaagtgctgggatcacaagcatgagccatggggcccagccaaatgttcatatttttatttttaactcccgtggttcaactttgggcaagacaaccttctttcagtatcagtttcctgacctgcaaaatgatgctattaaccaattaagaaaatcgactaataacttaagagttcttgggaaaaaagttttcctatatatagtatgtgtgttaccatgctgactgtgacttagggccctggtagtttctgtagcaggaggctgtatgggtctgggggcagttgagaatgctagagtcgatgactggtgtggaaattcccagggggtggtgactctgtttttcaccttgccgtgtccaggcaggccagagagaatgagtactcaagacacctggcccaaacattcatgaagaagacaccaagtcagaagagacttcctcctttgcatgatcctgtaaggacggaagagctagcagctgtggatactccgaacagaccagtgaggcagagcagcaaaagcagcctggaactggaggcggccaggagaggagcagcaagccggtgcccacagtcagccacggcaccctcagcaggcccattaggaggaattgagaagcttctccagtgtttgccctaaaatctcaatccattttaagtgacagaaagtgacaaaaaacaccccagaggaaaatactggggcctaagggagtaatctcagaactcttgtaataataataataatagcagccaacatctaatacatgcttactctgtgccaggccctattctaaaaaaaaaaaaaaaa

SEQ ID NO: 222313 - DNA, 1000 bp, Homo Sapiens
agtggtggaatttgaacacttctcactttttattgtattttatcttccgcagataaatgtagaaatacacgattctgtcacctctgatcccttccatctgaaaggttacaaggagtgttgtagcttctgaaggtgcagaaaacaatttctaaaaatgcttttattcctgggctaatcctgtccctccctaagtcacagcgaggtgtctgtcccagggctggagatgcttcccaaggaggagtctgttttgttgagagtgggcgtgggcttcttcacataagcctggggaaggaagaaaaaacggctttcattaccaaataatgtaaaacctcaaaagcaagggcttcaacagccttaaccaaatattattccccatagccagtggaaaatggatgtgacaaccccagtgcgcaggccagagtgagtgagcccagcacggcgctccgactggcttcctctctcaggtgctggattgtggggttagtggcatttccagctggattcctcctgttgtagttgccataaggaaatgagatgcagaatcagaaggatctatttctacagaatcatttcaccagttaagcacatgagtagagaaagagataaaaataaaagtatctcatgaaggaaagagattttgcctctcttttacttttcacctaagtttctctgagaaatagagacaggattctctctttaaaattcagtgaaaatgaagaaagttttcctgcagttgctaacctgagttgcagtgtttaaggccatcatttcactgctgctgtctgtgactccacgtctgtgtcactgaggtgacctgcgtgtcactgaggtggccaccatgctggcctgcggcatgtgcagggagctgaggctgtttccaggtgatgctgctgtgtggagaaggttctgagatgcagtgagggaagaaaggatcctgctggggattccattgtaagcacctataatcgggaattttcatgtaacagctttgacatttaaa

SEQ ID NO: 222314 - DNA, 1000 bp, Homo Sapiens
agtcttgaactcctgggctacagttaccctcctacctcggcttcccaaagtgctcggattacaggtgtgagccactgtgcctagcctataatgatcattttaatgtttcccatgcactcatttagtttgaaccttcacagcaacccaatgaggtaatactcccatttcacatataatactgagagatgagttgcacaagattatacactgttaagtagcagagccagaatggacttcagaatcccaactacaatacaaatgtttatttaaataaagaagaaagctattgtacaaatatcactcttcaggtttagcttacagagccatggctatggattcttagctctgtaaggaagtgcttctataaattcttaggtttagagatgataccatctgggtacctttgcttgaaccgtgcaaccacatctgggtctagtaggtggatcccatccagttggtttccaagggtgatcctgaaacagtgtaaaaggaggggcaaaccagaaatcctggaattagagggtttaatattgttaaaaaatgcataccaaatgaagactgcctatcatcatatcaaatatgccaattctaaaaagagcttaacattagaatagtatatggtagaattactagttcagaattggcatagattctggtgttaaaatagactggatctgtattatctgagggttagtaactaatgcttagccaggcctgcttcacagagttgctaccagggagtattctttggataagcaaaatgctagcagcatgtgttttaagctctgttaaggggtgaaagatgtaattattgacagattaaatagataacttcgtaaccaccagggggcagattcaatacatcacagaatggctgaggaagatccttgggttgtgaagagagtagaaaccctagggagcagtgcttttgggtcctagaacctgttgagtttctaatgaatatttgtagaatctcataaaacagtttaaatacaagctt

SEQ ID NO: 222315 - DNA, 1000 bp, Homo Sapiens; identical to SEQ ID NO: 117080

SEQ ID NO: 222316 - DNA, 1000 bp, Homo Sapiens
ataaattatcttttcttctgtatctctgttacaagcgtagtgtgataataccagataataaggaaaacactcataaatatacaaaactttttcagtgtggagtacatttttccaatcacaggaacttcaactgttgtgagaaatgtttatttttgtggcactgtatatgttaagaaattttattttaaaaaatataaaggttaacgtccataataaatacttctctttgaagctaccttatcaagaacgaaaaatcgtatgggaagaatcccctatttatcactgctatattaaaatatatatattttaattatatttgacaggttttgcatctaaattgacctatttattcattcttgattaaatgcactgaaaagtaaagggtctgtttgtgtcatgttcatgaaaatgcggttagagaggtgctattcaagtgattctgaaggcaccccaaggtatatctgtaatttaaagattactgcaaatatctttactttactgtgggtttttagtacatctgttaatttagtgtttctttgtgtgttttgtagactagtgttcttccatccttcaactgagctcaaagtaggttttgttgtaacattgtgattaggatttaaactaattcagagaattgtatcttttactgtacatactgtattctttaagttttaatttgttgtcatactgtctgtgctgatggcttggcttaagattttgatgcataaatgaggtcactgttgatcagtgttgctagtagcttggcagctcttcataaaagcatattgggttggaaaggtgtttgcctatttttcaaattatttaatagatgtatggtaccatttaaaagtggttgtatctgaatttactgtggggataacatacactgtaatggggaaaaattacctaaaaccaatttcaaaatggctttctttgtatttcagtttaaaaacccagtgcatgtacgccctctgagatgcaataaacaccttgaacaaag

SEQ ID NO: 222317 - DNA, 1000 bp, Homo Sapiens
gcaatgaactatgatcacaccactgcactccagcctcggcgacagagcaagaccttgtttctcaaaaataaataaatagaaggaaataaatgtaaaaatgctgcaaattaaaaacctcaaagaagggaaataattgcaacaaatgggaattgatgttgaatatttaccttaaaaacctatacaacaataagaggagtgcgcccttcagcagcatgtatacaaaaattgcaacgatacagagattagcatggcccctgcacaaggatgactcgcaaattcataaagctttccataaatatatttattaaaaaccaataggaggagcacttcgagtcgagtgtaagggcccttcacaaaagcagaaggaacactggcccaaacccccagcaccccggaagcagaggtgagatgggagcagcttgggagccccccattggcgccgccctactggggaagccggtccgtacgtaggccttgcatctcgccacctccacttctgtcctcaagaacaagtcctaggtcaagggaaacagcacagcctgtttataattaggaaacacttaaaacagcctggcatttgggaacagccatgttaacgtgagcaaattcctctcatgaaatagcctgcagctattaagaagcacgtgtgtgcaggaagcggaggcgcaggacctcaccgcgccagcgtgaagttcccgggcatggtcatgaaagcgtggttctgtaagaaatcagagggagaaagggagagaagggggagggagacaacccaaacgttggagggtatttgttgtaaacttcaaacttttggcaggtttgaaatttttcataactccggggaggagcaagaggggtgaaaagaaacaagttctctacttgtgatcagcagctggtcatagtggttgcctggagtatatgcctttttgtatcctttgaatttccagccatgtaaatgtattatttattccaaaaataaagcagatttacattttaaaaattc

SEQ ID NO: 222318 - DNA, 1000 bp, Homo Sapiens
gaatgcatcggccacccctttccaacagccgagtggatatgggtctcatggatacaacactggtgtttcagtcacctccagtaacacgggcgtgccagatatctcgggttctgtgtactccaaaacccagcagtcctttgagaaacaaggttttcattccggtactcctgctgcttccttcaacttgccttcagccctaggaagtgggggccccatcaatccggccacagctgctgcctacccacctgccccctttatgcacattctgaccccccatcagcagccgcattctcagatccttcaccatcacctgcagcaggatggccagacgggcagcgggcaacgtagccagaccagctccatcccgcagaagccccagaccaacaagtctgcctacaacagctacagctggggggccaactgaggccctgaccctcttctcccggtcccatcttctgagagggcttctcagcctggaaactatggaaacagcatcaaagagaaaggaatgtggggggtttccgctgccccccacccccagcggcccaccccatgcctcagcttcatgtctgtcccattcctataccatccccaccctgttgtatgtattataggatttgtattttctccttttttttcccccttccattccttctcccctcttgcattcaagattatgaaactttgctatgggccctgcacttcctttgcttcctcctgttcaccctggtggtgtacggatgaggcggggaggtgggacccccaaacatatatcagcccaacagccctaagtctccttctttattattaggaaaacaacaacaacaacaaacaaaaaaatggcgtcatgaatatgaacagcattgtcagatgaattagttgaagtggttttttttttgtttttttttttttttttgtactgtgtcctcaaatttaatggattaatgtgtcttgtatatataaaaagaaaacctctaccttcaaaaaaaaaaaaaaaaaa

SEQ ID NO: 222319 - DNA, 1000 bp, Homo Sapiens; identical to SEQ ID NO: 117083

SEQ ID NO: 222320 - DNA, 1000 bp, Homo Sapiens; identical to SEQ ID NO: 117084

SEQ ID NO: 222321 - DNA, 1000 bp, Homo Sapiens
ctgtcattcaggaggcacgaatgtggaggacttctcgtgacctggtcgtgatgtggcattcagtgcatgtccacagctaatggaaaaacacgaggactcgggtaatggttcttcctctcagtctttctattcctaacttttcacacatccagatggttccacactagtgcaaatgcctcactctcctgagaaacccagaaagaagagtggctggctcacaaccatggggttagcccctgctgggctgggagtcggggtggcggccaggaggaaaggcagaaaggggtgagccgaggtgttgcctagctgattttctgctgtgcagagctaatgctgacatttcatgtcaacttccccggttctctggggtctcctctcctctgagcagccacatagaacattccccacatatccaaagctgcccaggggagccgagagaagggactttgctgtcaggtccaagccctcctgacctccctgagattgatctgccagtgtcctgctgtccctctgggactggccacatggccatcgctgccccttgttgacacctcctttctgtgtgagttgtccccggccaataacaaagctgttccttgaaccagaacaaccagagtgcacttttccttccttagacggaagtagatcctggctagggtttctgcccaggcccttgttcccggcagtgtgactgtttacatggtttggcaataggtttgattctgattgcttcagagtggctggtctattttgtttcctttggtttccttcctccccaaattgtgacaggaaaaacagaccaaaaccaccctaggaaattgctggttgcctgtccccacgtgatgataaatgttgccctcttctggatatcgtttctctaccttacgaccaaacgcccgtcctatagagtgtctgattggatcctctgtcgcgtattctgatggtgcctgctggtttgacgtggagctatcctgtgaaataaaacagcttaacttttctc

SEQ ID NO: 222322 - DNA, 1000 bp, Homo Sapiens; identical to SEQ ID NO: 117087

SEQ ID NO: 222323 - DNA, 1000 bp, Homo Sapiens; identical to SEQ ID NO: 117088

SEQ ID NO: 222324 - DNA, 1000 bp, Homo Sapiens
gcactctgtctcgcaattttgaggaggttgttccgacctggaagcgttaaactgctgcatgtcatctggcgtcagctgtgaggctgcgctctgcgtgttgtgcgtttgcaaaatgtattggcgtgactgtaaacacatcgttgaagtaaagcgattacatattgagtatgtcagcttttctcaccctcttctgtgctgggaggagagtctaactgtaacctttaggttgttccagaaaagattcaggccgtttggcacagaattgctctttctgaagggtagcagtaatgaataggaacagacagaaaaccccaggaggggctttcaggaaactctccctctccatcgccatcctgcaagctccacagcctcgggctgccagcctgtggcactgtcctcggtgtgtcctggagctgtgctgggcagcagggcctcgcgtaaggaactgctggaacccactgagcccttcccggggtttcccgccgcactcagtgtgttccttcaggctagtgaggtttcattctgttttatttgcaagcttatcaaaagtttgtggaagatacattgttgggttccagaggctggagtcatgctgcccacatcttgtttgggaaagcaaaagctcccagtgagctggtgtccccgtgtgtctttcatgggactgtcccctttagagatcccacctgtcagagccacagcttcggggtcctgtcatcacatcccctgggaggggaggcaggaggaggccgagggccccaggatgtctgcctggtcccttctcactgtgaggacgcccttggcacacctttctcaagtcacacaaattattgcagttacatacagaattgctgacaggagcaggagacgctgagggaaacagctggcaatgtgacaaaagtcttttctgggacaacaatcaaatcatgtatttgtatttttttaagtttaccaatgaattgtacaacaatgtaaaaataaagttcatcctaatatgctgtgc

SEQ ID NO: 222325 - DNA, 1000 bp, Homo Sapiens
ttcatgcatgaacatgagttcattttatgttttatatagctttcttagacataccaaaccatcattcataaatcagataaattattcagtttttgtgtttagaaagctaagtatgtgtagctggaaacaaaaatgagcgtgttttctctcctgttaatctagagtgtgcagttacacatgtgtggataatttcatgttccaggggcgcttggcatctcccatggactgattcccaggaagaaaagcccaaagggaaacccacgattcctttcgagtagatgtgggaaagagcccattggaggatatgaggtcctgtgaaattcagttgtgtgtgtggctccttgttagcagtcatgttgacatggtgttaggaggctccccatccaccctttacatgatgtagggaccagtgtcttgtgagattaaccttgggacacagtgggttagcctggagaaaatgagaggccctgcctggacccagggagaggagccagtgacacaggcagagcggtgcagccctccttcccttccatttggaggaggtggtgccaggagcctgcccgcttacctctgctgaagcataagtggactttgcttttggggcttatctctgatacatgctggagccctgcctctccactgctagatggaacctggaatctctcatctacctcttagtctgtcagtttctacgtgtgagaagcaagcttgtgggccagtgtccttgtacatgctgtagcacttaaaaaataattccagggttccctggaaaaccagtcccagggttcctatgatctgtagtttctacctggattataactggttttgggtacctgaattttgattggttagccttaattatagtctggcgtgatcatgtagaatcttttctggtgaacagatcataaagttctatcaaggagttctatcaaggcatccatgtcagtggtgctatgctggttacaacttgagatttttgaaataaaaaatttgtcatatt

SEQ ID NO: 222326 - DNA, 1000 bp, Homo Sapiens
ggcagatcacaaggtcaggagtttgagaccggcctggccaacatggtgaaaccccgtctctactaaaaatacaaaaatttgctgggcatggtggcgcgtgcctgtaatcccagctactaggggggctgaggcaggaggatcgcttgaacctgagaggcagaggttgcagtgagccaagatcatgccactttactccagtctgagcaacagaacgagacttagtcaaaataaataaataaataagtaaataaataaataaataaaatatcttttatctttaaagtgtttaacattggtatactgtctgtagttggttcattagtcgtttataaagggttattttctcatgagtggaaacctgaacaatcagttacctttgtgcctatgccttctctctcctcagacagctgggatgtttatggtgaaatggcctgtacaagtttaactaagacaacttaacttgcattgttaatcaaaaattcttttctcaaagggttaactggttgccattttgaatagtatgttcaagggtgtagcttcctgtttctttccaaattataagtagctacctaaatatagtataattatatattaataatatggcttgctggcacagtagtttaccctgttatctgtgtttcataatgggggctgtatgaatattatttaaaactaataaaatgttgccagaattatactaaactgttggatgagattaggagatcagaggctggaccttctcttgataatgcttgttttgttaaaggtataatgaaataatttgtatatgatttgatgaagattaaagacccttattttccacagctttaaaaaaaaacctttatttatgatcaagtaataaagataatattctacttgtgggatcttacattatggaaatagtttgacgtttttgacctcaagagtatgtataatttgaagagatactttgtaactatgcttgggtgatattgagcagttcctaaagaataattcattt

SEQ ID NO: 222327 - DNA, 1000 bp, Homo Sapiens
ctctctgtatcaatggaagttcaacccgcccctacctcttcagatagttgtaggccacttttctcttgtaactttggaaaacaaaagaggagaaataagtatcataccatatgcgtgtctccaaagtggatgtggttgcctcaaggcaggtggcaggcaggggtgacctgctggccctcagatcaatggtcgtggcaggtctgagagctgtcccactggccagacttctctccagcagcaaagccagcctggggcttgcatgttgatcctgagcaagcttaacggggtgaagctgggctttctcccccctgtgactggagtgcatgttgacaccagcactttttctgcacatgtatcttcaatccaacaaggccgtttttttaatgctgagtaacaggccaccaagcggctactgcgttatatcttctcagcaactggccgcagtctcttctgcaccattttctacaccagacctgcttggcaccacagggagctcttttcctgccctgcacaatgacattccaaccaccaccagccagacattacagccaaccttgctgattgtcacaagcaggaccttggggccactggcactgtcagatagtaagccatttcttgggtagaggaggaaactcctctccacaaatccacttgggcctgtgcaaatggcacttgaaagagtccccatgcacttggagtccatgagccaatgggatatgcaaagacgcttaaacatttcagggctggtttctctgttcatatccaattctggtgcttaggaacagggacccatgctgatgcccaagggcaaaaagccccacttcctttaaggaagtgaacaggcctgaccctgatgcccaataacgggcaaccctaggctttttgtttttcttgcttttattcctttttgttgttggccttgtgctgcgtttgtttacaaaagatgtattttgtttaaccaaatattaaaaatggaaaactccaaaaaaaaaaaaaaaaa

SEQ ID NO: 222328 - DNA, 1000 bp, Homo Sapiens
agaacccttttgtacaaatacagaatcatcaacatgctattggtcaagagccatttcacccattgtcatctcgaacagtatcttcttcttcgctccctagcttagaagagtatgagcccagaggacctggtcggcccttgtaccaaagaagaatctcatctagctcagttcaaccttgttctgaagaagtaagcactcctcaagacagtctggctcagtgtaaagagcttcaggaccacagtaaccaatcttctttcaacttttcatccccggagtcctgggtaaacaccacctcatctactccttatcagaacattccgtgcaatggatccagcaggacagctcagcccagagagttgatagcgccacccaagactgtcaaaccccctgaggatcaactgaagtcggagaacctcgaggtgtccagttccttcaactacagtgtgctgcagcatcttggccagtttccaccccttatgcctaacaagcagatcgcggagtcggccaatagcagtagcccccagagctctgcggggggcaagcccgccatgtcctatgccagcgctctgcgggcccctccaaagcccaggccccctcctgagcaggccaagaagagtagcgaccctctgtctctcttccaggaactgagcctagggagctcatctggcagcaatggcttttactcatattttaaataatcactttttttttccctcaagggagaatgttttaatttctgtttgtatcagtagaattaaggtagttggacttcatctatagatgcacagttccctttgttttaatattaaatatgttctcacttaattgctttgctgctagacttgcaactaatttttttaaagtatattccattattttgcatttttgatgtgtcaaaactttgacagcttttatgtagaataaaaaaatttttaaatttgtgtattgttacatatgtttgcatcaagctagcagccaagaggttaattgtgcaactata

SEQ ID NO: 222329 - DNA, 1000 bp, Homo Sapiens
gcacacaaagacctcctcctccacaggggagacagaggtggggaggctctcttggctcacataatcgtgtctgtgtcacaaataatcattaaattagctattttcagctaacacatttgttgttgcacttgaaaaagagttagtgagcctgtcttggagtttaagtagtttcaaataaaaaaaggctacagtgcctcacaaaggatgttcccagcaagttgtttaaattcccagcaagttgttaaagtgtaaataaaaatatatgaaattgtattttaaatgtttttatattctcttgttgtaatactcttggctgttatggaagcacctgagtaatagagtggtgggtaggagctaggatgtttttctacaatcgaattttaaactaatttatctattttatagacactattgaacagttttttaatagttcatatctaaatctaacttttcataaaactttacggtttttccttcactaccttaaatatgcaagaaatactgacttggtatagggtaccttagttttctctattcattagacaggtaaaattatatttcagctgattgatctgtgtgacaaaattatttcttagctataatcagcacatcacttagttcaaacaaaattccccagcaaatgttagatagtaggtatatcagtcacctggggagttttcttcataatatgcatattcatcttgtaatgcatacatagttatcatcctccttctcaacccatctccctaaccccacatgcttgccagttcttgaagggataaagtgattctaataatgttttacttctctctgttcaatttaatgtgatataattctagtataaaaatattttggacagttgcttaacatggtcataagaggatttgtactatagaatatcttctagtactaatttttctgtagagcaaattatatttctctcactggatagtttttagatgtgtttcttcatataaaattaaaaactgagatggaattc

SEQ ID NO: 222330 - DNA, 1000 bp, Homo Sapiens
tcctttggcttccgtgctcgagccgtttttacccagctgggtacggtgccacgttcaggcacgtgcacccggcaaggttcagggcacatacctacctggggcatgacatctgtcaggtggcaccgagcaggatgcggggatggaccctagataccacagcctgccccctcccctcctttagccaagtcaggatcttaggcctcagcaggcagggacccttccaggccacagtaggctgaagcagcaccaggatcctggcctggcctggcctgtaggtgtcccctggtggttataattctgtaactctaggggagaaggggaatagcactagcattggatgtcgccaaggcccacattttcctgagagaagccacaaaagatgtgcaaatgcccttcagcacaggacctggtgacatgacataaactccaagacagaacctcagtttacagcacacgaaaaaaatatcttgccaacattgtaatgacaaaataaattcccgtgaagttccacaaccaggccgggcatggtggctcatgcctgtaatcccagcactttgggaggtgaggtgggtggatcatctgaggtcaggagttcaagaccagcctggccaacatggagaaactccgtctctactaaaaatacaaaaattaaccaggcttggtggtgtatgcctgtaatcccagctacttgggaggctgaggcaggagaatcgcttgatcccaggaaggcagaggtggcagtgagctgagaacgcacaactgcactccagcctgggtgacgagcaaaactccatctcaaaacaaaagttccacaaccagcctggagtgtgtagcccctttgtccaggaatttgactagtcaatcagtgacacctggtactggcagttttgggagtggcagcccaggatggacagcagtggggagggaaccatttggcataaggccgttgggcttcaggatcaattttgttggcaagcagtaaaaataagctatctaccta

SEQ ID NO: 222331 - DNA, 1000 bp, Homo Sapiens
gattttgatttctgcagagaaatgaatggaaatcgtcttggacgagacagaattcaaaacacttgggttccccctcctcatgctcgggtttttgattattttgaaggggccacttctcaacgaaaaggtgataatgtgcctcaggttaatggtgaaaatacagagagacatgctcagccaccacctataccagtacagaatgatcctgaactttatgaaaaactgacatcttcaaatgaaataaacaaggagaagagtgacacagttgctgatatagaaagtgaaccagtggtagaaagcacagaaactgaggggacataatcatcactcagtaggtaaaagataccttttgtaaagttgtcatctctctgtaatagataatggctgactggaccatagttgttcacttttgtctgccagaattaagttaatctgatgttcatgttcacctttctcttaaaataattgtacaactgacttgtatagacattgttcttaatatgaacatggtaggtaaactttttttttatttttttctgataaaatacaaatgttggccccagattcttttaacgtcaaggaaatgaataacagcttgtcagagacttcctatggaagaaagaattttttagatactatcattaggttggatatggtaatagatatatttcagaatagcaagtggtggtatatcttatccatatctttaggctgctgcagaattttaaggttatagataaagctgtgatattttatgcaaagactggctctaggtatttgaggagcacaatacagagattttaaaaagtgattttgtaaaatctacactacggtctctgtttctccaaagtaagtgtttgtgatttgttcctcatactgcagtgagtaaaaaagaaacaagaaaacaacaacataaatattaaagtacgtttcaatgttgggtgaattttgtttttagatgccaataaaacttatttgtttgataaaaaaaaaaaaaaaa

SEQ ID NO: 222332 - DNA, 1000 bp, Homo Sapiens
gtagaaactgagcaaaacaaagaagttgaaaaatggaaaagactggcacagttaaagaatcgtgagctggagaagttccgcacagaactagactcaatattagatgttctccgagagctgcaccggcaaggagtggttgtgccagttgcttttgcagatgaaatgaatgcaccagagtattaatagaaattcagatttcataatgaccttattaaaaggcctgaagatggatgggattgtgccactgtcaggacagcttatgaaaaacaagtgttccaatatgtttccagaaagcaaacaaccaaagcaacatttcaaaataaattgcctttaaccaataagaaaaaaaacatataatggtgtattttactaaaaatcattaaccagtctcattttaagtgatttatggacagtttcctttatagcagagaagggctcacttgtatgctagaaatagaaagaaaagaaaattgaacatactccgccacatttttattgataatgtgaggtttttaaaatttttattttagatccagggggtacatgtgcttgttgtaacatgggtgtattgaataatggtgggaattgggcttctagtgtacccatcatccaaatattaaacactgtacccaacaggtaatttttcaacgcttactgccgctcacactctttcccctattggagtccccagtgtctgttatctccatctttatgtctctgtgtacccattgtttagctcctacttttaagtgagaatatatgcaatattttattttttatgtctgatttagttcacataggataatggcctccagctctatccatgttgctgcaaatgacatgatttcattcttttttatagttgcataatactccatttatatatctctctctatatatatctcacgttttctttatccagtcaattgttggtagatacttaggttggttccatgaatttgctattgtaaatattgctgcaataaacatacatgtacag

SEQ ID NO: 222333 - DNA, 1000 bp, Homo Sapiens; identical to SEQ ID NO: 117093

SEQ ID NO: 222334 - DNA, 1000 bp, Homo Sapiens
agctactcgggcagctgagacaggagaatcacttgggcccgggaggcagaggttgcagtgagccgagatcacgccattgcactccagcctgggcaacaagagcaaaactctatctcaaagaaaaaaagaaaatttctacatattaaaacttgtggatgttgccaaagctctacacattgggattggaatattaattacactataatgacgataatgtattcaggaagttaaaatgtaggtccacattttatttagttgacctctctatctctatattatagtacccatggtatgcacctttttttttttttttttttgagacggagtctcgctctttcgcccaggctggcgtgcagtggcacagtctcggctcactgcaagctctgcctcccgggttcaagccattctcctccctcagacttccgagtggctgggattacaggcgcccgccaccacaccaggttgatttttgtatttttagtggagatggggtttcaccatgttggccaggctggtctcaactcctgacctcaggtgatccacctgcctcggcctcccaaggtgctgggattgcaggcgtgagccaccatgcccggctctcacttcatatgtttaaagaatgagtaaaagaaagcaattactactgctaaatgtgggaaataatggactagacctgtactaatatatggtagtcactagcaacctgttgagcacttgaaattgagttattgagcactgaaatgtggctagtccaaattcaaatggtgtttttttgtaaaacacaagattctgaagacttagttattttaaaaaagttaagtatctcaatttttcatattgagtacatattgaaataatattttagatatattggttcaaataaaatacattaaaatgaataacacttttttgtttttaaaattgttataggaaaatttatatatgtagctcacgtatttctattgtcagcgctggcataaacaataaaaagtagacttgg

SEQ ID NO: 222335 - DNA, 1000 bp, Homo Sapiens
atgcaaaccctcaaagctgtattatctggtgtgtttgtcctgtatttacagttgtttttgactatgcaggagctatcagtgctagagtgagcatgcttcaaaactgtacatgaagccaatatatttttggataagtaaaactgtctgaaagtacatctgtcatggcaggctttaaagagagtgcatgaaaactgatcagtcattggagaagttaccaccacacacaaaggacaggttttaagtttatgaaacccaagggctaggccatggtatagacttcttctatgagtgtgtgaaaatgtgttacttttaggacgtgtatttggtgctactctctgtgaccaccaatgggtcagttgctatagaacaacaacaccacgaaacatctgtgcagttttcagagtgtcacaaagtcaataggtccttacacggtgctattgccctaagggaaatccgaactgaatttatgcacatagaattgtcaccctgactttgaagcctcaaacatggatcaaatctgttgtgaaacatcaatatatgtagctggatgagtgactagtttcccttgtataatatgtgatctaagaaaattgctaatctttccctgccattttgagaaacacagtccaaacatgagcataaacagaatttcctgcaatacatcccagtaggtccacctagtttacaacttaaactagtttgtgaaacatttgtctgtatacattttatattttgtacattttgatgtaacatatcatgtaaataggcagaaacagtgaaataaatcatctgaaaagttttgtagtctttgtaaagccccaacaataagtacttggtgtcaatggacttaactggatgatgtattttctattggtttattgttcctctagcttgtaaaccagcttgcatatatttttttgcaaatgtgcaccctgtatctgtctaaattattactttgccattaaagtggaattatttattgacaaaaaaaaaaaaaaaa

SEQ ID NO: 222336 - DNA, 1000 bp, Homo Sapiens; identical to SEQ ID NO: 117095

SEQ ID NO: 222337 - DNA, 1000 bp, Homo Sapiens
ggagagcagttcatctgttcagaacagtgaggcaaggtctgtagtgcttctttaactacctttggaaatactgtacaatgttagaataatttattttgctttacaggagtttgtcatgtattgactttaatattgtattttggtaataaattttttgttaaaaaaaacttggcttcaagttctattaaccacaggttgtgttcattcttttcctggaaatgatgactttattgcttagaaagttgtaaataattaaaagcttcccaagagttaaatgaaggttatgatgactcttgataacttgttaatctgttgctgactagcattagactgttacacgaagataaactgaataagcatttagctttttaaatcattttaaaaattaagtctaattttgaagcttttttccttgctacccagttcagtttctcttccaaatgtgacacgcttatatgctttcaattctgatatagtcaaagtgctaaagactagttctgctattgacgaaggaattagcattccttagtgaaggccaaaaactacagtgatatgttcacaccttgatcactctgtcgtctatacagacagctattgacatatttgttgcattgacgaagctaacatcatctgactgtatcgtgggtctggttatccatttgtgccctagaatcctgggtcacctcagttgaaagtgaccaaggccaaatatttcgtcccatgcttcccagggacaacataatcatatcccctgtctttgaaaaacccaatctgaaactgtgtcactaacctccaaattaaagaatccgagcatggaagctctagaacgtatggtccagtgtggcagccactataatatctaagtgtaaaatacatagcagttgcaaagacttagtacaaaaagaatggaaatgtattaacagttttttatattgattacatgttgaaatgatattttggtttaaataaaatattaaaatcaaaaaaaaaaaaaaaaaca

SEQ ID NO: 222338 - DNA, 1000 bp, Homo Sapiens
ctctcactccaccctcatcccccaaaacccaacgtgctgggcacaggcgtattctcagtgacgtaacccacagtgcagtctttggggtccctgccagcaaatcaacccagctgctccaggcagctgcagctgaggccagtctcaataagtccaagtctgcaaccaccactccatcaggctctcctcggacctctcaacaaaacgtttataatccttcagaagggtctacgtggaatccctttgatgacgataatttctccaaactcacagctgaagaactgctaaacaaggactttgccaagcttggggaaggcaaacatcccgagaagcttggaggctcagctgagagtttgatcccaggctttcaatcaacccaaggtgatgcttttgctacgacctcattttctgctggaactgctgaaaaaaggaagggtgggcagactgtggactctggcctcccgcttctaagcgtgtctgatcctttcattcctcttcaagtacctgatgcaccagaaaaactaattgagggactcaaatctcctgacacttctcttctgctccctgacctcttgcctatgacagatccttttggtagcacttctgatgctgtaattggtaaagtcatcatctctgtttcttcagtcatgcatgatatgtgtgcctgtttcaagaatgacaagtacctagttaaccaatccctggggaatagccctgccaccccagaagccaaggctatttaatctcacttgtatcactccaaatgaagtgttttccttgcttttcgggggtacaacgtctattttttgcctttcttgatatctggagatttctagagtggatctcttatgaatgaggaggaatgtggaaagtttcacatttagttagaagaactttaaaaaattggtttctaactagactacctttactgaacttaatgaaatttagcagattcttcttttttttttttttgtttgagacagagtttcactcttgttgcctg

SEQ ID NO: 222339 - DNA, 1000 bp, Homo Sapiens; identical to SEQ ID NO: 117098

SEQ ID NO: 222340 - DNA, 1000 bp, Homo Sapiens
tcagctccaagccttctctccaaacatccaagtacttttctccgccgccaccggcccggagcacggagcagagctggccgcactcggcgccttactcccggttctccatctctcccgccaacattgccagcttttccctcacacacctgaccgactcggacatcgagcagggcggaagcagcgaagacggagaaaaggactaggtggctgccaacgcgcacgctcgggtccgaggctgctcccctggagcggcgcccctgcgccctcagcccgagcagcgacatccactcgccatttgctgacatgagattgggaggaagaatccagaggtgaagagggagacggctcttagctgcgttcaaggcggggccctcgggagcccaggtgcagagcgaggccgtgtccaggagccggcgtccctcagtgccccgtgcacccgcggccgcggcctcccaggcagtgctcatgcgctggccgtcgggggaggcaggggcacagcctccatgtgcgcgcgcgtgtggagctgtgtgcaccgcatgtgtgctttccacaggggcgtctctgcgtccacgcctgcacatcccggcgcacgtgtgggcaccacagaggacacgtgaggggaatggtcaccagtgagccatatttattatttctagagaaatcacgaactgctttctgtaattgcactgtggataaatgttccgagagtctccattgttgtacaggatcttcagttattcgaggggaatgaggcaggtcaagccgatgctagccactagtttgattttttttctgttttatagtttgcgctgcatggtacttgtgaagcttaaatattttgagtgttctactgtgtctaggattgttgggattgtacatatggtactctttcataaatgataaatgattctgaatgttagtgttttatgttcatataggaaatattttcattgagtccaaaataccactgttttgttgatggacttgaatgcatttttgt

SEQ ID NO: 222341 - DNA, 1000 bp, Homo Sapiens; identical to SEQ ID NO: 117100

SEQ ID NO: 222342 - DNA, 1000 bp, Homo Sapiens
gctgccactggggcaccgaactaagccagctcagccttccaagctgcttagcctttgtcaaccatcaaagtggggaaagggtctctggccttgcaaggatttgggcaggatggaagtctttgtctaggtctgaaatcaagggcttgggaatctagagcagagctcctggccagcgtttgaagcctggcctcccacctggggcatttactgacaccctgtcgccagcctagaacatcctgctctgaatgaacagagcccagatgggggtccagagctaagtgacccacctggggaagctctgattattcatccagggccttctcaatgagcacattacctccatgatcaataaccaagaggctgcagtcaaatactgctactgtcactttgaagattttctaagggcacaagtggcacacttgctctccggcctttgggagaggcatgttcttgggcagggctggctacggcaagagggaaccaattcctttcccctttaggcaccctctacctggcagctcttaaaactaagaaaaaatatgatatacacacacattatatatatatatatatatacacacacacacacacacacacgtatatctatttatgcacatattggggccaatttgatttgctagtattagacaataaactgtacaaggaaatttattatctcagtgtctttatttagcataaaagtggccttagaagaagggtgaaggttagatagatggaatctctgtcaggggacaaacagctgtagcatccccttagcatctttctagccaatgagccccctccccaggaggagggatggcctgactgaaacaggtgagagtttgcttccccctttcagcagcattctttttagatttaggtactgaagaatcccagtgagttctgcatttgtatcttgcaagtttgtataaacccaatacaggaaataaaatgaatggtttgtaaaaaaaaaaaaaaaaaaaaaaaaaaaaaaaaaaaa

SEQ ID NO: 222343 - DNA, 1000 bp, Homo Sapiens; identical to SEQ ID NO: 117103

SEQ ID NO: 222344 - DNA, 1000 bp, Homo Sapiens
ccagatctggccaaggtgtctagggtggcccacgggggtgctggaattggcacttcagggccaggctatgcttgggactggcctgagggtattttaaagaaaaaaactacataaaaggcctaaaagtaagacccacaaggatattcctttgcccttcttgtacttttttcatctttaccctgccagaaatgacccgccctcaatgctggctgctgctaacattaatgagaaggtggccttcagtgtccacctgtggaacccaggacacagcacctgactgcacacagtggctgaaatccagcatttttacataggagatgcacttagcctctaagcctcgttttactcatctgtgaaacagagataagtaaccctctctcatgaactctttgatgaggatttgtaaacgaaaacagactcgaactattgtgtaccaccacatagcacatgcacgtctgtcccagactttgacaacctgcacaagacaagcagcctaaagcaggagagacctccctagggttttgtgtgtgtgcacactaccctcactccccaactggccattaccctagttctgcccttgtttgtggagttacagcctcaaggttgtagcatgtgtgctggcaatcagggccgcagtgtgttctgcgcctgcccagagctgactcctgatttaaccgctggcgtaaccgcgggttgcacgcatgcgtgctgaaaagcctttcaccctcacgtggtttcttttttaaccagtcatcaagcgaggctcgcgcgcaggccccgcgttggaaaatggcggggaagctgaaacctctgaatgtggaggcgccagaagctgctgaggaggctgaaggtagtgagggcaagtgggctgcactcctttctctccaaccagggcagaaaggagggaggattcgtcccattacaataatgaaataatgatattctaatttttttaaataaaatgttaagccttttgttattgaaaaaaaaaaaaaaaaaa

SEQ ID NO: 222345 - DNA, 1000 bp, Homo Sapiens
cctcaactccactgctacccagagactccagcaggagctgtcgtcttctgactgtacaggctcccgactgagaaacgtcaaggtccagacagccttgctacccatgaatgaggcagccagatctgatcagcaggctgggccctgcgtcaacagaggcactcaaactaagaagtctgggaagagtgggccaacaaggcatcgtgcccagcaacccgcagccagcagcacctgtgggcagccgccaccagccacaggcagcgagcagactggccctcacattcgggacacctcccaagctctggagcttacccagtatttttttgaggctgtttctacccagatggaaaagtggtatgaaaggaagattgaagaagcacgaagccaagccaatcagaaagcccagcaagataaggctacattgaaggaacacattaaaagtttagaagaggaacttgccaaactaaggactagggtgcagaaggaaaattagcaccaataaagaggaaatatgaaaggattcttgaagatttccagttttgcaactgcataatagctatgcccaaggagtcaactattgtatatattgcagatttgcctttttaaaaaaatcactaattctacaatgtgccagatacatgtttcctatgcccaggaagttatgaagacttcaacaattaaactgaaaccaggggaagcttgcttagttttgggtttcattataaactcttagcctcagtccaggttaatctgaagtttgaaagctcagattaagcaagccatgccaagaaactggacgatgtgtaagcctagactctaaaattcaagatgtgtgaaataatataagtcaaaagcaagaaaaacgtaatcccgtctgaactcaagtagtcattcatataaatttgaacacacctgctgtgcctagacaagtgtctttctgtaagagctgtaactctgagatgtgctaaataaaccctctttctcaaaaaaaaaaaaaaaaaaa

SEQ ID NO: 222346 - DNA, 1000 bp, Homo Sapiens; identical to SEQ ID NO: 117106

SEQ ID NO: 222347 - DNA, 1000 bp, Homo Sapiens; identical to SEQ ID NO: 117107

SEQ ID NO: 222348 - DNA, 1000 bp, Homo Sapiens
gaaaatgttcttgaatcttcactttgactttcagtttatgggggggtagatcattcatgtgatatataagcagctatcaagtgggcaaaaacattgctgtgaatagcactgtttaggctaacattgtaaaaattgtaatgttataattattatttatttggagaattaacttccccctctaaagttatttattattgatgcttataccatgattgcaccttagccttttacatactaaaaacatgacttgttagttgtattgcatgctctttgtcctgtaatgtgtgtgcaatgacaacttgtttctgttttatttaaagtaactgacattttggattttcatctaacatagagggcatggcaactctctttgacagtggtaccccatgatcttcagaaagtaccataatgtcatcctactctacatttcacaagacgaattattttgagatttgtttattatattaaaatgtttttttacgttcccactaaattttgaccccatataaagaaatgtgttatgtatgttgtgcctccttagagacataaatttagtgtcaaaacatgggagatggcttactcagaagcatactccacttaacataccatggcctgagctaagtaccatgtcctgtttgtgtcttatttttaaatattttctttgtccacatgggccgttgaccttagagttaaggcggttgcttttttgaagaaatcaccaaagtttctgggaaactatgttcaaggttgaaatggagagtagatttaattttatttgtcttgtagggaagaaatcttcctttgaaccgcttttcttgctttttccctttttcccaaactaggttacaggttcttatctgcaaggttcaagttgcttagacattgttttccagtattctgcagggccagtcagttgtacagaagttggaatattctgttccagaattaaagaagtttttagattatgaaatattatgataataaagctatatttctgact

SEQ ID NO: 222349 - DNA, 1000 bp, Homo Sapiens
tgctcaagacggtgaaaattgtgtgactgcttaggccaagcagccctcctgcctagactgaccttggactcccagcctgccagagaatgaagaaatacaacgcacagtacttttgaagcttcgtatttttcttggtttcacactcagctacatgtgacctccagcttggtgaggttgcctgaagattagggaaaataaaaatgtccttcccatcttgtcctcttcagtaccacttgggttggtttgtctttgcttcctacaccacgtccttgagtggagttccctgctgaagcccctagcacacactgcatgccttaacaagtgtgtgcaagcccctcagaactcaagacatccaaattttattgcgtctctacttatactggtttgcttttgatttattcctctattagttctataggagtgatctcaagtgagatagcagagcaagatgccaaaagaccataaatagagtaaggtttctatagatgtgagacagatttgagagagcatttactctgtctccctgtggatgaaactgctgctgaaatggttccaatttttaggaatctgcttacccacttcattatttgacagctttccttggtgacccaaaccttgtagcctaagccatttgtctttttctcagtggagggagtgtatggacctggccccatggctttgcatgttagagacctggcagactaaagtctctagtgtttgtttgctcacatttgctgagtgacagctatgtgccagactgcataaagggtggtggcagaagtgaaaatgtttaagaatgaccaaaaacattagtaatgaaagttaatgtgttccaggcattcttctaagtggtttacatgcactgtctcatttaatctgagataaaggatacttaagcccaaactatatctaaacccaaatctcacttggctggaaacatcaatcttaaccatttattcagaaccattaaaccaatgattccaagaaaaaaaaaaaaaaa

SEQ ID NO: 222350 - DNA, 1000 bp, Homo Sapiens
cagtggtgcgatctcagctcactgcaacctctgcctcctggttcaagcgattattgtgcctcagcctcctgagtagctgggattacaggcatgcaccaccacagcccagctaattttttgtatttttagtagagacagagttttgctatgttggccaggctggttttgaactcctggcctcaagtgatccacccacctcagcctcccaaagtgctgggattacaggccactacacctggcacatttgagtattttttttttttttttttttttgagatggagtctcgctctgtcatctaggctggagtgcagtggtgtgatctcagctcactgcagcctctgtctcccgggctcaagcgattctcttgcctcagcctcctgagtagctaggactacaggtgcatgccaacacgcccggctaatttttttaaaaaatatttttagtagagacagggtttcaccattttggccaggatggtctcgatctcctgacctcatgatccacccgcctcggccttccaaagtgctgggattacaggcatgagccaccgtgcctggcctcatttgagtatttttataatgtctcttttaaagtctttgtcagataattccactgtacatgttattcagtgtttggtgtccactgagttgtcatttgccagacaagtggagatttttgcagctcatccttgtattctcagtagttccgatatgtaccctcgacatgtgaatgttatcttatgagactctgttttatttgtatccaacagaagatgtttattatttatttggctttctgtgaactgaggtcttaatatcagctcattttaaaagtctttgcagtggtattcggatctatcctgtgtgtgcctatgagattgggtgcagtgtatcctgttagctccattctcagggcgtttgaatgtgaattaggaccagcgcaatgaatgctcaagttggggttgggcgttagaattcataaaagtctttatatgctcag

SEQ ID NO: 222351 - DNA, 1000 bp, Homo Sapiens
tccagccaagcagacgacctgggaaggagggcaccgggtcccagcactggcttactggcctggcagagttccagttaatgtcaccagcactgccttgttaagcgtgctggacatttttccaactgtggtagccctggcccaggccagcttacctcaaggacggcgctttgatggtgtggacgtctccgaggtgctctttggccggtcacagcctgggcacagggtgctgttccaccccaacagcggggcagctggagagtttggagccctgcagactgtccgcctggagcgttacaaggccttctacattaccggtggagccagggcgtgtgatgggagcacggggcctgagctgcagcataagtttcctctgattttcaacctggaagacgataccgcagaagctgtgcccctagaaagaggtggtgcggagtaccaggctgtgctgcccgaggtcagaaaggttcttgcagacgtcctccaagacattgccaacgacaacatctccagcgcagattacactcaggacccttcagtaactccctgctgtaatccctaccaaattgcctgccgctgtcaagccgcataacagaccaatttttattccacgaggaggagtacctggaaattaggcaagtttgcttccaaatttcatttttaccctctttacaaacacacgctttagtttagtcttggagtttagttttggagttagccttgcatatcccttctgtatcctgtccctcctccacgccgacccgagagcagctgagctgcgctggctctgggcagggagtgtgccttaatgggaagcacacgggctttggagtcaggcacaggtgccagctccagcttttgaacttgggcaattgtttaacctaacctgcaagttgattttgagggttaaataaaggcatacatgaaaatgcctggcaaattacctgacacagagcagacattcaatacattttagtttccttgtttcaaaaaaaaaaaaaaa

SEQ ID NO: 222352 - DNA, 1000 bp, Homo Sapiens
tttttttctctttttttcattctggtatgctttgcagcatttcagctgctttggtggggacacagataaccccttcgcttccagctcttaaaattctttatctttttcttggcaaaaccagaattaagagtgtaagatagattccatgtgtgcttatataggtccctgcacagattggacttgaaccaaaattaagtccaaagaacatatgtttagaccaacttcatggaagtggaagatcctgtgctcttgaacttattttaattcttataatttgcacctatataaacaaagctcctactgtattcttctcttcatcaaccttttgtggtgatgggttgccttttctacgagcatttggaaggagtgatcaaataccgaaattgaactttctaaaacctacacatagcatgcgtttaaattctattatataaagccccaagtgctttaccttctaaaacatgcttctctataggtgcaaagttataagatatgtagaagaaaacatccatcagaatcttctggagaatatggtcagagtcttaaacaggcccagtgctgagttctttgtccacttagtcacacatcttttgtgggaatgggaaaggaaggagacagccaaactctgacaaaggcttttccttatagaataacccaaagcctaggtgagggttgatatataatgtcccatgatttaatatatgtggtttgggggaaaggacaagaaaaaactataattccacatataagaaggtagttgcccatttacaagttccagttatgtgtgtaaaacagaaaaattaagtaccaaacctattaggaaatttttttaaaaagtggatttaacttaaattactgtgtacttgaggttggctttggatatggattttctaaaaagtgatgttttattgtttatcatctaatggctgtaaactgtagtactagaataaaaaaaatggaaaatcaaaaaaaaaaaaaaaaaagaaaaaaaaaaaaaaaa

SEQ ID NO: 222353 - DNA, 1000 bp, Homo Sapiens; identical to SEQ ID NO: 117110

SEQ ID NO: 222354 - DNA, 1000 bp, Homo Sapiens
gcaaagaagcaccattaagtgcatcttctagaagttgtacagaaggactaaagcttatcaagtcaacaaagaacttaccttggaggatagagagagagaagggaccaattatgaggactgacatcctggccactctccttaaaataaacactgacatttttcttgcttgttctctctgtactcaaacctgtggcaaattcatcctagcaacgttatttgacgaggggcatgaacatttatagttgaaactgtagaaagggtcaggttggaggtgtgtaataaaaaagaattacctaggttgccaaaggtaatttaggaagggtctgatcatttagatgagagttctttggggcttattttctgggtaaggctcatctttaaaaactggcttcagaggggagaggggagaacaatgaattggctctattttctctattgggaattacaggaccattttgattcttagaatgtaaaaagcatatcgctaagtaaatcatcctggaggtcccaagtagctctatgcctgcaatcatggagacacaggcagacagataagcttcatggggaaggcatggggcatcctctgtcttgggatttgtatccatggtggtctggtccctgccttttaatccgtcctctacgcttgggcttttctgttaccaaacagcactatcccaggaactattgtctgcctgggaacactcagtagggagacactttggagacaggaggtgatgaacctttttatgtgcagctggtatgatagaaggaaattgggaaaacttgtatgctaggcacttttgtccagagcctgctgtcccatggagaaaaagttttaagcactgaaaaaatttgattaatgtatttaaatgtattatttgaagcatcattcacttgttgatttttacaatcccatgtcttaaaaaggatgaatccatgttattgtattgtaaataatttagattattaaaatggattgtttaaaaaaaaaaaaaaaaaa

SEQ ID NO: 222355 - DNA, 1000 bp, Homo Sapiens
ttccctttttagaaagattgaaggatgcaatggcaaatataaactcaatactatgaaaaattaatggaatttcagcctcaaagaacattttcctcccttcctttgtgtccttattctaatcctcctcccctggaattacacttttttatgtgttgactctacctaggctgttactatcagcctgaatgggggcgggatgagagtacctcctatccactaatttgcttaaggataagttctaagacgggctagaaaaaacactagacctggtcgattctatcaagaacaatggcaaactgaacagaggcagtcaggaggccaaatgtctgattctttgttctgtacctttcagtagtctgcaaattttctaccaaaaaaaatcccaagaatttatttgggaattattaaaaaggcaaacaatgaatgttattaggacaagaatatagcagtcaggaggccatgactacatcacagccaggcggcattccctgccacagtggcggcttgaatcatcaagaaatggataaatggggctttagtaaatcaggcttgcaggctcaaagctgcaatctgcccactctcaggtactgagactttgtgggcctcagacaccaggaagaaagttgggatacagtcatttgagttaaaaagggaatgacccctcagaaacccacattagcagtgttactcttggaactgcctttacttttaacgctctctgttctgaaaaagaggtgtttggttacgtgtgagccaacatcacgttttgttagctgtgatttacctttgtccgtttaaaagacttcacggagccattctgtatacaaggtgtgctctttccaatgtagaaggggttatggaaaagggtgcgatcctttgctgtaaactggagagaccagtcccaaacagaggggaattttaagcccttctcatcacccaattggatgtttttgcttatagcaaattcctgcaaaataaataaataaatatttgcaaaact

SEQ ID NO: 222356 - DNA, 1000 bp, Homo Sapiens
gtctgcagaagagctcttcagttgttggtgtgcactccaagtcaggatggacaatgtgtttacggtttagtattcaatgcattccttggtctttgcctaaataacagttttatatgcacattgaaatggaattatacttcaactatattattaaatgtaatgcaaccaagttcctcccagattaaacttcccaggtgttcagaattacttttgctcttctcacgatcccatattgtattatcacttgtcttctagaggtcagaattccataatatatgtcactcaaaagttacatggttgctttcacttaaggatcattatggagtttaaagatgaatgaaaaactgcttcttagtttactacatggtataggcccttttttcttaaacccagggatatgattattttgtcatataattttgtttcaggctaaaaggtaaatgtgtttgcttcagaaacttgttaacttcagttttttgaatgcaacaggatacctcccttccaaactgaactgtagaagcagagcagcagcagttatgtgacgcaacacttgatggtacagtaaatttactggcatttttctccttaaaaattaaaatccttgacatagaccatagcatggcttgaaatgctatgtctgcatgataatttaaaatggaagatttaaactttgcactccaaaagcttatttggatttttttcttgcactgttttgtgtaatgcagaataatgattttatttctacagctttgtagattctaacatttatgtatctttattttcatattgtacagtaattttactttaaattatttaaataggctattttatttatttcaaatgcagttgtattagttctcattattgaactgtctgtgcactgtatgtagcaagcatttttcatctgttgtatacaagtggaaagggtattagaagtgtaactgtgctattatttcaataaagacctcttgacatttaaaaaagaaaaaaaaaaaaaaaa

SEQ ID NO: 222357 - DNA, 1000 bp, Homo Sapiens
tgcgtggatagtatcacaacaaatatatatatatgaaatataaattcactaatgaacaaaggagattttaaagtttaagatgcagaacttgtcacttgcatggtgtgccccccgtactcacatacactctgctgttgccagcagtcgcagaccgcaggagccctgtctaaaagtttcttctagaaccagagaccagcaagtgaaattattgccatctcaaggatggcaaaagaattcaaagctcaatgtgcactatttttttctttgctgtgggacaacagtgaatgtgtttatgccagcgtgtgctgatgatactgaggggctttaggttggcaaatagcactgttttcttagctgcaagaattcattgcacaatgtttttcatcatttttgttaatgtcatctttttttggtccttgctacgaaaaggaatgcgattctgtggtcattcgcactgggttgcattgattccccctctgatggccaatgtggagtggacaaagtgtccggaactcacatcggtgatcgtcccctcgtcttaagacccagcccgctctgtgtgagcctctggggctccctcgctcagtgagcacagttccccgggggttcatgccagagctccggctgaagcaagaagtcctccagctgcgtcgtttgccgcctgtggacgagtgcgccccagtttctgccctggcagctcctggccacaccttctcagagctcacctgtgcacttctaaattgaattggcccacggtgtccaaccaagaaggagcatctgcactccgagaaagatgtgttctgtaactgccccagtgtgaccccgcagtggctctcggtgctagatatgcatgactaagattgatgctgggcaaaatgtagatgatctttcattatgttgtgggcagcgtctttctctgcctttgctatatgcagtcagcagtaagccttttgctaaaagagttttgtttgacttctgagatccaaggctgattgttgtt

SEQ ID NO: 222358 - DNA, 1000 bp, Homo Sapiens
gtcggccgagaagctgggagcctctttgagtgcggacaagaagggcgcgctgcgcaaacacagcctcgaggtgggccacccggatttccgcaaggacttccatggcgagctggcgctgcatagccttgccgagtccgacggtgagacgcccccagtcgagggccttggcgcgccccggcaggtcgccgtccgccgcctgggccgacaggagtcacctttgagcctgggcgcggacccgttgctgcccgagggtgcctccaggccaccagtgtcgagcaaggagaaggaatccccggggggcgccgaggcgtgcaccccaccccgcgcgacgacccccggtggccggaccctggagcgggacgtcggctgcacgcggcatcagagcgtgcagacggaggatggcactggcgggatggccagggctgtggccaaggcggcgctgagcccggtgcaggaacacgagacaggccggcgcagcagctctggcgaggcgggcacacccctggtacccattgtcgtagagcctgcgcggcccggggctaaggctgtggtgcctcagcctctgggcgcggactccaaggggttgcaggaacccgcacccctggcgccttccgtgcccgaggccccccggggccgggagcgctgggtgttggaggtggtggaggagcgcaccacgctgagcggtcctcgctccaagcccgcctccccaaagctctccccggagccccagacaccctccctagccccagcgaagtgcagtgcacccagcagtgcagtgaccccagtcccacccgcatccctcttgggctcgggcaccaagcctcaagtggggctgacctcccggtgccctgctgaagctgtgcccccagcaggcctgaccaaaaaaggagtgtccagtcccgcacccccgggaccatagccaagggggtcatcggccccgcgctgtacagcctccgtatacatatgtacacatataaataaagtgcgtccgtgctgcgtg

SEQ ID NO: 222359 - DNA, 1000 bp, Homo Sapiens
cagagcgggccaaagccatttttgagaacacgctgagcacctacccaaagcgcacagatgtctggtcggtctatatcgacatgaccatcaagcacggcagccagaaggacgtccgggacatctttgagcgggtcattcatctgagcttggcccccaagagaatgaagttcttcttcaagcgctacctggactacgagaagcagcatggcactgagaaggatgtgcaggcagtcaaggccaaggccctggagtatgtggaggccaagagctcagtgctagaggactagtggcaggctggctctgtgggacactgtcaacaatgggccagcccggccccgcctcgagtgcctgggcactcggaaaactgttacctcaggactctatttaaatgctgctttttctgcagcacgcttggggaaatcctgtcaggatgaaaaggaagttgagattttttaaatccctcttcgcttgctttattttcagtaccaacttgttatctttttccttatctgaggctacctggggattgtgggcagcaggcccctggactcccagaaatgctgagggtccctcttccaggggagttccctggggagcaagagtagaggggctattcccgagggtcctgtggtcagggtcctgctttgtccctggcaggctgtcagtccagctggagggggtcagtaggctccagggagtgggccctcccctccgatcttggagtctctgggtgttccttcagcctcagcctcactggtaccttctgccctttaggggaggctatgagtctgggacaggaggacaaattcagagcccagagggggaaatggagaaacctgggctgctgaggaaagccacgggtgttggcgtgaactgatgatgtctcatcccacgcccactatggccacattacctaacctctccatatctgggctattcaaggtcttggaggccagcacagacccagctagttgttgaagccagttcttttttgtcttgg

SEQ ID NO: 222360 - DNA, 1000 bp, Homo Sapiens
cagcacaagctttatgtcagagcaatctgagcgccccaggggtagaatcagttcatttacccccaaaatgcaaggcagacggatggggacttcaggaagatccatcatgaagagcaccagtgtcagtggagagatgtacacactggagcataatgacggcagccagtcagacacagctgtgggtacagttggagcaggtggaaagaaacggagatccagccttagtgccaaagtggttgccatagtgtctcgaaggagtagaagcacatcccagcttagtcaaacagagtcgggccacaaaaagttaaaaagtaccatccagagaagcacagaaacaggcatggcagctgaaatgagaaagatggtaaggcagccgagccgagagtctactgatggcagcatcaacagttacagctctgagggcaatttaatatttcctggagtgcgactgggagctgacagtcaattcagtgattttcttgatggattgggaccagcccagcttgttggccgccaaacccttgccacccctgcaatgggtgatatacaaataggaatggaggacaaaaagggccaattagaagtggaagtcattagagcacgaagcctcacacaaaagcctggttccaaatctacacctgctccatatgtcaaagtatatcttttggaaaatggggcctgtatagccaagaagaagacaagaattgcacgaaaaacccttgatcctttgtatcagcagtctctggtttttgatgaaagtccacagggtaaagttcttcaggtgattgtctggggagactatggcagaatggaccacaaatgctttatgggtgtggctcagatcttgttggaagaactcgacctgtccagcatggtgatcggatggtacaaattgttcccaccgtcctcactggtggatcccacactcactcccctcacccggcgggcttcccagtcatctctggaaagttcaactgggcctccctgtattcgatcatag

SEQ ID NO: 222361 - DNA, 1000 bp, Homo Sapiens
aaaggtttttctgggccctactgctcccctctgctgcaggtaagtcagagcagctttaccacagcttcaggccacgagagccccttcacccgccctgctgcgccataggcagaggcttataaagaaatgggttctgggccaggtgtggtggctcaagcctgtaatcccagcactttgggaggccgaggcgggtggatcacctgaggttaggagttcgagatcagcctggccaacatggtgaaaccctgtctctactaaaaataaaaaaattagctgggcgtggtggtgggcgcctgtaatcccagctactcgggaggtttaggcaggagaatcgcttgaaccctggaggtggaggtggaggttgcagtgagccgagatcgcgccattgcactccaacctaggtgacaaagctacacgccatctcaaaaaaaaaaaaaaaaagaaaaagggttacaaaaggttcccagctccggggcatcagcctgagtgcgcttgagctgctccaaacctggcccttccccactactctagcattgctacccgcatggccctggaactcccgcggcggcgggggcgggcccgtgcctgctgtgccccgacttcccacaccagccgcgcccaccgcaggtgggactcaggttcaccctctgggccaggtccttcacgaggagggagctacccttcgccagaagtttgtgagaatgtggccgcccttttcctgccctctgccccatgtgggtggggggcctcgtggcccggccggcgccccgtccccttctgcatgtctgaggccaccggcaaccgccgccccactccagatttgcccccgccctgttttgaaagccccttatttataacttttatactttgtgcaggtcgcggcgcttcctgcctcatcctcggctgcatggggcgggggcgctgtttttaacgtgcccgtttgtactgatgtatgaacttgtcaataaacacaattgtttgttaaaaaaaaaaaaaaaaa

SEQ ID NO: 222362 - DNA, 1000 bp, Homo Sapiens; identical to SEQ ID NO: 117116

SEQ ID NO: 222363 - DNA, 1000 bp, Homo Sapiens
ccaaggtcctgggtgcagccgggtgcatggcagcccttctggcgggggtgagcgcacgaccaaagtcactggaagccgggtttccggaagctcgcagcttggcctgcaccacacgccctccccttttggcttcacgccatcaggcctcaagtgggcatgggggcagggacgggcccaggaactgttgttttctcaggattctttcagctgggaacatggcaggtgagcagagcttggtgcctctgccgtggcccctgctggggcagcccgtgttgccggagcctctaagccaaagagcccgttggccgtggttggtgggggtggacgtgggggtgtcccacctggaccagactggcgtgggtgagctccacaccctgcctggcaatggtatgagagtcggacctggacagggccagctgctgggggagcggcactggggactggaggctggaagcgggtggtgtgtgtcccctgtttacttttagctgagctggggttgggtgtacgggttctgttcctctgagcctgcggcccacctgatgtttacgtgtgtgtgtgagggggggcgggggtggcaggtgtccccccctggtccccgccccaagagcctgctgtctgtatggaggaggtgctagcccggtccaccgggctgctgcccacccctgcatgccccagttgcccaccccgcctgcccctggacatgaagtggtcacgcttcatccacggctccttcccacccctcggcagtggctgtgcaatgttttaagttcacaagttcctgctcctccccacactgagctcctttgttcctccccctccagcctttgcctgggaactggtccttgtttgccgggcttctcggagggttcactgtacattcgttctcaggtggtcttgtggctgtctttcggaaaatggttattttatatgatttgtcatggaatttgttctaataaatcattcttctatcacatggcagcaaaaaaaaaaaaaaaaaaaa

SEQ ID NO: 222364 - DNA, 1000 bp, Homo Sapiens
caaaaagatgatgaagaagaggaataagaaaatcttcgataactggatgacgatccaagaactcttaacccacggcacaaaatccccggacggcactagagtatacaattccttcctatcggtgactactgtataattttcacttctgcattatgtacataaaggagaccactaccactggggtagaaattcctgcctcgttcaatgcggcaagtttttgtatataagataagtacggtcttcatgtttatagtccaaatttgcaaaccctacaactctgggtgtcataggtctattttaagggaagagagagaaaaacacccttactatcttggaaggcaatattaacaaacagagcttttttcaaatagcaattgtacttttctacctgtacccttttacataaagtgtttaaatttcagaaagatcttttattaagcatactttcacagaataacttgtttaaactatattcatataaaaaagttaaacacgctttttttcctgcctaaaacacaaatacaactgccagtatgtatttttaatggaaccctattttataatggtacgttactgaatgtgtttcatatgcgtgaccgttaagatattatcatttaggtgaaggtttcaactcaaaaccacccaacccggtggttaacgatttaatacatataaccaaaccggcagcgtttagagttgggatatacatttaaacattttcctggttaaggttcccaagagagtgtaaaggttttagcagaaagcaaaatatcttgcatctttatggaagtttaaagcatgtttgcaaatattgcagcccattgaaagaatttgcatgtacaggaaagttgtggatggagacggtttgtggaattttaagtgctcattgtagtaaacttttgctttgtagatttgaaggtacagacttatacaggcaagttcacaaaatcatgattagttacaaacagtaaaatgaagttaaaataaattattattttct

SEQ ID NO: 222365 - DNA, 1000 bp, Homo Sapiens; identical to SEQ ID NO: 117119

SEQ ID NO: 222366 - DNA, 1000 bp, Homo Sapiens
taggagtccatggaagaaagaaaaatacatgtgtcttggcagccatggtgtatttttgtccaaatggattggaaggatatttgaatatttgaatgttggtatgacataaagctgcagtgcactatagagtcaagtcattgaattaccactcctgatacagggctttattgtactactgtgaagtgtatgtgtgcaatacattggtgagttcatttactggtgtacggaagagccagcaggagcagcgtggtcattgctgggtgctattacagttgcttgtagtgagtgctgttttccaggagatggagccagttgggtgtggcagatctactgaatatcaaatgatgctcttcttcccatgtagaccttcagcaaaagccggtacttggaagccacaggctcaccttctctatctatccaataattattaatgaagagacctccataagggagcagctggctgttatcgataaatgtaccaattattaaataattagtctccaagccattcagtgatgtcttcagcatcactataggactgtctagtgtcactttttacttccttctgggtggaggctttccgactcccaatcatgaaggcaagttaatctttccagttagtgacttttgccccatagttggggtaagcacttcctagattgagaaaaagcagctacagtcaatcctgctctgtttgcctcatttggtgatcagtcagtcacacataagttccttgtattctaaatttcatgcacttctcccagatgctatagggttttctctcactgttgccagtggatgtcatccagacagtgggctcatatcttacggttttgtgcaatcattgtcgtattgtagtcttaagactcattatagtgtatttttgatatttttgaaatgtgttaaattttttaattcaataatatgagccagagcatgttgcagcaaatctattgtttgtaaaaataacaataacaataataaataaaataaagtggaa

SEQ ID NO: 222367 - DNA, 1000 bp, Homo Sapiens; identical to SEQ ID NO: 117120

SEQ ID NO: 222368 - DNA, 1000 bp, Homo Sapiens; identical to SEQ ID NO: 117123

SEQ ID NO: 222369 - DNA, 1000 bp, Homo Sapiens
caacattcggcctcatagcgacacaccagaaatcagaaaatacaagaaacgattcaactcagaaatactttgtgcagctctgtggggtgtaaaccttctggtggggactgaaaatggcctgatgcttttggaccgaagtgggcaaggcaaagtctataatctgatcaaccggaggcgatttcagcagatggatgtgctagagggactgaatgtccttgtgacaatttcaggaaagaagaataagctacgagtttactatctttcatggttaagaaacagaatactacataatgacccagaagtagaaaagaaacaaggctggatcactgttggggacttggaaggctgtatacattataaagttgttaaatatgaaaggatcaaatttttggtgattgccttaaagaatgctgtggaaatatatgcttgggctcctaaaccgtatcataaattcatggcatttaagtcttttgcagatctccagcacaagcctctgctagttgatctcacggtagaagaaggtcaaagattaaaggttatttttggttcacacactggtttccatgtaattgatgttgattcaggaaactcttatgatatctacataccatctcatattcagggcaatatcactcctcatgctattgtcatcttgcctaaaacagatggaatggaaatgcttgtttgctatgaggatgagggggtgtatgtaaacacctatggccggataactaaggatgtggtgctccaatggggagaaatgcccacgtctgtggcctacattcattccaatcagataatgggctggggcgagaaagctattgagatccggtcagtggaaacaggacatttggatggagtatttatgcataagcgagctcaaaggttaaagtttctatgtgaaagaaatgataaggtattttttgcatccgtgcgatctggaggaagtagccaagtgtttttcatgaccctcaacagaaattccatgatgaactggtaa

SEQ ID NO: 222370 - DNA, 1000 bp, Homo Sapiens
cagcagtacaaaggcatgttttaaaatctataacataaagaataaggaatagctttgtatttttgtcattgattaaattgcaccagaaatgtttatggaaatattaagaacattttataaaacatacgaaaaagtgattgtgaaggatttttatttgcatgattatagttaagcaaatttcatttcacatttttgtaatgctgtacagcagttcacaaaaaaatgttcattgtagattttgttatgttcaatgccaatgagtctgtaattttacgacctgtctgttctttttttgggtggattacgatgtaaatttttcttttctttctttctttttttttttttttgtgtagaaaaataggtgcaataatgatcaaagttttgatgtcttgagtctccatcttaggggattatcttacgtttaagcttaacatttcatgtagtaagatttggagagccacatactttacagtaaaattaagtgtgtataaaacattaattgctaacaattgttagcaaactatttcagtgataatgttcattttgaaaatatgtactgtataacattaagaaaatatttaactccctgtaacaagttccattatgaaaatcttattcctcagtgaggttatcttgctgcactctgtagcaaatttgtttaatctacattataataaaatttcttgctgcagtgcaacaggaggctttttcagtgatcttcactgtatatgtaaattacaaatgtggctgtaaaacttattccaggtattaaaggttaaattgctttctatatcttcttataacttgtaagtctgatttttaagatttccttttgtccacttgtaagaatgtcaggaatttaagaatttgtttaaattaggcatatctctgccatcacatagtattatgtcaccataatgaacaattgctatttaaatagataaccaattttcagacacatttttggatttctgtgaagttgaataaacataaaagctaa

SEQ ID NO: 222371 - DNA, 1000 bp, Homo Sapiens
tccactgcccaccagtgtggcctgtgagttgtggggccagggaacagtgagcagtgtccatccagcatccacgtttccagccatccaaggtgcctcactgcctgccctgaccacacagcccagccctctggtgagcggaggttttccaccgcccgaggaggagacacacagtcagccagtcaatccccacagcctgcaccacctgcatgctgcctaccgtgtcggaatgctggcactggagatgctgggtcgccgggcacacaacgatcaccccaacaacttctcccgctcccccccctacactgatgatgtcaaatggttgctggggctggcagcaaagctgggagtgaactacgtgcaccagttctgtgtgggggcagccaagggggtgctgagcccgtttgtgctgcaggagatcgtcatggagacgctgcagcggctgagtcccgctcatgcccacaaccacctgcgtgccccggccttccaccaactggtgcagcgctgccagcaggcatacatgcagtacatccaccacagcttgattcacctgactcctgcggactacgacgactttgtgaatgcgatccggagtgcccgcagcgccttctgcctgacgcccatgggcatgatgcagttcaacgacatcctacagaacctcaagcgcagcaaacagaccaaggagctgtggcagcgggtctcactcgagatggccaccttctccccctgagtctttcacccttagggtcctatacagggacccaggcctgtggctatgggggcccctcactcagggggagtgaaacttggctggacagatcatcctcactcagttccctggtagcacagactgacagctgctcttgggctatagcttggggccaagatgtctcacaccctagaagcctagggctgggggagacagccctgtctgggagggggcgttgggtggcctctggtatttatttggcatttataaatatataaactccttttttactct

SEQ ID NO: 222372 - DNA, 1000 bp, Homo Sapiens
tttccctttccttcaaggcctagagtatattctgaaaatttaggaatgaggaagaaatcttaatacttccttccttaacatacaacatgagtcccgagaataattgatagtagcaagagaaaactatgtcagtaacatgttgctttgtataaaaatcttatttataaatgtgaagctttttgatgccatcaaaacttattaaaaaataggatttacttttttctaattctgacctaagaaaaataatgagaacaagctgttgcaagctcttttgtagtctattgaatattttatagatattcaaaatttcctacaaactataattttttccatgatttagcagtgagtgattttctagctttggctcttattaggtattgtaaatagtagggttatatcgatatcagcttttgtgatggcattgtggtcatcagcttcatgacattttacccatttgcagtgatcctgtgtaaaactgccaaggaaagtaattacctgtaggagtttgctgagcttgaagagtgaaaactgttgtgaatgagcctgatcataaaacggaccaggccattcattattcctcaagtgttaatatactgacttatgcagtattcaaaccatctagtgcaatgtttttgtttttgttttttttttttttggtaacacaggtgcagtgtattatagaaaaaataaaaactacaatcattagcagttttaatactgctgtgtcagttttgtaaaaaatgtacattatgtcttttgacatgttgaattttaaactagggaaatgacattgtaaatcatagtagcctcttttaatttaatatgaaaaatgccactatattgaaagtacttaatgtattgtatatatttctctactttggttctagctattttatatgattgacatgttatttaaaagataactgccttgaacttttggagacttgtactgtaaataaagaaatcttaacaataaactcagaatctacttactccaaaa

SEQ ID NO: 222373 - DNA, 1000 bp, Homo Sapiens
ttggtgtgtattggggaaaatagctaaaagtctaatttttacccatttagactttgttatttccttgtataaagtgacaaatcggggctcttgtatcagtgccagctgtaatgtttttaaatgcagtggctgccttctattgtcttcctatttttgataatgcagattgttgggaaatctgtaaggaagtaactgattccaggcaaattgttttcttccttctacccaccccaacccctacccatcaccttttaagaacatagtacgccagtgtaacgtgggaaccattgagattgtatttgccctgagtattaaagctagcttagcaaaatacttttaaaaacatattggtaaatgatacccataaaattaaattagttatattttattttaaaatgcaaaatacattgatatttattaatcattggatttagggaaagggacagatttttggtgaacctgacttgtggcagatggtaaggaatattataaaacatttggatgagaacaatcagggcgaactgcatttttctgttacactggtaatcatttgaaaattgatttacctcagtgtttaacagttttttgttttgttttgttttttaaataataactaattgtcgagcactgatagagatgcagattttggtggggggaggtggtgggggagataatcacttcaccaactgcagtgcatttgtgtgtttttaaccctcagagaactctgcattttagggtacttgaggctgacttaactaaaagttttaaagtaaccttttttccattgtaaatatttctgtaaatactaccaattggaaattagaacagtagagtacttttctgaatccaatcctatttttattttatacagtatttctcagctgtgatctttggagcaaaagccaacggcaggaaaaaatagtttgtaccagtttcatgaagtatgtctttgggtttttgtaaataattttaactcaaataaaattgctactttcaatac

SEQ ID NO: 222374 - DNA, 1000 bp, Homo Sapiens
atgcactgccctgagggtagccatgcccttgctttgcccaactttttattgggccatccctgagtgggtggagacctgctgtcatgagctggccaggagaacctgctataaaaaaatcaaggttttgtttctttgaacttactctgttttgatgccaaattggagaccattttcttgtctccttcccccactcatcctggccttccctggagttcttcctagcccagagctctgacagtccagcagggtgggaaggagggagtttgggcaaactctcatccctgataccacattgagatcctgggagccctcttttcgtactgagtatggagttgtagagccatcctaggtgccatccccttttggtccaaacattgggcagcgctagatggcaggaagcagccttgaagacccgtctttcccccacagcagcaggggccccagcagtaacaaagggtacctccaggggtttgggtagcgctgccctctggcagtcatgcaccgctgtctgccatagccgctctagggtcttggcagaattctgagcttgaagtgcagctcccttactaccctttcccttcctttttcttccctaataggaggtacaatctgcttttgtttgtcgttaagtggtcactcccatttcctttatcttggccgacaacacagagaggagggggagctgggcagtagcttggggtgggggtgggcacctgtggttgtttttaatgggaaatacctctcagagatgttcatgcaggctccctagggccccatcccagtgccaggctggtttccatggagatagggcactgaggctcccgtgaggttggaatcgacttcaccatgggggtccttcagccagcatccagctccccacccccaggctggcagtagcactgctgagatgctgtatttccacccaattctgggtatatcagtgtgtcttgcagaatcttggatcattaaagataaacatatttttaaaaaaaaaaaaaaa

SEQ ID NO: 222375 - DNA, 1000 bp, Homo Sapiens
aggttaaagagggcataaaggagcactcaattgcagagatttgaggacattatttttattttgagctttaaaaagatgaataggtgttctcaggaggtagggatctggctgagagggaataatctgagcaaaggtatgaaacagcctaatgcattagagaaaaaagttcttttagtaaggcatttggggttggggaagctagaaaaagaaatgggagctggtcacacagggccttgtgtgccagactaaggggtttgtagtatatattgtaggcagaagagatccatcaacagattgcaagcaaggaagtatgttcactttaaagtttgagaaagaatagtgtggaagcacgtctcaaatttagacttgttccccctctgaaccgtgaatcagaccatttcaggtagaagtcttccccggtttatctgatctactcggggcctcaggcttctcagctgggaagagaggatgcaagaccagactgaagaacacggttgagtccccagaaccaaaagggggcctttctgcttcttagccagctacctcttcgagtttttcaaattgtgagggggaccataaaaggatggaaacttttagatgacattctacaaattatttttttctttaaattaaaagaacctagccaataagatagagaatgggcatctaaggcatctcagagctctctgatgaagccaggttgtcaaagatcatttgcaaaagaagggaaaactggcatgacaaaagctacagagaggagagtgaaatatagaagtgtttgaaatgttcaagctcacaataagcttaaatttatagaaaatgctaaggttgtcaagaaggcttttttttttttcttttttaaacctgagggcaaaaaggaatggataaagtagtgtaatggattgacaatcaggaagaacagaataactcagttttttttctcctacaaggagatatggctggaccaaaataaaatgacatgaaattgcaaaaatgaaaa

SEQ ID NO: 222376 - DNA, 1000 bp, Homo Sapiens
aagaaatacccgctcctcacctactccctcatcctaccaaggtgcctgaaaatgttcaagacttatgttcagggtgggatgatggaaccgagggcttcatcaaagtgagaggaaaggaaaagcatctggcatgtgtttcttggataggggccagtgcagtgccatcctacaggtggctggagcagctgctttgcaacctgatcaccttgagttctgagcagggactaggcttgcaggtgagataatgggccagggcacccagtccagaaggagcaatggcacctgggcagtgccagggcttaaagcccgctgctccttttcggtagaggagaggcccatcactggtgtggtggggtgggctctcccttaggcttgggcaaggcagccacctgcccttgctctcccttagtgttccctggcctccctgccatcaggttgctgggagtggagatggagggattattgagcagaaaatgagttggatggagataaacagctcccatccctgggtaatggatggtaagatgatggagattcctaagattggtggagttgggcaatgcatagccatctgactccttcagggtgctcttgatgggctggctgtaagggagactcagtcccagcctctcccctctacaactcctgccactgttggccatgtcgtaaggcagcagctgtgccaggatagctgggtccattcagagcaccttgagaagtgttgcagggaggtgttaagaagagaactctgtgcaaacagtgatggaaggctgttgtcttggtgtatcccttgcctcatagtcaatatattttttttttggcgagtcaccagtgacccgagccctccacaccagcctcctgtatctcatcaggtcccttctcagtactgtatttgctcagtgcatcaggaatgggtgtatgggtgtgtgtgggtgggtgtgagtgtgggtgtgtacgtaccaataaacaacctggttttaagacaatgtaaaaaaaaaaa

SEQ ID NO: 222377 - DNA, 1000 bp, Homo Sapiens
atcaaactgagcctttgatgtcacattctgacacaagatgcaagtctgtgcaaaacccaccaaaatgctcctatccaacaattatttttattttctccctgctctgtattgaccagaaaacaatgattttataatatttaacccaccaaaaagtccctccaacagcaatatcttatgaaaggctggctgttctcaataatttcattttcttggccaaagccaaaaggaatcaaaaaatccttggagtgcttgcctttccacgtgacttttaaaaggctcttaaagagcaaatgtcctcttctccttgctgctagagtgggaggagaaagatgtcttgccttaaaagtttactgtttcttctgttcttctagcatctctcaaaaaattcacagtactccattttggggtccaaactgtaatgctcaaaataataaatgcttacacgaaaattatttattgagaatattcatataaaaattacctaaagcaaagtaaaaaaagtaaaatcaaggtggtatatttgaagtgaatggtgattggaaatttttagctgtaacaaaaagaaagaaaacaactttttttaaagcctcattctcttttctttcaaaatgtaccttattcccacacactcttgggctgacctttattttatcaataagctcaatattactttgtttaaaataagatgcttcagcaaaagtcattctctctttaaccatataatttaaaaactcctcttcacgattgatagcaaaatcagaaacgttagggcaccagtgagttgaaaaaactggtcttaagttggaaaaactattattaataatattatcctatccatccatatctattgaaattgtacaggtccataatttcattttaattaattataggaaagaagaaaagataatacccatttgttctatcacccctctccctatcattaactatcaaataaataaataaaagcaatctgatttccaacgtggtactaaaaaaaaaa

SEQ ID NO: 222378 - DNA, 1000 bp, Homo Sapiens
aagcatcttcctcatcctcatcatcgtcttcctcatcccgatctcggtccaggtccctctcccccccacacaagaggtggcgaaggtccagctgtagttcctctggacgttctcgaagatgctcttcctcttcttcgtcatcatcttcctcttcgtcttcctcatcctcatcatccagttctcgaagccgctcacgatccccatccccccgccggagaagtgacaggaggcggcggtacagctcttatcgttcacatgaccattaccaaaggcaaagagtgctacaaaaggagcgtgcaatagaagaaagaagggtggtcttcattggaaagatacctggccgcatgactcgatcagagctgaaacagaggttctccgtttttggagagattgaggagtgcaccatccacttccgtgtccaaggggacaactacggcttcgtcacttatcgctatgctgaggaggcatttgcagccattgagagtggccacaagctgcggcaggcagatgagcagccctttgatctctgctttgggggccgaaggcagttctgcaagaggagctattctgatcttgactccaaccgggaagactttgacccagcacctgtaaagagcaaatttgattctcttgactttgacacattgttgaaacaggcccagaagaacctcaggaggtaaccttgggcccttccctgctatcctttttctcctttggaggtgcccaacctcctccacccccttcccctactctaggggagagagctgctagtgagatgactgttttataaagaaatggaaaaaagtgaaataaaaaatatgttgaatcagattttttaaaaggggtatttgtttttttataacaggtattgaaacaagttaacttgcattcctatgtaagataggaggggctgaggggatccccagtgtttggaacataagtcactatgcagactaataaacatcaactagagagaactcccaaaaaaaaaaaaaaaaaa

SEQ ID NO: 222379 - DNA, 1000 bp, Homo Sapiens
tgaactcccctcctgtgatggaaatgaaagttgggcttatcgcagcgggacaaaaacaggtcccaggtctgcaatatctatatacagacctatcgactatgggatctttgggaaagaacaacagttagctttcttagaaaatgtaaagaggtcacttacacaaggaagattatggaaaccaagttttcttaagaaccctggcttcctaaaagatgatttgaggaaccctcccaacccctcagagtcattaagctcaaattctcccagtagtcaggtgccagaagatggcttatctccaagtgaaccgcttaatatctatgaggatgacccagtggactcagattgtgacacagacacaaccacagatgatgaatactacctggatgaaaatgacaaagagtcagaactgtgaggctttttcaataaaatgctttacttttttcaccaaaagcttataatggaactaaggtgtacatgtgcatgtgcatggaaggataaaagatctagtctgggcagtgtctgctctgaaatgtcccacatctccttttttttcctccacaccctatatagacacttcctgaatgctagaacaatgaattcttgttttgagagagtctctgctattttctatctctgtaaatgttcttagcctgcctttccaccactcccacttaatccctgattcactgtctgatttgggctttctgctttacttccctcctaacatttttcatctttaattgtgatttacaaccctaatatcccaggcacatacaaaacttatgaattacccagcacaactgtgaaactctgtattgcttcttccggtccacaccctatactcatgacattaaataaaaggtagggatgataacagtggggtaaatattatcatcctgtttgactcatgaacatttaggaagtttaaggtggtgatcttctctttcaaacaaagataaaggaatttattttttaacctgagaaactgattgcaaaaagg

SEQ ID NO: 222380 - DNA, 1000 bp, Homo Sapiens; identical to SEQ ID NO: 117131

SEQ ID NO: 222381 - DNA, 1000 bp, Homo Sapiens
ccaaatccacgttgccaaccacatgattgaggaaggcatcaaccacgagtgtaagctgtgcaaccagatgttcgactccccggccaagctcctctgtcacctcattgagcacagcttcgagggcatgggcggcaccttcaaatgccccgtgtgtttcacagtcttcgtccaggccaacaagttgcagcagcacatctttgccgtgcacgggcaggaggacaagatctacgactgctcacagtgccctcagaagttcttcttccagaccgagctgcagaaccacacgatgagccagcacgcacagtgagggatcgctcaacaggacacctctccgcagaaggcttgccggagacgccgtggggagggccatttgaacattacatccaatcaaagtgtcatttgcaacccagatgtaaaactctaatgatttggccatgaggcgctgctattataagcagctggaaatgaatattaatggcagagattaaaagtattccatgctcagtattttttattgtcctgctacagctagtgtgcttttagactttccgccgcagactacatttctagagttagagaaacctgctttttaaggctattgtcctttgttccttcatgtattatattgatagtttttaaaaaagaattagtgtgattttttttctttgcttcttttttttctttcttgtttttcttcccccccaccccccacccccttcggttaactactttttaattgcaattctaggtaattgtgcatcgtgatgtgattgcttggctattgtctgaatatttccttttaattttttaattaaagactaatgctttgattggatttgccagttcaccggacagtgattaaaactatgtaatgaatataatcggtttcagtgcaactggatggtctgcttttaaatgtgacttaatctgactgcagtaactagtacagttcaataaagggaatccatgcgaaaaaaaaaaaaaaaaaaaaaaaaaaaaa

SEQ ID NO: 222382 - DNA, 1000 bp, Homo Sapiens; identical to SEQ ID NO: 117132

SEQ ID NO: 222383 - DNA, 1000 bp, Homo Sapiens
accacatttgatgtttgaagttgtaatctgtcccatcataaacttacctggagctcatgtggaggaacagaaggccaagatccttgctttgggggtgcctcacgaagcatccctgtagacacttggccccagcttcactgcttggaagcatgtccctccctcttgagttggctctgatttgaaatcgggagaaacagagctgctgccaatgggatcttttaggtaactccctccctagcttccgtgtgtctgtgcagtgcccatgagctgctgccaatgggatctttcaggtaccccctccccagcttccctgtggctgtgcggtgcccttgacagatggcttctctgtttccctttgcccagccaggctcccctccttcctattagctacaaaactggataaacttcagaatatgagccaatgagtaggaaggaacttgaagactaaagattttactctctcccctatccatgccccctacctctgactctctctgtgtgaacaggaaactttagggtagatgaggagaatgaattggttatcagagtggaagaccatggcccaggatccctgagctttcccagtagcctccagtttcctttgtaagacccagggatcacttagccatagcctgaatcttttaggggtattaaggtcagcctctcactcttccttcaggttactaacaaaatttcgtagctaaagaatgccatggccgggtgcagtggctcacgcctataatcccagcactttgggaggccgaggcgggcggatcacgaggtcaggagattgagaccatcctggctacgacggtgaagccccgtctctgctaagagtgcaaaaaattagccgggtgtggtggcgggcgcctgtagtcccagctactctggaggctgaggcaggagaatggcatgagcccgggaggcggagattgcggtgagccaagatcgcgcccctgcactccagcctgggtgacagagccagactccgtctcaaagg

SEQ ID NO: 222384 - DNA, 1000 bp, Homo Sapiens
ggcagctcctggaccagagtcgagcccggcaccaggcaatctttggcagccagacactacctaactccaatttatggacaatgaataatggtgcaggttgtagaatttccagtgccacagctagtggccagaagccaaccactctgccacaaaaagtggtaccacctccaagttcttgcgcctccctggttcccaaacccccacccaaccacgaacaagtgctcagaagggcaacatcccagaaagcttccaaagggtcctccgcggaagggcagctgaatggactccagagcagccttaaccctgcagcctttgtgcccatcaccagctctacagatcctgctcacactaaaatatgaaccacaaacacacagagaaacaacctgttcaccactcctgggtgcatgattgagggtgaagcatccaccagcacttcaaggggtccatagtatttttttttttgctgcctcaaagtccccaaagccttcgagcagaagtggcagtagatggttgccaatcagccaatgcagactttcactgggacaacaagaaagcagatcttctgggttttgatggaacttggcagtggggacattcagctgatgcattatataccccgtcagagcacacttgtatcttttaccttccctttgccccatgcccccaaactgcttaggtcttctctgtccctttactgctgctgcacagagatgatataaaagaggctctttggctatttgcattttgcttcctcttcttttccagattacagtatgaagctttattttctttgtacaagcttaaaatttcaacatcatcatccgccaaagttgttcctcccttttcggaggatctagggggaaagaggagcattcatcacaagtttcctagagagaggagacaaatcggtgtgccattgacaacatgagccagggtaaaggcaccctttggaattactgatttcaaagattaataaagtaattctatttttaaaaaaaaa

SEQ ID NO: 222385 - DNA, 1000 bp, Homo Sapiens
ctgttcctccaggaaaccgtttctttttttccttctttaaaagcaaacagaaaaagatatatatatatatatatatatatttattttttcatgtagagttggcgccagaacaagcctgtatggccacagtctgtggattcatccccccaacctcaagctgaggaccaaggcgtgtcccctgtgggctgggggtcagtgggaggaccagagggatgaagtcagggcaggccggtgccctttttgggaggcaccaggcggggaggagttggcggagcaggtctggctgtgagccagcaccaggcaacccggcccttgtccagggacctctgctgccttctctctggggtcaggaacctcagaggagggggctctggggactgcataggacgcaggcactcggaggtgccggtgtggatgggtgggggtgagagaagagggttcttatcgcgtctcctgtgatcagcctctggccccctggaggaggaaacctcagcgctgcccctgcccccaccctcacccccaacaccaagagtgaggtgggcgtgccccaggcagcgtcctcagccctggccagctactgtgatgccatcttctcccccatccccttctctggggggcccacccgtcccccacccccaccccttagaccctcatcgggtccctttttttttttttttttcagttgtctcctcccatcttcagatcattcgaatcattttggggacttaatcatgtacatggacaagtgtaaattatgatttttggttttgttttctgttattttttaaggatttctgcaaaaacagatctatttaatttgaggttgatgttctatccaatggccgaagatagcagcaggttttttttttcatatgttgatttgtttcatttggattttttttttattattctttattgtcttttttttttccccatccctgtcttgagattttctggcatgtttctggaggtttcaaaggaaataaaggtttcatagaaa

SEQ ID NO: 222386 - DNA, 1000 bp, Homo Sapiens
ggctgcagtgagttgagactgcaccattgcactccagcctgggtgacaaagcaggactccgtctcaaaaaaaaagaaaagattcatgatgctgctgctcccagaaggtttgctggatgtgtttacataggactctaacttgtgtgcactacagttgttcaccagggccagtgattcaccccagtgtgtggccagaccatgactgtgtagcaggaatgttttaatttgtgcttccttagtaaattgaaatatcagctgagagattatttgctgctgttattcaaaaggccatttatgaagttagtatttgagccccataagatctttaaaaagcctccaatcatttaaaggaagaaatcagagttgctataaaattcagtaaaaagctcatagccaaacggctgtgctcagatggaaagtctgagctgaggttggtctcttgccaaaccgtggctgttgtgtgttgttcttcatgtcttcgagttcattttttttcattctgcctattctggcatcagctcacttgaggagtccctcagccttcttgtatttaaggcatcgtcttagactttgtggctctaaagtacctgtctgttgagatttcaagtctcttgtcaccatcctcacacatgacaacaaaacccataatgcataagtggcctttttgaaccaagactttgcaaactgatctctcccccgtgaaggagttgagcacattagcaacaatgtacattaattttggattttcattttcatgttttattttgtaaatattatctgatgtttggagcttgagtatacagactgtaaatatagttcttgtatttgtactaattctgattcttttgctgtatagccttagatgtgcaatgcagacactatctaactgtgtgtggtaaccttgcgtcacggagctgttagtgaacgaggtaaaaataataaaggtacagccagtgcaaaaaaaaaaaaaaaaaaaaaaaaaaaaaaaaaaaaaaaaaaaa

SEQ ID NO: 222387 - DNA, 1000 bp, Homo Sapiens
ctctgtgagctctggctggcggagaagggcaggtgtccggagctgtcggggtgaaggcttccctggggctcctctggccgtgtggggctaggagagcgctctgtagagttgtggccaaacttcagctggcttggccctctctctgacctcagggcctggccacacacttccatgtgtctttttgcctgctggaggacacggaccattgatgcacttggtgggtgggaccctgcttgtgttggccccacgtggggcagtgcttcctctctcgagccagtctatgccctttctccagtaggccccagcccagacctcttcggcttcaggaacttgcctcgccctgcaacgttcttatcctgatcaaagtccagacaggttttggggggggctcaggtctgggatgagaagggcactgccctccctcacccatattgcatgcccccccgccattcccttacacctaccccacctacaactgaagacaatgcactttacagatatcacccacacacacctcgctggggcaggggcacccagcatcagccctggggagagaggctcccaaagggccaccatgagcccaagatatccttcctgaggcagagattgaagccatcagagctggggttgggagccagaatgcctgagtccttctgtccgtcagaatctccgctgcctctccagcccttttgcagccctgtttatttattataaatatattttttacaagccccagctcctcttcttgccccgcatatccagctcctcactcagctcctgcctccctctcccctctccaccatgggctgcagtatagacagacagatggaccctggctgtacgaagggccagggccactggggcttgggggcgggggagggtggcagtgggaggggctgtatggagaggagctggggttcaggcattgtcttttttcctccttgtatataagaatgtatatttgatgcctcataaaagaccttgtgctcaaaaaaaaaaa

SEQ ID NO: 222388 - DNA, 1000 bp, Homo Sapiens; identical to SEQ ID NO: 117133

SEQ ID NO: 222389 - DNA, 1000 bp, Homo Sapiens; identical to SEQ ID NO: 117134

SEQ ID NO: 222390 - DNA, 1000 bp, Homo Sapiens
aaacgcctgtcccctgtaactcctaggggtgcgcctagacaggtacgtctgttttttattttaaaagatatgctatgtagatataagttgaggaagctcacctcaaaagcctagaatgcagtttcacagtagctgggatgcatggatgacccatctcacccctttttttttcctgcctcaatatcttgatatgttatgtttactcccaatctcccatttttaccactaaaattctccaactttcataaacttttttttggaaaaatttccattgtatcagcccctgacagaaaaaggatctctgagcctaaaggaggaaaagtcccaccaactaccagaccagaacacgagcccctctgggcagcaggattcctaagtcaaagaccagtttgacccaaactggccttttaaaataatcaggagtgacagagtcaacttctgcagcacctgcttctcccccactgtcccttccatcttggaatgtgtctaaaaaagcatagctgccctttgctgtcctcagagtgcatttcctggagacggcaggcttaggtctcactgacagcatgccagacacaactgaatcgaagcaggcctgaagcctaggtcagggtttcaggagtccagccccaggaggcaaagtcaccaatgcagggaggtaaatgccttttggcaggaaaaccaatagagttggttgggtggggagtcaggggtgggaggagaaggaggaagaggaggaaggccagactggcctgccctttctcccatacttcaccccagcagaggttcatgggacacagttggaaagccactgggaggaaatgcctcactacaggggggcctcctgtagcaagcccagccggtaatcctcctaatgaacccacaaggtcaattcacaactgatatcttagctattaaagaagtactgactttaccaaaagaatcatcaagaaagctatttatataaaccccctcagtcattttgaaataaaattaattttac

SEQ ID NO: 222391 - DNA, 1000 bp, Homo Sapiens; identical to SEQ ID NO: 117135

SEQ ID NO: 222392 - DNA, 1000 bp, Homo Sapiens; identical to SEQ ID NO: 117136

SEQ ID NO: 222393 - DNA, 1000 bp, Homo Sapiens
tccaagcgctgtcccagctgtcaggctcccatcgagaagaacgaggggtgcctgcacatgacctgtgccaaatgtaaccatggattctgctggcgctgcctcaagtcctggaagccaaatcacaaagactattacaactgctctgccatggtaagcaaggcagctcgccaggagaagcggtttcaggactataatgagaggtgcactttccatcaccaggcgcgggagtttgctgtgaacttgcggaaccgggtgtctgccatccatgaagtgcccccgcccagatccttcaccttcctcaatgatgcctgccagggactggagcaggctcggaaggtgctggcctacgcctgcgtgtacagcttctacagccaggacgcagagtacatggatgtggtggagcagcagacagagaacctggagctgcacaccaatgccctgcagatcctcctggaggaaaccctgctgcggtgcagagacctggcctcctccctgcgcctcctgcgggccgactgcctcagcacgggcatggagctgctccggcggatccaggagaggctgcttgccatcctgcagcattctgcccaggatttccgggttggtcttcagagtccatcagtagaggcctgggaggcaaaaggacccaacatgcctggcagtcagccccaggcctcctcagggccagaggcagaagaggaggaggaagacgatgaggatgatgtgcccgagtggcagcaggatgagtttgatgaggagctggacaatgacagcttctcctacgatgagtctgagaacctggaccaagagactttcttctttggtgatgaggaagaggatgaagatgaggcctatgactgagggggcagatgcaggaaacacctagagcagccccagagtcacggggctgagggggcgggagctgcccctgtcatagggagggggattcccagcgtctgtagtgcttcctgtttgctgaataaaggtctctttctcacacaca

SEQ ID NO: 222394 - DNA, 1000 bp, Homo Sapiens
cagctaaattatcaaaagcactctttgcacagatgggtcagaatctgttaaatcaggctgcatctcaaccaccacatatcaaaaagagtttggaggaattactcgatatgacaattttaaatgaattatgaatcttcgataaaatactgtatgatgaacaaaagtgtttacatgatgacaaatggaactttctaaaagttatgttatcagtgcctgcacttcacatccagcaaattaagtcaatggctatttttatttgcagcctatgagtacacatctgtcctatatcaaccttaccacttatattcatcacataaaaacctaaaatattcatgaataattcatgaaatctgagtcacatgggatgaattcaattttaatatttttgagaaaagtcctgctcatttgcactattctatagaaactacaatttgttgccctatatgtaaaattagaattgtaattaaaaatacacattttattatgtaatcatgttctggtatgtctcatttctcagccttattttataacgtggaagtcattgaactatgttatcagaaactaagtttgtatattatttgtgaaaaacatgtatttctgaatcagtccgctaatatgattgtgcagtattagcttgcttttgctgctgtgttaatgtcatatatttgcttaccttttgggttcaattatctacataattgtgaaatttaacaagttataataaagcatgacaaccaaagttttagaaaacattaaacattttaaatgcacgtttaaaaaacgtgttgaatgtaacccccctatttttgtgtgcaaacactaaattttattgctttatgttttgacctttataaaggtgttattctgctgcccagttttgtaattctcaaaaatagtgccaggtcttctatagcttttttcagaattcatgggcttacaagtactgtatgcatctttaaaaagaaaaggaatgttataaaataaaaggatttatttcttt

SEQ ID NO: 222395 - DNA, 1000 bp, Homo Sapiens
gcgatccgggctgggccgctgggcaggctgaccccctgccctcctgcggccatcctgagttggggtgaggcctgggcagccggagggcagggctcagggagcaggaggctgcatccgtccacccccaggcgtgggggacaaaagccaaaggtgccaggccttagagcagacaagggctctcagccctggcatgccccctaaagggaccaaggtcctcctatttcccagaaccccgttggggcagatgttactgaacctgtgaatcagacgccaggagtgagggctggggagggacctaactggagcctcagtctgacattccacgccggggtgggggtgggcatgagcggtgggaactgaggctgcccaggacccccttcctaggatgccccggcttcagtcaccccactttaactttctaccaggaccccctccccctacctcaccttgctatttattgctgtaatttattgacctcaaaaatgctgcataacagacctcactggggcagggaggatccccagggctcccaccctccacttggcgggccccgtggggccaggtgctgaggggagcctctctaccccacccatcactagcttccctctgccctctcccaccccgggggggacccaggttgggcactggctcatttctcgcaaatacctcgaaggggaggggggagggatggggttatagctgttttgtttaattggaactggaagagggatcatgttttgttttatgcccttcccagaaggggggagggacaccgggatcgcactcctgtactggccaccgccgctgtcacttgtcacattgagttcatgtcccttgagagtttgtataaattcaggtcagagctgcagctacacagctgcccagtgtcatagaaaagcaattcaccaacgactgatctctccattcagaagtgtgcagtcttaaatgtacagcgataagaaactgttattttatgatcttttcattaaaagcttgattg

SEQ ID NO: 222396 - DNA, 1000 bp, Homo Sapiens; identical to SEQ ID NO: 117137

SEQ ID NO: 222397 - DNA, 1000 bp, Homo Sapiens
cctggccccccggcccaacttatggacagcagtgctgttcccgggacagctctcggaactgagcctcgactagggggtcattgcctcaatagttccctcttggtgactggccagccctgtggtgacaggcacccagtgctggacttaaggggccacaagcgaaagttggccacaccacctgctgcccaggagtcatcccgccggcggtccaggaagggtcatctgccagcccccgtgcagccgtatgaacacgggtatccagtctctggcgggtttgccatgccacccgtctccttaaaccataacctcaccacccccttcacctcccaggctggggagaactccctgtttatgggcagtaccccctcctactaccagctgtccaatttgctggcagatgcccgcctggtgtttccagtgactactgaccctctggtgccagcaggccccgtcagttcctcttccacggctacctcagtcactgccagcaacccctccttcatgctcaacccttctgtgccagggatactacccagctattcactcccattctcacagccactcctgtccgagccgaggatgtttgcgccttttccttcccctgtcttgcccagcaacctttcgcggggcatgtctatctatccaggctacatgtccccacatgcaggctacccagctggtggcctcctacggtcccaggtgcctccatttgactctcatgaggttgccgaggttgggttcagctccaatgatgatgaggataaagacgatgatgtgatagaggtcactgggaaatagctagggagcccctccccacctcacttggggcccccagcaggttgcccaccaagctggaaggcagtgatttagaccttttgagaataggacacttggcaggagggaaaaggaagaggacaaaggagggtggttggccaaagtggcagagctctgttgctgtttaacaaaagaggcaaaaaaaaaaaaaaaaaaaaaaaaaaaa

SEQ ID NO: 222398 - DNA, 1000 bp, Homo Sapiens; identical to SEQ ID NO: 117139

SEQ ID NO: 222399 - DNA, 1000 bp, Homo Sapiens
catccgtgggcaccaggtctgtgccaagcacagggactccaggggcagctgccattcgttccagtgatgtatttggggccttctcaggtgaggaagccaaggtggccaaggccctcggtcccctgccctgatagggcttacctgtgggtgggggagggagaccacacatgtcagaggtagtgaaggccgctccaaatagtgactggggccaggcaggcggaaaagagaacagaagagaatccagaagtgttcagacagaactagggacaacagaggggcctccatggtggcatgggtcagcagagcatggagcaggcagaggaagcctatctgtggggctgggtacatttctctgagactcacggaatgtaagtgttgaggtttctgcaaagagggcgcaggccctgcagtgacggttcagatattgataacccatcccccttggcaggtgggggcttaggcatccatattggattcagaaaagaaaaagaatgatgcttcttgcaacaaaaacaaaagtgattatgtcacgagaggagaggctggagggccatgggagttcccagctggctcactcatccgtccaggaggtgggtctcatggtttcattttgctttgggcttacttagagttttggcaaatgcagagttatgtaacgaacccaacaatgaagatacagttctgtcacccccccagcattctcctgtggccctctagtccaccccccgccccaccccagcccctggcaaccactgatctgctttcacaataaccgtatggggttttttctctttccttttttgtgagcggtatttaattcctttgctctaatatgtaatattagaacatattacaaagtagcaagaaaaatacgacattggtgtaaaaataatctacacctcatggaaagaatgaagagccagaaatagattctattctgtagaaaatcttacacaataaaggacttcaaaataagggtaaggaaggatgctttaacaag

SEQ ID NO: 222400 - DNA, 1000 bp, Homo Sapiens
gacgggaacacatggggcaggtcctggaacttggtggcctgaggactgaggccattgccctggtggaaaggcctggcctggttcctgtggcttgggacctgaataggcaggtgctgctggctccgtagaaacccttttcccatcttttgctctttgccaaacctaccttgctttgggagctgcctgcaccaccccagagaaggccccaccttcttcatccctcagacccgaggaggcctcccagtaaggagtttcccaagaggggactcacaggaaacaagtcttagtgcttgggagggaggccccgctgcgtgctcagactcacagccaacctggaaggtagacgagatagcgccacccacgcccctccacaccccagactccgagtaaagcgggcggtagggccggagtcacctcccctatggcagtggccgccgctgtactccatcctcccgtcaggaagatcagctgtaaataaacgctgggctccccagagcacctgtccgcccactgcccttgctgttctgggatcttcgctgcagttcacgggaaacaagcctgagtccgctcgcacccgcggctgctctcccggctcggcccggccgcctctgtctccggccaccgggtggcgctgccgagccagagccgccgcgtcccggcgctttccaggagccccaggcccggaggaggcgaagcccgcagagcaaaggtggaaacacgtgcctacgctgtaaagaaatcctgttccagagcatacctgttgtacaaacagacactgttcctaacgagaggagtgacgtattttcatcaccgtttttaatttgttttcttacgggtttacgattttgaatttttcttatttggttgaaagaattttgattctatcagcctgagtgagttcagcctgtaaaaaggatgttaagctgtgggtaaaatatgcaaacgaaaagaaatatattgtacaaattctatataataaggtaaaaaaaaaaaaaaaaaa

SEQ ID NO: 222401 - DNA, 1000 bp, Homo Sapiens; identical to SEQ ID NO: 117141

SEQ ID NO: 222402 - DNA, 1000 bp, Homo Sapiens
gccgaggtctgcagcgacttcctcaaaggctactgccccctgggtgcaaagtgcaagaagaaacacacgctgctgtgccccgactttgcccgcaggggggcgtgtccccgcggcgcccagtgccagctgctccaccgtacccagaaacgccacagtcggcgggcagccacgtcccccgccccagggcccagcgacgcaaccgccaggagcagggtctcggccagccacgggcccaggaagccttcagcatcccagcgccccaccaggcagacgcccagctcggctgccctcactgcggctgccgtggctgcacctccccactgcccaggggggtcagcctctccctcatcctcgaaggcttcgtcctcctcctcctcctcctcatcccctcccgcttccttggaccacgaggcaccatctctccaggaggctgccttagcagcagcgtgctccaacaggctctgcaagctgccttccttcatctccctgcagtcctcgccgagcccaggagcccagcccagggtccgggcccctagggcccccctcaccaaggactcagggaagcctctgcacatcaaaccacgtctgtgaggaccccagggaccggcctgcacctacctcagaccctcatccttggagaggaaagaggctctgtccaccactctaccccacaggagggccgcccgccaccaagcctcacctgggggccacagggacactgctctgcctgcctggccctcaaccttccatgaccagcgtgtgcgcagggcctggtcttcctcccccaagccaggcccctgtccccaccccaccaccttccagggtgccaggcagggctggcctccaggcctgtccccgactgccattggcaacagtggccctgcagcccccagccctccccacccaggttttcggcccagtgaagaggccactggccaggcctcccaggcaggtgttttatgttcagcaataaaggttctatccgaaaaaaaaaaaaaaa

SEQ ID NO: 222403 - DNA, 1000 bp, Homo Sapiens; identical to SEQ ID NO: 117142

SEQ ID NO: 222404 - DNA, 1000 bp, Homo Sapiens; identical to SEQ ID NO: 117143

SEQ ID NO: 222405 - DNA, 1000 bp, Homo Sapiens; identical to SEQ ID NO: 118381

SEQ ID NO: 222406 - DNA, 1000 bp, Homo Sapiens
aaggagtattatgattgtaaaattgctaaatatgactgtaacacagctttgtggtagctgtgacacagttcacttgggcaaaggagtggtgatggactcgttaaaatcatatatacttgaatagtccattgaccgaaactctttatagactattgtgtaaatgtggaatcacagactgttaacattgcctggacttcagcagagtcctggagctgctgggacctctcctatcatgatgaacttggacttttttttttgatttctggttttaaaaaacataaaattatagaatccagataattcgctggagtcattctgatccaccatgtagatctgtatttagtatcatttggatttggagaagtgttgattacattatggctgtgtaataaaatttttattaaaactgcatcacactgtagccactttgccaccacctccccacatgtagccgctgaaacccccacgagatgccaatgcacacagcagggagaaaagccaaccaaagaagaccgaagggtatctttccacccgagtagcctctgtagtgattgggaccaagactaaggacttgtctccaatctcagctgaggcagtgcctctgaaccaagatcttggtcaggcattaagacactggctttgtcctaccaactaggatttcttggtggttcacactatttcttgtgctggggaattccctcattgggcccctcctccctccacagtgtggtttcagtgttgaagggtgcagcacccaaggttgtttttatgcattttttcagttccttccaagaagcaaaaaggccagtgtccatctgcctagttcataatgtttataggtctgtttgtctgtcttgcttctggcaggtgtagggaaagtctactgcctgccactcccttcaaaaagaatgtttttgcttttgtgaagtcctgacttgccactcaaactgtaccaatattgtaaataaatgttatgccattttaacaaaaaaaaaaaaaa

SEQ ID NO: 222407 - DNA, 1000 bp, Homo Sapiens
tcctcgggagcagggttccaccgggaagcgtttgggagccctgtatcacacggggcaggcgggtttctcttccggggtctctgctcttatgcatcaggacgaccccgggacggctgtggggccccacactgcacccacagggctctatgcgacaggggcccaggaacagcctgaggccaccacccagcaagcccgccttatcacccattccagctcacccagaaccttcaccagcaaacctcctgctgaggtcctggcaggaggccaccgtcttgttaccgtttccttttcgtttgctgagggtcacagaccccaacagggaaatcagtatctgtcttcccagtggttgccctgctcgccgggcactccacggggtcccgcccttgtgtgagatgggccaggatccttcggcaaggggcgcctggggctggggctgattgtgggcggtggagcgccagacagaaaaggattccaatgagaacttcaggttaaagtcagatgccacctaccagggtctacagtcaaaatgttggctttttcttattttttaatgtatgggagaaaaatgtaaaattccagttcttttctaattgtgtttctgaaattaggagtcagctgccagcgtttttgtgtggctgcagtgtgcctgggcccagctcacgggcagtgggtggacctaactgcccaggcaggcgagagctacttccagagccttccagtgcatgggagggcagggctaggtgtagcggtgtctcctctttgaaattaagaactatctttcttgtagcaaagctgcacctgatgatgctgcctctcctctctgtgttgtctgggcccttgtttacaagcacgcgttacccttcctgaggggagccatgctctagcccctggagggcctgttgcaggggcagggcgggcccgtcgcctttggcagctcctggagagctgtggacatgcagtccccctcagttcgtgctgcaataaaggccatcttctctta

SEQ ID NO: 222408 - DNA, 1000 bp, Homo Sapiens
cctctcccccatgctaattatttacccttgtaattgtgcatagggaagcactcacccaatgagactttctccaatgtggactctgtgtgtcagtgaatgaatgtagtaaaattcactttggaaggttatcaggcttttaaaaatctagtttatggcaaaaatagccattttccaagtggtggctgactgttgcagggaatgagaatttcataatacactgctatttcagacctctgtttggtcagaaatggaaaagaaaaagccccctttcttcccttttctgttttacttcaagggcataccttggaggtgctcagagaagcgtgaagtttgcactatggtggaggatggggaaagagttctaaagtgtctccagctgtgaacccaggaggtcaagtgggctattaaaatctaacgttgagtaaatgtgatagtgatgagaaaggaattttgtgtactgtaaccttgcagtagagatgcagctgtccttcgtgtgtggaaacacacctctcctttacatagttgggaacctcattagaaatgacctcagctgccccatatctacgttcctttcagcagttgtccaagtaggagtgtatccagtgaagacatatcaaatcacaaagtcattgtcattagagtgtacttgattactgggcatccttgtaatataatttcataccactgacacattatacttgtaagagaacatctttcccagagtgcctcagaccttattgctttaaaatataataatgttttcattacttttattatttgaatgatttagtaaagttgactgaatctggtatagactttgggagtatgtgtgtgaagtttttatcaaactgtaatatttgtgaatggaatgccttgcaatatgaatgttaatataatgtgtaaagggagattaaaaagtttgaatgattatcctaaaaaaaaaaaaaaaaaaaaaaaaaaaaaaaaaaaaaaaaaaaaaaaaaaaaaaaaaaaaaaaaaa

SEQ ID NO: 222409 - DNA, 1000 bp, Homo Sapiens; identical to SEQ ID NO: 117146

SEQ ID NO: 222410 - DNA, 1000 bp, Homo Sapiens; identical to SEQ ID NO: 117148

SEQ ID NO: 222411 - DNA, 1000 bp, Homo Sapiens
agacaccgcagagctcactcaccgggactcgcccttcctgtgctcttacagatccctctcaacaatccccgcatctccttttagaaagcacttcctgaattatttaaagaaatattttgaatctgccaagtacatttacaaaaacacggatgctggtattttaacagatggagagacaaggaaaggaaaggaaaggcctggcatgggcattgtgaggaatcacaggcaccgaggttgttctctgctgtactgcaagtttgcactttctttaggctaaaaatatagttcctgatttttaaaattcagttatttattcccacttcaaatgacaagttcatatatagaatttacgggagaaacttgagaccatttacggggagaaacttgattctgggaagatagcagagtacaaaccagctgcctcacttctgtttcacagggaggctgatggaaaaaggaagcaagctggacccatcctccctgctcacagagggcactgtggtcacacacagtgcctcctctgccagttcctttattgaaagaggtgtgctggctggccacggtggcttacacctgtaatcccagcactttgggaggccgaggcgagcagatcacgaggtcaggagaccgagaccatcctggctaacatggtgaaaccctgtctctactaaaaatacaaaaaattagccgggtgtggtggtgggcgcctgtagtcccagctacttgggaggctgaggcaggagaatggtatgaaccagggaggcggagcttgcagtgagccgagatcacgctactgcactccagcctgggtgacagcacgagatgccgtcttaaaaaaacaaaaaagaggtgtgctgcttgtcagcatgtattgtcacggacactcaataagtgccattttggactgtcaaatttagatgctttgtttcagaaagataagccagcatttagttttaaatcactttcctggtttgtaacttgatgctgtttagttaaattg

SEQ ID NO: 222412 - DNA, 1000 bp, Homo Sapiens; identical to SEQ ID NO: 117151

SEQ ID NO: 222413 - DNA, 1000 bp, Homo Sapiens
tatttcggtacacttttgtttatatctgaaaggtaaattcctagcagtagaattattagagcaaacggaatttaacattttggtgtgtattgccaaattgccctcccaagtggtttagtcagcttacccttgccaacaatagatctatccttgccagccttgggcatcacatttaccagtttaatagattgtaaaaccatatcttaattggctaccctgaagccaccatactggagaggctgcgtacagtgtttcacgtagagagagggatacccaggaggcccacctgctccaaccccagctgcatgagtcttcccagcccaggcacagacatgtggataagatttaaacatttccagccccagccttcaagcaatcctagttgacactgaggggagccaacataagctgagctgagaaacagtctgcccagtctgcagattcatgagcaaaagaaatgttgggctgggtacagtggctcacgcctgtaatcccagtactttgggaggccgaggtgggtggatcagttgaggtcaggagtttgagaccagcctggccaacatggtgaagccctgtctctactaaaaattagccgagtgtggtggtgcgggcctgtaatcccagctactcaggtggctgaggcaggagaatggcttgaacccgggaggcggaggttgcagtgagccaagatcaggccactgcactccagcctggatgacgggatgagactctgtctcaaaaaaacgaaacaaaaattttttaagagaaatgtcatttgtttttgtttttgagacagggtctcactctgttgccctcactagagtgcagtaggatcacggctcactgaagtctctacctaccggctcaattgatcttcccaccacagcctcccaaatagctgggagaaatgtcctgtttttaatgaatttgtcttcctttttgtcttgtttgttttaatatctagtgatctaataaatttggatgatatcttttgactatc

SEQ ID NO: 222414 - DNA, 1000 bp, Homo Sapiens
tgccattgccaaagaaaagcatgggtacaacatggaacaggctcttgggatgctcttctggcataaacataatatcgaaaagtcattggctgatttgcccaactttacccctttcccagatgagtggactgtggaagataaagtcttatttgagcaagcctttagttttcatgggaaaacttttcatagaatccaacaaatgcttccagataaatctatagcaagtctggtgaaattttactattcttggaagaagacgaggactaaaactagtgtgatggatcgccatgcccggaaacaaaaacgggagcgggaggagagcgaggatgaactggaagaggcaaatggaaacaatcccattgacattgaggttgatcaaaacaaggaaagcaaaaaggaggttccccctactgagacagttcctcaggtcaaaaaagaaaaacatagcacacaagctaaaaatagagcaaaaaggaaacctccaaaaggaatgtttctttctcaagaagatgtggaggctgtttctgccaatgccactgctgctaccacggtgctgagacaactagacatggaattggtttcagtcaaacgacagatccagaatattaaacagacaaacagtgctctcaaagaaaaacttgatggtggaatagaaccatatcgacttccagaggtcattcagaaatgtaatgcacgttggactacagaagagcagcttctcgccgtacaagccatcaggaaatatggccgagattttcaggcaatctcagacgtgattgggaacaaatcagtggtacaagtgaaaaacttttttgtaaattatcgacgccgcttcaacatagatgaagttttacaagaatgggaggcagaacatggtaaagaagagaccaatgggcccagtaaccagaagcctgtgaagtccccagataattccattaagatgcccgaagaggaagacgaggctcctgttctggatgtcagatatgcatctgcctcctga

SEQ ID NO: 222415 - DNA, 1000 bp, Homo Sapiens
cactatttaattatggtacctgctgccactcatcacagagcccttcttggtagaaatgatgtcagcattcttatttgctgatgctgctatgataccacgccttaaaaattgacagttgaaaaaaaaaagagtgaccagagggcaaaggacccattctcagtaatgggagatcttgagttgcagtccacagcattcacattctcaggataaacatgcttgtctccatatatactatctgtgcctgttatgaatgaaaaatccatccactctgctgccattcacagcctaattttctggagtagtccaaacaatgtttggaaaaacatgggactgtatgtcattactatgactgatagcagaataataatgcatcttacttctatatagagatagacttacataggttacccttgaaattcattagtttgtcataaagttttaggaaaggtaggacccggaaagaagttctaattagttgtctaaatatttttcagtgagccaagaaattcaccatgaaaaaacaagaataacaaatagaagggaagagataggatgggaaagctaacaaattaaagttttggcaaaaaggaatatatgtaaatagctaattatttacttttgtgcttactttatttagattatttctatcagttacaatctttttctagttaagtgtacctaatttatggaatgggtgctatcctgtttatgtgtgtcttggtttttcttggctacagaaaaactgttgcagggcaacactagtttgatatttgatttactctccaatgagactcaatggctgggccgtggtagactcatagttcctcttgttctttattaaattcatcctgctaattagatttctagtgacttgtaacatgtagtttacactgaattgcaattacagatgcatacaactactatactagaaaaaattgtcatttctgatgtgccaataaatgatttttatgagagaataaaaaaaaaaaaaaaaaaaaaa

SEQ ID NO: 222416 - DNA, 1000 bp, Homo Sapiens
taagtacagttgatcaaagtcatagtaggtaaatgctttatgggacagctgacaccttttagaccctaccaggtattgctagcatgtgagctgcagttgtggggtctgagatatttctttgtggtagtttcatacccatactatagagtcatgtatttatttttgcctgttgtgtgatgtaatgcaatcatgttcctttgagtctccatcccttggaaatctgacttcttgcagaaggagtaggcacatcaagatattcaggggtgccccaagagtctgggactttcaaaaaaaaaagatcaggctgaaactgcagtcagatttatgacagctgacagtttttcagaggtcgcacacagtgactctcctctctcaggatgacgaggacctgtgccttcaacaagcaaaatgctgctcacggttgtcctgcttgcagccagtcactgtgtaaagcctctctgatgtgcacttaagagtgggttgctttctcacaaagatggggttctgtgcagtcacaggtcacttccttgacaacacaatcatttctgatctttatcactgtaaccacgtcttctattccataggagtttcttttgattctctcagttgcggggggcatctcttaatcctggggtaaaaggagagattgccatacttagactcactgtgagtctccccggccatttcacgaggagaccacagtgctgccaccagtgcctaaacaggtggctggcattcgagacttcctcctgttccctgggtcagaggatagcggtttccatcataaaccaagatgatgagttcagcctttatccctcgtggttccgctagatgtaacttataggagttaacatttgaggactttgttctgcatcagatcttactatttgaatgtttactgttggattttgggcatcttattactgttactcaaaaacattgactctgcatcaagaaagaaacaagaaagcaataaaacaagaaataattcatgctcaca

SEQ ID NO: 222417 - DNA, 1000 bp, Homo Sapiens; identical to SEQ ID NO: 117154

SEQ ID NO: 222418 - DNA, 1000 bp, Homo Sapiens
ggagccgggcatggctgaaagagggcggtggggacgagcccctcaacttcctggatcccaaggtggcccaacgagtcctggccacgcagccagggccaggccggggcaggaagaaggaccacagcttcaaggtgagcgccgatggccggctgatcataagggaggaggcagacggcaacaagatggaggaagaggaaggtgccaaaggcgaagatgaagagatggctgacccaatggaagatgtgatcatcaggaataaaaagcaccagaagctcaagcaccagaaagaggctgaggaggaggagctggagataccccctcagtaccaagctggaggctctggcattcatcgccctgtggccaagaaggctatgcctggggctgaatacaaggccaagaaagcaaaaggtgatgtgaagaagaaaggccggccggatccctatgcctacatccccctcaacagaagcaagctcaaccgcaggaagaagatgaagctgcagggacagttcaaaggcctggtgaaggctgcccggcgaggttcccaggtgggacacaaaaaccgcagaaaggatcgtcgaccctgaggcccagggcccctgggctgccctgtggtccagtctgaggccctttcagcccccaggctgccttgccaccagctccaggtgctcaagattctggcagagcctggactcaggatgacttggaactagggcttggctctcagaagtcctggattttggaaactccaaatggaatcacccttcagagacatccctggtgcctggagatgggaatgtggcctcagtgcctctgagtaggtgccatgaggcacctttgctttctgcccagagtggccatgagcaccagaacagatgatctccatttccgccagctgcctgtagccacgtggcatcctgcctgtggtctgggtgagatttactgtgaccagatgtagaataaatgtgtctcatcctgcaaaaaaaaaaaaaaaaaaaaaaaa

SEQ ID NO: 222419 - DNA, 1000 bp, Homo Sapiens; identical to SEQ ID NO: 118958

SEQ ID NO: 222420 - DNA, 1000 bp, Homo Sapiens
ctgttcagcacatgacctaactacgtaagcctctttggcaagggtcctggtgcccagcacccaggctaaaatatcctgtctggcagagtgttttggtagctatgcaggcctcccttcagtgtacctctttttccaacttctcactcctccttactaggcttggccttgacatgcttcttcgagggttggcagcacaccgggaggggatgcttggacaagtttctgggcctacatttcttgactaggccctctcatttcctccctccttggggcttctgcccagggctccaggatcagggatattacttctcaacccgcacttctcctctactgaacccactggcatcacctgatgccactaatttgtgaacaacaagaaatcatttccccattggttggagtattccctcagcctatagcatcaaagcagaccagtggccaacagccccaaggggagcccaattaaatacctgggttcagtatcctaacctgttatgtcctgacagcaatggtaaccccagtaattctgtaatgttgtaatttccgcatggccctgagctcccttttcctcaactcagtgaggccaggatttgctctccaaaaggctttgctagtgtgttcaatgggacctgctgtggggagtcctaagacagacatctaattattctctctttttccccccctctctatgtgtatatttctaatggatctataagaacagcaacaagagagttctaacaattctagtgtgaagccaaatagtgatcttttagtgctttggggatggggtgggctggggtggatggatgggcaacagtgactttgattacccttgctgctctgcatttgccagtttattcttttgtttcttttatctgactgactctgtcaaacaagtgtcaaagttgtgtgttaaaaaatgtttaacaaaaaaaaatgttgtaatgacacaaagccttatgaaaatatttatggagttcaataaaagaagtaaaaagac

SEQ ID NO: 222421 - DNA, 1000 bp, Homo Sapiens; identical to SEQ ID NO: 117155

SEQ ID NO: 222422 - DNA, 1000 bp, Homo Sapiens
tttttgtgatttaataacacacagtgaaaatccaggaagaatgaattaagcttcttctgggagttgtttattcctgctcgtgcttaagattgatgatttcgtgaaataaagaacatcatttcatttaagagatcatttcattaagatctctaatctgttttgagtctttacaaaatagccagttataaaatggggcttgatttgtttagactgaaggaagacgttttcccaaaatatactacagaagtgctacaatatttgcgatattaaaatgcctgcagattgaaaatgggggccactcatttcagaactgcaggaatggtgtagttacagatcgacataaactcctgccccccaacaatgccatgagctgcttagcccaggagacctgggagctatggcaggacggttaggccagccgatgagggactgcagagaggctactggaaggttaaggacccagagagaaatcgagaggtgccctacagcagccaggcctatcaggatccgtcacacacggcagcggcgtggacaccggcctgatgcagagcgtgacccctcctgctgggacctgtgttgtaagctcctatttgcttatcttgtttatttcaagcagaaatcaataaattccataaccctctgtattgactgcaatgtaagctgctgaggagactggttctgttggtcagtcaggtgtttgctcagccctgtctgatcacctgtgctgctctgtccctaactagtgacccatggaagcttccaagcagttttctcttcatcactactaacaaacgaaacactaagaaggcttagtatcgctctttttctgcggggctactctgaagtactgacttgctttccagtctgattcacgttagcagtgtgtacactactgtatcatcatcagcttcatcaccctgtaaaccaggctcctctgaagagactttggtgagatgaacgtgaggtaaaaatttcgttcggcaaaaaaaaaaaaaaaaaa

SEQ ID NO: 222423 - DNA, 1000 bp, Homo Sapiens
gaatgctgcatttttataaacaaaattacagactgtctgaaattgaagaagaatgaactaataatagcattcataaccaaacacaatgatgattattgcagaacattgtatcacattttagtccagagatagaataaagttgaataaccttgacttacacaaaactgttttggtagttggatttcattatcttagtgaatttagtcattttacaatatgtttgtatttggccatttactgtaatcacatttttatatctgtacaatgacactttttgcagttgtggggtagtgtgtaacactgtccatcttgcatcattgaaactactacaatgatactatcatttaataatattaatattacttgaaatagactaagataaagaaaaggggtctgtatgatgtgcagttttgtgcctttatgtatttgccttgttctttgtcgaatgtgtgaaattccgtactgtggtttttcctataatagaaagtagagctgtgtattaaattagactgtgtctctctgatacctttacactactgagaatagcatggttttggccatgtaaaccaattttcaaagttctaatgacatagccatgtgtttttggttttttatatttcattttaaaatttgagtatcaccatacattaattaatactcctgtagtagataagctgtcattaagtaattcccaaaaaaagggccatttgcttgcattactttgaatttaatgttgcgcttgtgcactgtgttaatattgtttgtgatggattggacgttgtgactcttgccttttaagaagaaaaaaaagataggacaaagtatttgaagctcttaaaatgtacatattttggttcttctatctcaaattatttaaaatgcataattcacatttttgtaataattctatgcaattttgtggcatgatgtttcttccacttgtaattttatgtgctttcatcacaaatccaaaggaaagaataaaaatttcttaacacaa

SEQ ID NO: 222424 - DNA, 1000 bp, Homo Sapiens
catgccttagactgattttggacctttgagacttttaccacatacagatggatgaaactacttactgatttaagatcttttgaattttagaaaaaacatatgaatcagatggaacaatctgaatgtgatatgctccatgatgctgtgtgttttggtagtaagaaaaaaaattgggaggcttttcaaaggtggctttgttaggtagtaaaactgctggattcttcttcctcaaatatttggggctaacacttcacagagggtcacagtccatgatctgaccaactaagcttttaaaaatcaactattaccacccagaaaacagtcctacgtgatcatgtggccagggcatgcccgagtcctgcaagggtggcgggtggctgaggtcacaccaccactggagtggatgggcagtgccccacatggacagccattccccaggctatgaagtgacataggcctcccccacggtgcctgtgtacggagcctgatgacttcactgggagccttctggaatcctgcagagggtcaaggagcagggatgttggatgcccacctgtcaagagttcagatcaaagttgcgctgagagcatcacaattttggttcagccttgacgcgtttgtccaacagctcattggctccctttgtatgatatcgtggtcttctcacatggtgcccagtcaccaatatttataatgaggtctaactacagcagtagtttttcatatatatctctaaaacattttgttatattgaaaaaagtaatagaaatcaagatgtgttgatgaaataaaatgtgtatctgagtgagaaaacaagtatggtgaggtcactttaatgtttcacagcgatctcagatctaggcctcaggtagaatggaagctgttctgcattcactgattaacgttgctaaactcttggtgaggcacgagctaccagccaattgctcttcatcacagctatctgtcttttagtgccacaaataaaagaaaatcaaatctt

SEQ ID NO: 222425 - DNA, 1000 bp, Homo Sapiens
agtctctaacctcttaacaaatgcaggagtcccttctacaagggtgatctttccaccttgaacacttccaagtgactctacctcaccaagcagtccattcagttgttgagcagctctaactgttagaaaggtcttccttagatggagttgaagcctccctcccggtaacttctgtctttgggcctgggtctgtcctccaagagaaccctgagaatgttggaaggatgaatctcgcacattctgccatgtcttctcttttacaggctgtttgacttctctgctgaagtgatttccagaaggactcatttgacacactattagatttaccacatctaatgaaatccaaggtgtagctataaagtgacaagctgtttttaatttatcacatacaccagaacttctatcctgcatcacttatatgtaaatgatgctgttaccaaaaacattaaggtagttcttgcgaatgccaccccactaagaaaactatttcattacttttgtaatccatctgtgagagtctgccccccagcttaaccacttcctttggtctgcacccaatgaagggaaaccccaaagtactgtctcaaatggtatttgaactacgccagtattgttggaataagtacattaattacttgaatgaatgaacacagcaccgtagaaatttcctttatggttacaccttgtatgtctaaagcattcaggccctgttctgtagtgtttcttatcctcacacagagtagaaaagcctgtttgctttatttaacttatacataaaagatgacatctgaaatatctgatgtgtattataataccagcttctgctctagaactactttgggtgaaatggtggtaatagcaaatgacctcctttaacaagacactcatctcaaacaatgccatttagttcaggagatctctaagtgtagctgtaaattttggggttaatttggcttatattggaccttttaaaagaaataaagttttttaatgcaataaa

SEQ ID NO: 222426 - DNA, 1000 bp, Homo Sapiens; identical to SEQ ID NO: 117160

SEQ ID NO: 222427 - DNA, 1000 bp, Homo Sapiens
gagattattttgaaattaaatatccttaaccaatgattaaattcataatcatttcatcttctttcataatcatttcatcttctaatctgaatttgttttgaacacagccttgcagaaaagcaaaaaatatttccccgctcaaattttgccgacattttataccagtatccccttcattacagtaaactaaatcataacttacatcatccattactagctgatcataaattgttagtattttaaggtatgcaactatgtgattgacatctgtaaggctagtttaatagacgtgctaaatatcactgttctgaatatctgtgccatagttctgatacccttattggaatcaaggcagtgctgtttctgtttacaagttatcaagataagagcagtggcatcacatttgttgttgttgtttttttttttgaaatagaaaaaaacagaagaagctctgccaacaataaaagattttgttaagtggtataaaaattgtgaatgttgaaattcaacatgcttcatattataaccaacctgcaagaatattgtggtcaattgtgtgaataccaaatcagtatatactgtatactgtactatgaaaatttgtatttaaaggcaaagatacaagtaattgttggtataattggggaaaagggtattcaatatttattaagtaacaatgagaaatgcaacaaacttccttatttatgccttatgaataaaagagtgtggaatgtaaggtgaaattttatgtgcaagatcctgaaggaatgggtattcttgaaggcagggactgtcttttctatgtttgttctgtacagctctcagcacactcttggtgcttgataaatgttatgttatataataccaataactaagcacatttttagatcttttttcaaatggcttgtgtaaaatttggttaatgtacaatggttggtttgaagctatcatgtaaaattggcctctccaaatataatcagaaataaaccgaaaaaaatat

SEQ ID NO: 222428 - DNA, 1000 bp, Homo Sapiens; identical to SEQ ID NO: 117163

SEQ ID NO: 222429 - DNA, 1000 bp, Homo Sapiens
taaaatattacatatgcagctgggagaactacacctttgtgcacatagatttatatattaatttgtagaaaatattttctttatatatttccttaccatacaaggtgccttgttcatcaggaaaacttttgttttgtattttgacaagaaaggcaccttcagagtttctttttaagtatagttgacaagtgtataaatgttacacttactttcagagttctttttagatctaaagaagtcagttcaaaaatggaaatcaacaatgttaggagaaatctgaattctgttaagttagtaagtattatgtatagcatctgtttttaaccatttccattcttatccctagtgtatcagttgatcacactaagaaagcttaaagattgagcatttgaaataaatgctctttataaatgattagatttttgaagggatattgaaatcattgcgctgtgatttcatctgtgatgtgaaaaatcaatttattatccttggtgctttcccccccaccaatgcacaaataattgtgaacagcttgaaatgacttaaactgtaatccaaatgggacaatctgataagaatttcatgcattggtagttaaataacttaaattgctaaagctttagcttgaaatttatgtttagaaaaactattgatttcccatggtatgaatataactattgtaattcttcaaatgagactcttctcaccttaaatagtcatatattaattaacttataggaaataagcatactatatgttagctgttttaaaaggtaccagatgtaagagtcataaatatatgcaattaaagaagttcatagatttcacacgaatgtaaatgtgttatatggagacatgtcttgtaaacagttgaatgtatgtaagttttctgtttgtgaaaatgtagttaatgtactcactgtggaggtcataaggaagctactttttttttaaagtggaacctaattaaaatatttccagaatcaaaaaaaaaaaaaaa

SEQ ID NO: 222430 - DNA, 1000 bp, Homo Sapiens; identical to SEQ ID NO: 117164

SEQ ID NO: 222431 - DNA, 1000 bp, Homo Sapiens
aggccctgaaatcacattgatatatgtttgttagtaaaatgtgcacacctgacttgcaatgttgtgttaaactagaattatattcacttggaaaacatatcgcttaggataaaattttgtcattcaaaaattttttcagaaatgcttgtactagaccacctcatttggatatatagctatcacatttgtaagattctgtttttagcataaaaatcaatagggatgaaaattttcttagaactcaagactccataactatgggggtaaatgaagtcatcccttctcccccagtccacccccaagtgctcttagatactgaaggagtctcccttaacatacagtgtttttttttgttgttgtttttttgtttttttttggagatggagtctcgctctgtcgcccaagctggagtacagtggtgcaatctcactgcaagctctgcctcccaggttcacaccattctcctgcctcaacctcccgaatggctgggactacaggcacccaccaccacgcctggctaactaactaactaactttttgtatttttagtagagacagggtttcactgtgttagccaggatggtcttgatctcctgacctcatgatctgcctgcctcagcctcccaaagtgctgggattacaggcttgagccactgctcctggccaacatccagtattttatcttgactgtcctaaccttaccttagatgctaacagaagggtcctgctcaaataacactgggtgctatattgatgggtaaatgtgtacatcctattccttcctctttatctcacaatttttgtctccactaagcaagaagtaaactaacacttcgtcactctaaagaaataacttatgtaaaactcttagtaaccctgtttgtcttcaaatgagtaaatagaccaaagtggggggacaattttctagttctgtagagggaaaaacatctgagtcaacattttcaaatgcagagggtattggtacgtcgacgcggccgcg

SEQ ID NO: 222432 - DNA, 1000 bp, Homo Sapiens
caggtctcagcggcagtgggcacagctatgtcttcaggagctcccgtcaaacctcatagctggggcgctcccagacaggccagtccagacaggacacgctgggcccctggcatccagaggaagagccaggagtgtgggaaggcccacagtgggggctgtggcttctgacactcaggtcatagcctcagaggtctgaggtcagcccccacagacccatccggcccgccccccaagtccctgcagagagcacttagagttatggcccaggccctggtccacccttcccctgtgcacctccggctgggtttgccaagtcagggagcagggctggccgcaggaactcccaaaccttggctttgaatattgttgtggaggtgtgctcgtccctttctggacgtgcaaggtacctgtcccagcaggtcagatggggccagctgaggcgctcccccaggcaggaagggccagccttcaccatcgcgtgggattgggaggaggggcctccgtgagcagcccctcctctgccgctgtcccagcccagtccctctcccggagccttggcagcctcccacaacccagacacttgcgttcacaagcaacctaaggggcaggtgaagaagcgcagccctgccagacgcgctagattcctctaaggtctctgagatgcaccgttttttaaaaaggcgtggggtgaactgattttgatcttcttgtctagatgcaataaataaatctgaagcatttaatgtagtcatcttgacattgggcctacactgtacgagttccttatgtttccttgagctaaaaatatgtaaataatttttgtcccagtgagaaccgagggttagaaaacctcgatgcctctgagcctcgggaccgctctagggaagtacctgctttcgccagcatgactcatgcttcgtgggtactgaacacgagggtggaaatgaaaactggaacttccttgtaaatttaaacttggcaataaaagagaaaaaaagtt

SEQ ID NO: 222433 - DNA, 1000 bp, Homo Sapiens
gtgctgcaaaggaaagggcctgaggcctcagggagccccgtggagggatgacagttcaggccctactgctggcacgtcagagcactgggaagtttttcagtgacgtctctggggcactcagtggattgtctgtaggaaacttgcagctctgctcctcacaccaggcccggctggccacccaccctcgcccccactggccacccctccctcgccccgactgccccgccccaccctcaccccgactgccccgccctcgcccggctggccgtccctgccctcgccccggctggcaggtgcacatggggcctccaggtctgccattcgctattgagaactagaaatgaggaaggacagttacgctaactccaaaaggctgtctaggatgagctgctttatcagggagctccttgtacccattttacagaaatcatttttaggtctttgtgccaccaccacgaggggcatctgcaaagagggcaacgctagacacagaatccgtggaaggtgcagcagtgcctcaggggtcctcagggtcagggagcccccctcaccctcttggcccgttaccctttgtgactttccaccatggtgtcgtgtgaccctcagtcaggttggtgggggctgagtcctcactgagcagccactttccacatctgctagaggaacagtgacatggacacctgtgacagagagaggacagttaggagggacagacagctcttcctttcggagcctggctagtctaggacatcaccttgctgtgtcttctcaagcttttaaaattgaccctgaacgtgtgacagggtcctatggtgttactcaaagctgtgcagggtaaatgatgacatatttattctttttccatttgttctagaaacagtgcctttttcatcagttgcattttccaggctgagagctgtataaaacattttggactgtgaccatgtaccttcctttttaagaaaaataaactgctttatggaagttggtaaaaaaaaaa

SEQ ID NO: 222434 - DNA, 1000 bp, Homo Sapiens; identical to SEQ ID NO: 117166

SEQ ID NO: 222435 - DNA, 1000 bp, Homo Sapiens; identical to SEQ ID NO: 117171

SEQ ID NO: 222436 - DNA, 1000 bp, Homo Sapiens
cctcggcctcccagagtgctgagattacaggcgtgagcctccgcgcccggcccccttgcagttctctctgatttggtttgttctgtctcaggcttctgtggcaggactggcccagggaggaggaagccagcagcacacctggggaatggggtcccggccgggaggcttggcctctgggcgacctcgtcctgttttgtttgtttgtttgtttgtttttttaaaggtaaacctcctgggccgcagatggcaaagggagtgcctgggcctggtgacccagggctggatccacccctgcggagccctgggccaggcaggtgtctgctgctcacctggctctggagggctgccctgcagctgggcctggggacaggtcggctgtggggcagctcagtaccctccctgaggctcacggtggctccgagcatgagctctgcctcctgggcgagacccagcagtggacagcacggtcctcacacccagctccctgcacacccaggccagccacccctcccgctcgtgcacaggcacgcagatgcgctcacacgtacacacacacaaatgcacgcccacttgcacatgctcacgcacacgttcacacatgcacactcacgctcacacatgctgtcacgcatacacacacgcacatactcctgcacatgttcccatgcatgtgtgtgcactcggaccgagcatctcccacgcacctctaccccaccccaagcacctctctccccccatgcacctctccccaacaacacacacagccccctgcaccgcccgccccccgcccccaccaaggccccagcctctggccatcagtcctggtgccagagctttgcgtgaagttcgggccgcagagtggcccgctgggactcccatgtgctgccgtctgatgtgctcagatgggctcatcgttggttcgtttttactgtatatttatagtaataaaatcatgcagcaaaaaaaaaaaaaaaaaaaaaaaaaaaaaaaaaaaaaaaaa

SEQ ID NO: 222437 - DNA, 1000 bp, Homo Sapiens
tagaccaggaccatagatgatacatgtcagtgctgtggaatgtgcattctctgagtgttgttttgtggtatcattgtctttcctgaatgactttctaactgtgcagaaaggcagaaaagtcatcatatgtatatgtcatatgactttataaaatatttaatgtgacaaaaagtggaaagaatctttacaaaccctgcaattacttttttaaaggcacttttactctttggttttatcattccattttgctaatatttactagctttataaattacagtaaggtacaaaaactcatcttgtaatattttcatttttgaagtgaaaaagtacatatattttgcacaaggttttatactgctaagtgcttggttggggtggtgagatgatgattagatcaggggtgaggctgagagactctgggtttagggctagccctgcctccatctcccttgggtaaaatgaagggtgtggggtaaaagatgcataaggccttttctagctctgacagcctagaagtccaatcaccctgtaataaatatgtgttgaatgaagaaatgggtgaatgagcttgtcaatgtgattttaaaaaattgactacctggaggaatgattaggaatctaaatgaagccagccctcggtatctgcaggtttctcatccatggattcaaccaactgcaaatggaaaatacgattttttttaaaaaaaggatggttacatccgtattgaacatgtacagacttttttcttgtcattattctctgaacaatacaagaactctttatgtagcatttacatttattaggtattataagtaatctagagattatttaattaaaatatacaggaggatgtgtgtttatatgccagaaattctgtaccattttgtatcagggaattgagcatcttcagatgttggtatctgcagggatcctggaaccaaacccctgcagatactaagggctgacgatctaggtaagactggatttaacagttggaaa

SEQ ID NO: 222438 - DNA, 1000 bp, Homo Sapiens
ggaagaaagctgcttaattatgtgaacatcttataatgaagtctcttgcagctaaaattagattttgagtgcatgaatctgtgataatgtttgcatatcagaatgcattctccccttaaaagtagcagtagccacttggttcttagggggccccaagaggagaggagaagtgctgaggttgatgttacgactgcaagaattcttgggacacaggtttgttttctgctgacttgctcggaaacccattggaggtatctgaaatgtgatgactccaaaggggttcatttcactatagggagaaattgattcgtctgacttcctatttatcaccactcaatattgggtgagttggtctgaacaaggtggggataaagtagagtggaaataatgtagagtcgtcagactgaaaggccaggttgtagtcccagctcttatctgccatcttggacaaagcttttcccatctccagtctcagtttcccatccataaaatgggggaagtggtaggtcttgctgattgcatccacattcattcctccatttcctttcccagcaaccccccatttctgtttgggaattcatatgatctgccagagcctctccaggggtggaatacatgtcctggactaagccaatgacaccttccatctttccagctatggtgactgggttaggtatgatcttgtgagttaagacaatgaagccagagggaatttcaagacttatgggaatgctgggtagaagctgttttaattcccctgttgaatgtgaaaaaggtagtagtattcctgggtctttatgatgaccaccttgggccttgggatcatgaccaggaatcacgtgaagctgacaccactgaagggagagttgagaggcagaaagagatcaagtccttggtgaaattgtttaagtacaggatcaagccttgcttgagattggccttacctctggactttttttgttatatgagctaataaattctgtttattgtttaaaaaaaa

SEQ ID NO: 222439 - DNA, 1000 bp, Homo Sapiens
ctatcttcttttcttgcctccctgaccagcagactcacctcccaagaacgcctgcccgcccacccgccttaggactcccgatgcgctcctggaaggccccaggagtggcaccttagtgtgggtcggcccgcagatggcacccaaggccgggaagggcagtaactgcacacgcggcgctgtcagagatgggggtgggggatgcttctgggggccctgcctccccattgtgtgcccagaacatccctggccccaccccgccacttccctcgggcccttatgaaggactgaggctccagggtgagaaggctcacttctgccccgggcactgcgtccagcagcagaggggacagggggcaggtgtgtgactgggttcctgggtacccaggcctgaccagagggagcgggagggcagaggtgaggagggggaagatgtttctgggcctaccaaggttcaacaagagaacggagctgggaatgtgactgctggagcctgagaggtggaggagttctgatcccccgttacttcctagcattttctcctcttgccttaaaagttccctgtatgtgaaacgggaagtcctgagagtgtgtgttggtggctgtgcgcacgcacacaagacgggagtcaccctgtgcttcctgcccaagatactgacccattgaacccccaaagcatctttctctccacaaagtccgtggtgccttcctggtgggctgcagacactaatggtgttggggggtcttggaacagcttctctatgtgtggattcgtgtaaatgcgaagagttcacatataaagaagtgactttgattctgtgattatattgatttggtacacagtaaatgggagtttaaaaaatccaaagactctaatgacttgtaaagactctaatgatttgtatcatgtaatgaactaaaccacctgtaattttgtaccgtatgtgtctttccatcaaatgaccaacagcttctcaataaaaccagaccatttctcacctgc

SEQ ID NO: 222440 - DNA, 1000 bp, Homo Sapiens
ccgaggtgcactcgccccagggagatggagtagacagcctggcctggccctcgggacacattgtctgccccggggctatgggcaaatgcccctccttcttacttcccagaatcccctgacattcccagggtcagccaggacctgttacagccctggtcacttggaactgacagctgtgtgaggcctgcacttctcagacccagacttagaacaaaaggaggagtgaggactcaaggctacaatgaggttccagtacttgttacaagaaattggttttctgcaaaaaaagtccctacctgagcctttaggtgaatgtgggatccactcccgcttttaacatgaaagcattagaagatgtgtggtgtttataaaagaacagttgtcatcaccgggcattgattggcagggacaaggagctgcttgggtgtggaaagttggggcgttggaaagtgggctgtggtgcccatttgcagtgactgtgaagtgactccaggacggacctgcgggggcacccagaggtcctaagccccaggactgagggtcgtgcatcaccactcgggtgtcccgggaggtgccctgggcccggggacctcacaggcaggacggcgacactaatgcagggagagggagtctggccccagcttttcctatcagaggcgattttccttcaccaggggatgggcaggaaagaggcaggggccccagaagcttctgtccctcatgcctgagggcacgggggacacttggaggctgctgtcaccactgtgcgtccaaggccatgctctctgcgggtcagtgcctgagtctcgcctccctgctggtccctgaagccccctcagaagccctgcctgtcacgtcggcatttgtgagacctaccctgtaacgcctgcccctctcagcccaacatcagcttcctctttctcccttgctgtagacaggctggattccagtgttgggacagccatctccagaaacctgacttaagagagtaagatgcaaa

SEQ ID NO: 222441 - DNA, 1000 bp, Homo Sapiens
cacaaaaccttgtcaaagacctcatgcaatatcactttgaaagttattttctgtttactacacaaacattgtaatataactgttaatactatttatatatttgaaaggtataaaaggtaggagttaaaaaaaaaacctctatgtgtagatattaactcagaacttacaatatacagggagaagacatgttgcaatacaagctaattctagctgctcagtaacctctggagtttttaaagggacattttcctgtactttttcaaataatgatgtttaaaaattatcttgacataagcgtcatatacctttgcaaaaggatggttgtttgcagttagccctggccccatccttcctatttctgtagtatgctgcagctttaatcagaaagtccatggttgctgcttcctgatctccgagttactctttccaaattgtcttcttacactgttgctgaaggtcactctgtacacgtaatggaaactgattttgccaagctcttacaaggtggttcatctatcgatggcatccgcatttggtatcttttacacttcaaccaaaaatttattaggtatttttcaatgctaagtcttgccttttattttttaatttcactgccaagtttgcagtggttctaagtgaatctgtgggcattttagcctgtggtcttgccagatctttgcgaattacaatgcatatatgtctatttattcaatatctgtcatataatatctatttggaagaagaaactttctcttgtagtgcctcttgacaaagcacaatttcccgcctttttttttttttttgtgaaatgaaaaaaacaaattgtgttttattgcggtatcaacaatgtgaataaggattaacatattgtaaatgttcttttttccatgtaaatcaactatctttgttatcactaagtgataattaatttttaacttatgtgcattgttaggctgttagaattttttggttgttaaaataaacgcattcaataaatatg

SEQ ID NO: 222442 - DNA, 1000 bp, Homo Sapiens
tccctgccgagtgagagccagtgtttgctgcccttgctgggggcgggtaggaaaccctgagcttcctgatgcggagtcatgaagcagagtcctcgggaaggcatctccacagccccgggtcctctgtctaacgccctccatttcacgccctccatctcacagtcaagataaaggcctcgagaataaagagccagcccccttccatttagtctcctgccgtttcccaaacagttgtccaacagttagacattgaggggcttcactgttaccaggcatgtaacagaaggaggaagactaacacacaccccctgccccatcccatccccctctcccgagctattttcttgctgtggcctctggtgcccttgagttggtctccccggctgctctgcgggggcttcactggcttcggagtgagcgcgaagtgctggtgagcagtgggcctgtgattggatgggaagatgtgcatccgtggtcaaaagtcagctgccagccctgcggaaccagagcctcaggctgggatggggaggcctccctgcttccacctgcatggtgggcatggcctggcttacaccaaaggctttgacggtttctccaagtaaggatctgcaaatcttgaatcgtcctcaaaatgacgaagcttgaattgtcctcaagatggatgtgaatcttacattccttttcatcatttcctttgtaaaaatgacgagtgctgggtttttgttttaagaagcattatgaaggccagacttactcatttttctcccccaagtgagctgcaagaggcccctgttaggcccctgtttcctgagcagtgatgtgctgctcttcttggtggggctttgggctgggaggggaaggcgggtcagagatgggggacctgtggctgccatgcaggagcccctgcgtcatctcgttggactctttaagggagtcaggaatagatgtatgaacagtcgtgtcactggatgcctatttagaaataaagtgtatgctgctg

SEQ ID NO: 222443 - DNA, 1000 bp, Homo Sapiens; identical to SEQ ID NO: 117177

SEQ ID NO: 222444 - DNA, 1000 bp, Homo Sapiens
gaaatgcaattcccatttttatttttaataagcaaaagcataaatcttagaaaacctatgaaaaagaaatacttttatgttatccctaatcgtcccactaaatggaatgcctatgattagcttcattaagagttttatactgtgaagattttattagaagcaatatatgaaaattacttggattaatgtgttaatcttcctctttaaaatgctaatatccattttatgcacattaaagctcagtatgcattttctttgatgcatgcagtttctatcaattaaatataaagaatgaaacttagcaccaacttattcaatgactgcaagttttttgtctttctttcttaaaagttcattctatttgtattattttcatacatttgtaatggtgacccagggatgtatatataaaaaggagataggtatatagatagatgtgaaatttacacgttgaaaacttagtatatgacacagaaagaaattatgaaaagtataactcaaattctgatatgcttagttagacgtgaaaggagtatctttttatcattttttaaatttacatcaagccagtacagtgccagggtgtatctgggtaaccagatcctcgaaaagcagctctgaaagttaattttctagcttttacccaatctcactgaaggatttaattgatatttttaatggagctgtgaatcaatgctgcaaaggaattgtctctagaggtctaggataatgcatttcattttttaatttacttttttatttgtcattttcttcaaaggatttttataggctgtgggttttcactgtttgcaaacaggctatgttccttcttaagcacatgtaaagtattcagggagataagtaatttattaaaatctacctaatttgccgtgatatattagatctctgcttcagtgatcacagaccatttcatttagagaattaggcattccctctttgtgtgattaaagctctggaaaataaaaaaaaaaaaaaaaaa

SEQ ID NO: 222445 - DNA, 1000 bp, Homo Sapiens
aattacattacaagatccaggttcttcccccccacactcaatcaagccagccctctcctcttctgtcacgtaaaggatatttggcacactcatgcgtcattcattcacaaaacacaaacccaggactttctgcctaaggcagagcacaagactcacagcagcaccgaagcgcatctgccgtccgggccctgccaggcttgccaggctgccagtggtaactgtggacctactgcgtgccacgtgttttcatagactcatcccatgctggcaacagccctgcaaggggcttggctctgccacagggcaggagaggaagttgtagcgcctagcgagagttccagccccagacgcccacctgtgcctcagggcaccgcctgccgagcagagaaggcacagcagccgtcagagtccatgagaggtgaaaccacacagcagggatgtccaatatcagaactattaatatcaataaaagtataaccttcccaggtctatgcccaagagaattgaaaacatccatccacacaatacctgtgctcccgcgttcatagcagcattactcaaaagtcaaacggtagcaacaacccaaatgtccatccacagatgaattaagacatgaagtgtgttctgtccatacaatggaatattatttggccataaaaaggaaggaaattctgacgcatgccacagcctgagtgaatcctacaaatattacgctaagtgaaagaagccaatcacgagtttatgtgaaatgtccagaataggcaaatctgtgtatcagagacaaagcacattggtggttgccaggtactggaggaagagagaagaggcatgacagctaacagggacgggctttctttggaagatgatgaaattgtggaatgatggttgcacaactttgtgaatatactagaaaccaatgaattaaaaactttggaagatgaattttatggtctgtgaattatatctcaattttaaaacttttttttttttttcccgagac

SEQ ID NO: 222446 - DNA, 1000 bp, Homo Sapiens
tcctctttgctgtttgtagtagagacattttgaatgaaacttggcactgcttgattcaaaactgtggaaaccagatctgtttagtctcctgtttgtatgcgtttgctaatggtagctaaataaccagtttttgttgtaaatgcaccaattctgaaggcactttatgtactacatggaggtcatatctggttttgtttttatttttttatcatgaacattaaatgtgatgatgatttcttttccctgcacacatctttccggtgcaatatctatcaattgtgaatctggctgctggtgtataaaaacctggatgtaaagctgagcctacagacctgtcctcaccaactgttttgtgatttctactcaactacaaagatttatttaatgtactcttaatctaactgagttttgttaccaatgacctgttgcatgcttcaataccgtgtactgcctgagttgtgcctcttgtgtgctagattaaaagtgagacagagacttgacttgatcctctgagctcaagctattgagctggtagtggcagaggactgagggtacctgcacagtttgattcttttccacgtgtaagtctccattgcagaattgtcgtgctttgagaaaacacctgaggcagtgtgggagttgaacgaccctgctgtcctttttaacctgtgttgtcctagaccctgtcggggcagtcaggggacactagagatttgatctcatgcgagtcatcaataggacaaaaaagttgtggtttggggaggtctgtttgttacataaaaaggacctttcggtgtaagaaattgccgtttttaccctgccctggctggcatgtgagaagccatggaaggttgtggttgtaaatgagttgtctaaaggggtgcagaggcctgaggtttctaaaagaaggtagatttctacagagctgagtgttggttcctttttcttattggttgaaaattacctggtagtgatcagaaaacttagatgctatgtaact

SEQ ID NO: 222447 - DNA, 1000 bp, Homo Sapiens; identical to SEQ ID NO: 117179

SEQ ID NO: 222448 - DNA, 1000 bp, Homo Sapiens
tgagtcccacatcaggaaggagcaccccaaacagacagaaaacgccacgaggcaagtgtagtctctcacagcctggaccctctgtcagcagtccacatagcaggtccacaaaaggtggctccgattcctccctttctgagccagggccaggtcggtccggccgcggcttcctgttcagagtcctccgagcagctcttccccttcagcttctcctgctcctcctcatcgggcttgcctgccttgtaccaatgtcagaggaagactacagctgtgccctctccaacaactttgcccggtcattccaccccatgctcagatacacgaatggccctcctccactctgaactaagcagatgccatctgcagaagtgctggtagcataaggaggatcgggtcataagcaatcccaaactaccaacaagaggaccttgatcttggcgaaagccctcggtgtggcagctttagccctcctccagatcacatgtgtgcaaattatggcttcagaggtggaagataaacagtgacgggggaacaaacagacaacaagaaggtttggaagaaatctggtttgagactctgaaccttagcactaaggagattgagtaaggacctccaaagttccccggactcatgaattctgggcccttggcccattctgtgcacagccaaggacttcagtagaccatctgggcagctttcccatggtgctgctccaaccatcagataaatgaccctcccaagcaccatgtcagtgtcgtacaatctaccaaccaaccagtgctgaagagattttagaaccttgtaacatacaatttttaagagcttatatggcagcttcctttttaccttgttttcctttggggcatgatgttttaacctttgctttagaagcacaagctgtaaatctaaaaggcacttttttttagaggtataaagaaaaactagatgtaataaataagatcatggaaggctttatgtgaaaaaagttgaatgttatagt

SEQ ID NO: 222449 - DNA, 1000 bp, Homo Sapiens
ttatttcttaacagactttctataggagttgtaagaaggtgcacatatttttttaaatctcactggcaatattcaaagttttcattgtgtcttaacaaaggtgtggtagacactcttgagctggacttagattttattcttccttgcagagtagtgttagaatagatggcctacagaaaaaaaaggttctgggatctacatggcagggagggctgcactgacattgatgcctgggggaccttttgcctcgaggctgagctggaaaatcttgaaaatattttttttttcctgtggcacattcaggttgaatacaagaactatttttgtgactagtttttgatgacctaagggaactgaccattgtaatttttgtaccagtgaaccaggagatttagtgcttttatattcatttccttgcatttaagaaaatatgaaagcttaaggaattatgtgagcttaaaactagtcaagcagtttagaaccaaaggcctatattaataaccgcaactatgctgaaaagtacaaagtagtacagtatattgttatgtacatatcattgttaatacagtcctggcattctgtacatatatgtattacatttctacatttttaatactcacatgggcttatgcattaagtttaattgtgataaatttgtgctgttccagtatatgcaatacactttaatgttttattcttgtacataaaaatgtgcaatatggagatgtatacagtctttactatattaggtttataaacagttttaagaatttcatccttttgccaaaatggtggagtatgtaattggtaaatcataaatcctgtggtgaatggtggtgtactttaaagctgtcaccatgttatattttcttttaagacattaatttagtaattttatatttgggaaaataaaggtttttaattttatttaactggaatcactgccctgctgtaattaaacattctgtaccacatctgtattaaaaagacattgctgacc

SEQ ID NO: 222450 - DNA, 1000 bp, Homo Sapiens; identical to SEQ ID NO: 117183

SEQ ID NO: 222451 - DNA, 1000 bp, Homo Sapiens
cttcagctgcctcagctgggactgaagacctaagctgattctctttcctctccactcctaagaagcaattttctgttcctctccttccaccactttttactttctgctatctcccatctcccgcttcccttccatttcctttctagaaaaccctggtatttagctcaggccaaactgcctcagcagaaaggtggccttggacaaaactggtccaagaatttgaagtggcagtacttgcggattggctctgtccagcaaggcctcagctgcttgttgcgtctgctttccctcccctaacagaagggtaccctggcttattcaggggactccttagtccacactgtgtcacctgcatgccttaatctttcattgctggggtgtggccttgggagatcctgggccagcccctccacacatctccctaagtcagagtggctgctggccctggtagatttgacttgctcttgcctcactcgacctccaaagtgggactgaagacagtggtcaagagacttgagttcgggacagtaagccaggggttaaggttctttcctttttttgaaagccaaagacccagtttgcattgtgctgctgcattcatggttagaagctttccatgcctaggttctagggaatttatttttctatgtgtatatattttcaaactttgtttcctgggtactgggcatgtgcctgtctgagccccaggtctgtctacaccccaccattcattctgtctgtctgttccctggacactgcctaaaagggtctcaagacagtgccctgtgggttcctaggactagggcccatcactgttctcttctgctgggaaatgcagctttaaaatggctaaccacagcagagggcagatgcttgatagattatcttttccttgctttcttgtttctgttttgaaagtgaaatggggttttaaattgttatttaaactctttttccaaataaaggtttaccttttttccccccaaaaaaaaaaaaaaaa

SEQ ID NO: 222452 - DNA, 1000 bp, Homo Sapiens; identical to SEQ ID NO: 117184

SEQ ID NO: 222453 - DNA, 1000 bp, Homo Sapiens
tgtgtatcctgtacatctgtgtgccaggctggggcagactgtgccaatgctcaccaaacactagaatctgctcttacacctctagcatgtatctcgttgtagcagagttgtgcactttctcagcattgtgtagtgttttctaattgcatctaaaaacttatcaaaagtgattgtgaaaacagtgtcttagaagtataaacagaaatggcaatatttatgtcctgtgattcaagcccaaaggttataaattcaactttcacagggaatagcactgctaatcttactttatgatttaaatataaaggaaaatcacagcagccttaatttcctgttggtcggatcatttgcagcagttctagttcctgacttttaaaatggatgaaattttctctttgtctgatttggaaaaggaactgcttttttgccttactgctttggtataaggatgaaaaacatgagcactctgcagacaaaatgaccttaaatcacattgattaagatattttaaaagttagcagtgaaccaaaagtagtttcagattagcagaaataaagagctttaagttttaaaagttgagattgaatatttaatgaaagtttattaattctttttccaggaatagcagtaaggtcagtttttttccctaaaataaaaagttttaataaacagaaaattatagcaacagtacttaggagaatagttgaagattgtattaattttaattataatagttatttgtcataggctattgatgattagaatttcattagttttgtccactataattttaaaaatagttgtgtcaaatacaaattctggtaaactgttaggttttaacaccagacagtattcaaaggaaattaatgtttgcaaacataaatccatagtcttcatttctttatattgtcacctttgtaaaagtgtttaaaatttgtattgtttgttttgtatatctttgggcatcttgtgtctagctataataaaaagaaacggtgccaag

SEQ ID NO: 222454 - DNA, 1000 bp, Homo Sapiens; identical to SEQ ID NO: 117186

SEQ ID NO: 222455 - DNA, 1000 bp, Homo Sapiens
aggcaggccaatgctctgtcccaccagctggagcagttcaacatgatggagaacgccatcagctccagcagcctgtacagcccgggctccacactcaactactcgcaggcggccatgatgggcctcacgggcagccacgggagcctgccggactcgcagcaactgggatacgccagccacagtggcatccccaacatcatcctcacagtgacaggagagtccccccccagcctctctaaagaactgaccagctctctggccggggtcggcgacgtcagcttcgactccgacagccagtttcccctggacgaactcaagatcgaccccctgaccctcgacggactgcacatgctcaacgaccccgacatggttctggccgacccagccaccgaggacaccttccggatggaccgcctgtgagcgggcacgccggcaccctgccgctcagccgtcccgacggcgcctccccagcccggggacggccgtgctccgtccctcgccaacggccgagcttgtgattctgagcttgcaatgccgccaagcgccccccgccagcccgcccccggttgtccacctcccgcgaagcccaatcgcgaggccgcgagccgggccgtccacccacccgcccgcccagggctgggctgggatcggaggccgtgagcctcccgcccctgcagaccctccctgcactggctccctcgcccccagccccggggcctgagccgtcccctgtaagatgcgggaagtgtcagctcccggcgtggcgggcaggctcaggggaggggcgcgcatggtccgccagggctgtgggccgtggcgcattttccgactgtttgtccagctctcactgccttccttggttcccggtcccccagcccatccgccatccccagcccgtggtcaggtagagagtgagccccacgccgccccagggaggaggcgccagagcgcggggcagacgcaaagtgaaataaacactattttgaaaaaaaaaaaaaaa

SEQ ID NO: 222456 - DNA, 1000 bp, Homo Sapiens; identical to SEQ ID NO: 117191

SEQ ID NO: 222457 - DNA, 1000 bp, Homo Sapiens
gcctctgagtttcagatgacctctctgtagggacactgtgttatcaaccattaagaagaaagaaccacaagcctcccaagtatttgggttctatcttagggttgaaatctggtcattattccctctacccttggaatcagagcaatgtgtcttctttcctccaacctcttaccttagatgcatcctggttatctggaagcatgggaaagaaggctacttatctctttgtatgtggctccagtctgtgaggatacataacattttctctacaatgaatctgtgctaatattttgccttctttctttcttttcttttcacccttagagacagggtttcactatgttgcccaggctggtctcaaactcctgggctcaagcaatcctcctgcctcagcttcctgagtagctggaaccacaggtgtgtgctaccgtgcctggcacttttttgccttcttaatggagatattcagttttctttttttcatttaaacaaagaaaaaaaatgtatctactctaccttccctctgctctcctccctccctatcctacttgcccatatgagcacggctccccatggccacatactcctgcaaagcttttatgctgcttcgcttttctctaaacagatctgatattgctgctcctgtggttttctcaaaattaactttgccgtggtttttaaaaaggaatcaaaatgcattgttgcattaagctttttcaataaaggaaaattacggaaggaaaataggcaacaccagcaaattatatgtggacaggttctaaactctatatatacatatatatatatatatctatatatctatatacgtaatcatctagttctgtcatcttactgaaaggaataacacttctaaagatcaccatttctgagaagttcttggaaatctttatgtctaagtgattgtattagatcagcaataatgactatgtaatctcaaaaaacaaataaaatattcttaacatggaaaaaaaaaaaaaaa

SEQ ID NO: 222458 - DNA, 1000 bp, Homo Sapiens; identical to SEQ ID NO: 117192

SEQ ID NO: 222459 - DNA, 1000 bp, Homo Sapiens
ccctttagtgaaatgcctgttttcagctaagaaaggagaggccaggcaagcaaagtcatgccacaaagcatatcagagacccccgcagactcctggccccgtcccgccccccgtctgagttgtgtttttgttgctgttcctctgttgatggccagctctgctgttggcatgagccactgatgttcatgtgagaattactgtttttaagtgtctctccacttaggtgtcctcagttcccacttttgctctcatttgccttcacagaggccactccacctgtccggatccagctgtctggtcatggtttggtttatttattttgtccttcaggggctgttttgccctaagaatgagggggcttcccctggtctgcagttcccaactttatcccttgctggccatgcgagcccagccctggtgcctcatgggatgggggggtaggggtccccaggatcttctggaggaaggtggccatggatggatgggctgtatctgtgttttctctctgggagtctcatgggtccagcatcaggcctgaggtcagcaacagggaaagagggtgggcacggggagggcttggccccgcctatctagagacttgcctcgggcccctccttggggaaggtttgcgtgcagagctgcaagggagagggttccagaagcattgccttttgcctcgtctaataggatccttaggacactgtgggctttaggaatgactatagatgctcacacgtgtttaaagtgacatttggagatgctctcagtcctgtggcatctggcacgaagtctccaagaagccactttgcctcttctcccttcaagcacaagctttactgcaaaagggccagtcgcgtttctatttctctcgatcccaggcttctgcggaccgacgatacgtttaaatgttgttctagtaaatattcttgaatgtattaaaatggctgaaacaacaaaaaaaaaaaaaaaaaaaaaaaaaaaagaaaaaaaaaaaaaaaaa

SEQ ID NO: 222460 - DNA, 1000 bp, Homo Sapiens
gtgtgaagaggccatcctggaacccaggtgagggcaagatgaaggcttccaggcagaacagctgcagagagtttggctatatgcatctgcagccccaagagctcccactgcaagacaagtgttggggaagatgggaggttgtgggtgaggcctctaaaggtcctctcccaaactgaccaggctgatgtcaacctaaccccctcaggggcagggaacaggggagggctccacaagcgtgtctggcattcccacccaccatggaagactggatacgcacctggaaacaaaaggactatggaagctgttcaagatacatttgatcttcagaaaagcagaatttggttcaactgttgacagaggacacaaatacgttgttccagagctcagccttctcactctaaaagaaagatatttttctatttattttctacatctggccagtggctctggtgctagatgccactgtagccagatctccaacagtgccttggaccatggactcatactcaactgagtaagaaggggctggtgcccagtcggggtggctgagctggtccttaataggttgtttcttggtcttgctttcttcatgccctccccactgctcctgccacctttagataagtttctctagctaattttgtggccaatgtaaaattcgtcatcaacctaacaaacacaaccttctcagcagcatttctcccctgtgatggaaataaagtgtttagggcagtgggaggagaaaattctccaggtgaatggggaagggtctgttccagcctctccctactcccatcccatttccaccaactggggaactgtgactatctatctcccccgacttctaccagggatgccttcacgccaaggctgttctcaccagctgcctcagatgacaaatgaggctaatggacataatctacagtgtcctttttcacttgcaccttttttataagaatatattgtaatactaaaaaatattaaattcataccatcccta

SEQ ID NO: 222461 - DNA, 1000 bp, Homo Sapiens
cctatttgagctgcagtcctgtttgcgctccttgaattggttaggaagctgcttccttttccctcctgcttcccttcagtctcttcaggaccacaggatggatatgcagacatgtggggtcattgggaagggagtgcgcttcttttctctgtcttagaaaagggagtcaagggttggctttggaattgggcctctggacagagtcagaatgagggaataatgaataggtcacatctggttggtggaaaactaggtgaagtgcttctttaatatgcactgtcttgtcttcccacgcaagatgtgacaatgtttgagaaaaggtgtgtcatactcagtgacttcaatttgcaaatgtggggcctaaagaaagctctgcagctctgaacctctcactggccagagctcagcctattggtcccatccatgatgctgagacaaacagaaactggaagctgaagtcagtgtctctggtgcttagaaaccctgtggatttccctctgaaccaagatttttagtagtaaaataaacaactcatggacatctgtcagatgagaagttttggtcctgttagagaggagaaagactgtaatgaaactactagacccatttgggctaaagtttggcttttccttccttgagtcatagaacatatccatctcccaggaaatgtccttctctggcgtctgcttgcccttctgagtctgccttttttgcactgaacataagcactttatactaatgggtcacaaatcttgcagcccttaatttgggataagaccagattttcctgacattttcctctaactcattgaactatcaaattataggcaaccactgactagactgatatgagatgaggctaaaagcctttgaacaccacgctgtagtctccaacagaaaaacaccaccaaaacagatacccatgttgaggggttgaatgttttactacaaacaagccacaataaagtgtctatcaacatgaaaaaaaaaaaaaaaaaaa

SEQ ID NO: 222462 - DNA, 1000 bp, Homo Sapiens; identical to SEQ ID NO: 117199

SEQ ID NO: 222463 - DNA, 1000 bp, Homo Sapiens
tttcctatgcactaaactacattatttggatctaagctataaccacttgaccttcattccagaagaaatccagtatctgagtaatttgcagtactttgctgtgaccaacaacaatattgagatgctaccagatgggctgtttcagtgcaaaaagctgcagtgtttacttttggggaaaaatagcttgatgaatttgtcccctcatgtgggtgagctgtcaaaccttactcatctggagctcattggtaattacctggaaacacttcctcctgaactagaaggatgtcagtccctaaaacggaactgtctgattgttgaggagaacttgctcaatactcttcctctccctgtaacagaacgtttacagacgtgcttagacaaatgttgacttaaagaaaagagacccgtgtttcaaaatcatttttaaaagtatgctcggccgggcgtggtggctcatgcctataatcccagcactttgggaggccaagatgggcggattgcttgaggtcaggagttcgagaccagtctggccaacctggtgaaaccccatctctgctaaaactacaaaaaaattagccaggcgtggtggcgtgcgcctgtaatcccagctacttgggaggctgacgcaggggaattgcttgaaccagggaggtggaggttgcagtgagccgagattgtgccactgtacaccagcctgggtgacagagcaagactcttatctcaaaaaaaaaaaaaaatgctccagggctttaaatgagaagtaaaattttctaagttaataaagatgaagaatgggtgactattatgatgaaccataactaaatgtcttattaaagcaactgagtgtctagccctaaattaaccaggtaaaaactgttaacactaacctgaagttttgtgaataactgttctttaacttattgagatgttgcaagaaatgcacatccagggtggactgggagctatgaaatgactaaattcctccttgcagtgtttacct

SEQ ID NO: 222464 - DNA, 1000 bp, Homo Sapiens
ttctgaaggacctctctagctggccagtgctgaggaggttggagagagaaagggtgaaagcagagagaccagtgcagggctgttaacagggttgcaggcgagagactggggtgctgggctcccctagactaggactccagtgccctcctctcccaagagacaaaggccattgcattgaaggaggtgggaaatgattagattctgaacatatgtaattatttttcagtctttttcaaagatacaaatatttacatagttttaatcatgtaatatatacaatttaatgtcctagtgttttacttaatagtgtatcatgttttccctgttggtatgtagcctggataaatgctcttaattataaaaaattctgtcgaggagtgttccatagtttattgttttcctattatgagaatttaggccaagtgtggtggctcatgcctgtaatcccagcactttgcgaggccgaggtgggcagatcacttgaggtgaggagttcaagaccagcctggccaacatggtgaattatctctactaaaaatacaaaaaaataataataatagccaggcgtggtggcacatgcctgtattcccagctgcttgggaggctgaggcaggagaatggcttgaacctgggaggtggaggttgcagtgagccgagatggtgccactgcattccagcctgggcaacagagcgagactccatctcaaaaaaaaggagacttcatgtgcccccaatttttcactattgttatttgaaaaaatatttttatttgtaagagtttttctttatttaaaatgttcattaataaagttgttggacgggaagcaaaaaaaaaaagttgtttaagataaattcccagaagtgaatttgttagatcaaacacttaaaactttttgttatggaagaattcaaatataaataaaaaattgtgagtaataaaatgaactcacagtttcaacaatgacccacaaaaaaaaaaaaaaaaaaaaaaaaaaaaaaa

SEQ ID NO: 222465 - DNA, 1000 bp, Homo Sapiens; identical to SEQ ID NO: 117204

SEQ ID NO: 222466 - DNA, 1000 bp, Homo Sapiens
ccacgggcgagggcttgctctggactcagtctgtcaagtccccgaagcttcctgcagctccaccttgtaaaaatgctgcctttgggaatcttcgaaatatgtacacagagaaaatcacatgaaggagacctggggtccccacttgtgagtgcaactgcaagtaactctggctagagagacacatgtgtcttgtgtcaaggcaggaggataacctggatgaccttctgaggtctcttcagcccttttcgctagtggtcacccaccaccatggttacttgccagcaacatctctattgctggatggtccctgtctataaccttgggctagtatattttttccaatatgggaccttagtcttactactgatgagttctatgggtctcttgctagggggtaaggatttttattcttgggcttatagagccagttagatcataattcttatgaaatagagagtgtcctaaatatcactgaaataaaaagtaggaaaaagaagcttgaattttaagactgaggctgctctgcagattctagtttggctttcagagttcaagagtggtggcatcttcacctgaattcttcaatgccagggtaataaaccaaaatagtcctaatcagtatatgctagttgagcatcggcataattttctttcctctggctgatcccagccctaaaggaagggtagacccgtgtctttccagccctaaaggaagggtagacccgtgtctttccagccctaaaggaagggcagacccgtgtctttccatgcccgagggccacgacgtcactatgcagggcacacgtggcttggtttaaaaaggtcatcttagatttatcttagtaaatgtaataaattattttttagatcttgaaatttataataaaaatactttacctaccctgatcaccaaaacctgatgttttaaatgtgctttctttttgaaatttatgttttcaaataaaatctccctaaagcaatatttaaaaattggtcaaaa

SEQ ID NO: 222467 - DNA, 1000 bp, Homo Sapiens
ctgagcatgtcttattgagtccctaatggaaatggtgatcaacaaaaggttatggaagaatggtttatgaacttcccataggaagcacctgagagatagtaaactgcagcaagtaactatgtgtaagtcctcatcaaatgaaaagcagaaagacaagaacaattagtcaagagcagtagccctgtcagagcctcggagcaatacctttctgtacccgtggtgagacaagacccagagctactggaaaacaagcactttggaagatttgttttgttttcatggaataataatatgtcagggtataatttaacgtgagtttcttatgtgcccttaaagactgttagacaagaaaagcattcactggctaataatccataggtcgacctatgtcctaagttaggtgtaaggtccgatgccttggcccacactcgagctctctttacattgttagttgtcaaccttggctgatggaaatcccgtaaccactatttgttgcactgtgccttgaagggcagcaggcccaagtgctgctctgactgaaaactgagttaacaagatgaaatctaaaggatattcacagtgacttcaattcaggaagaatgcttccaaaagagcccagtggggaaatctgacatcacagaagacattaattcagtcactttcaaagagtttgtctacaggcggtttctctgttatcaaaggcatttgaaataggattttacttaaacaataatggaacacaggagtatttaaagtgaagaacactttgcctgaatgtgatcagggcacataagtgacattggcatgcttcatatggcgtgcttggagccagaaaaacttagcggtttattttgtttatatttaagcacagctttaaaaaattcattatcgtttattcagtgtccgaattgaggccatttgggaagaaaattctagcactggtggagaattatagaataaagattataaatggttggataagacaaaaaaaaaaaaaaaa

SEQ ID NO: 222468 - DNA, 1000 bp, Homo Sapiens
cgcttctgaaactgatagacactgcctcagctccgtgcagggcagacgcacaagagcagaatctccgtgggacatctctctggagcatcaatattactgcagtatttggaagaaacaaatttaaataagttctaaggtgaagaatggaacatttaagacaagtctggaaagtcatctgcctttaataactgtcgtttgtccttaacgtcagactttctccaagaccaaaactctaagaacttatttccattcttacaaatagtaaaaatgataaatcatatcaagtcaattgaaagtcctgcctgctgctttcctaaattgcaatatggccttggtatggttttatttgtactttggtgggggattcgtggatctttagattaaaaaaaaaaataggtttttgaacaatttttgcaagtttgcagctgttagttattgatttatttttgcaacccatctaattcttctgtctctctcctctcctcaggctcaataattccatgggtctctaaggctgtgtttattttctttaaattttgttgatttacttttatactccatttgattttttctatctctcaccttttctcagactcagtcatcccacaggtctgtaaggctctgttcattttctttaaacttttttttttcctctcctcagattggataaattatattgctatgtctctgtttctgaactatagaaaagctcaaaattactatttttatttctcattttttatatggctattttttctctgctgatgtttcacatctattcatttatgagaatattttcctttgccctcatgagcgtgtttataatagctgccttcaaattcttgtctgccgtttacatcttggacatcttggagatggctactgcctgctttttatcttgtgtatttattacattttcacgtgtcttcacgcatctcttgaattggaaattgtgccctggagactgtatacaagactggattaaaaagactggattctg

SEQ ID NO: 222469 - DNA, 1000 bp, Homo Sapiens
acagctagaaaataaaaccaatttgtaaagccacatttgcatatgatgccagcctcacgcatttgtatatctccagaaattcaggtatgcctcaccaatttgcccgtctttaataaaatcttgtgttaaaatttgcatcacgtcgccttcctatgtatgacgaaacaagaaacagagatttccaattgctcttttgtcttcagacatttagtaatataaagtacctatttttatgctgaaatgtttatacaggtttattaatagcaagtgcaactaactggcggcatgccttgcaacacattttgatatattagccatgcttccgggtaaaggcaagccccaaactccttatcttttgcagtctctctgggatcagtaaaagaaaaaaaaaataatgtgcttaagaagtgggactgtaaatatgtatatttaactttgtatagcccatgtacctaccttgtatagaaaaataattttaaaaatttgaatggaagggggtaaaggaagtcatgaagtttttttgcatttttatttaaatgaaggaattccaaataactcacctacagatttttagcacaaaaatagccattgtaaagtgttaaaatttacgataagtattctattggggaggaaaggtaactctgatctcagttacagtttttttttcctttttaatttcattattttgggtttttggtttttgcagtcctatttatctgcagtcgtattaagtcctattgctagaataggttactacaaaaaaggttatattctgaaagaaaaataactgacattatatataaccaattaatttaaagtattgccatttaaattacacactgagagcatgtcctatgcagacatagatttttctgttcatttatttttcttcattgcagtggattgatttgataaatagatgtgttgaattactacatttgctgtacatattatttaataaactttattcagaattgcgtggcaaaaaaaaaaaaaaaaa

SEQ ID NO: 222470 - DNA, 1000 bp, Homo Sapiens; identical to SEQ ID NO: 117212

SEQ ID NO: 222471 - DNA, 1000 bp, Homo Sapiens
tagggcccgaggtccaagcctccgctaagctgcttctcaccccagctgggaccggccaccggcgcctcagcctccagcgtataaccgggcgttgcagggcgaccccagcttcgtcctccagatcgctgaaaaggagcaggagctgttggcctctcaagagaccgtgcaggtcctgcagatgaaggtaaggcgcctggagcacctgctccagctcaagaatgtgcggatcgaagacctctcccggcggctccagcaggcggagcgtaagcagcggtgagcggcggcccgggccgcgcggggacgcccgggtacccgccagagccccgacgccgcgccggacccacccaccgatggatagaccattgggagggcggagcccgctgctctcacgagcctgctggggcccgagtgccctccttccttgggatgggtgagcgtgggaggagatgggacaggaactctaggagcgcaggcccgggactgagccgcctcctaccactccggagatccgggtcaggagaatggaccgctttccagagcccagaagccacgtgcagagacctagcctgtcccccaaagcagtgtccaacaccttgggcccggccttgcatctcccggcgctgggccttggggggcggtcccttggctctgtccacacccccagaatcaggtccccgcccagctccgaggacggcggcgtctccatccacgctagttccccatgccctcagccatgggggaatctgtcccgggccgctgaggggctcccctgcccctcctgggagcttacctgggacccacctcggcgacggagaccgcagcagctggagaggaaggggtgaggcgtgggatcgccaggagtagggaggacatcgacgatgtgcccgtagcagtcacccctccctcctcgcgcacggggtactgaggcggaaggtttgaaggttacggctcagggctgccccattaaagtcagtgttgtgttctaaaaaaaaaaaaaaaa

SEQ ID NO: 222472 - DNA, 1000 bp, Homo Sapiens
cgacgatgaagacatgcaggaggaacgaaatccccacagggaaggtgctcgaaagacccaagagcaagatgaagaggtgggcttaggaggacccgtcccttcccaccctcctgacgcagccccggaaacccacccacagccaggagccccaggggccgaggccatggagcgccgggtccaggctgtgcgtgagatccacccgttcatagatgactaccagtacgacaccgaggagagcctgtggtgccaggtgacagtgaagctccctctgatgaagatcaactttgacatgagctccctggtagtatctttggcccatggtgccgtcatctatgcgaccaagggcatcactcggtgcctcctgaatgaaacaaccaacaataagaacgagaaggagcttgtgctaaacacagaaggaatcaacctcccagagctattcaagtatgcagaggtcctggatctgcgccgcctctactccaacgacatccacgccatagccaacacgtatggcattgaggcgctgcgggtgatcgagaaggagatcaaggatgtgtttgccgtgtatggcatcgcggtcgaccctcgccatctctccctggttgctgattatatgtgcttcgagggtgtttacaagccactgaatcgctttgggatccggtcaaactcttccccgctacagcagatgacatttgaaaccagcttccagtttctgaagcaagccaccatgctgggatcccacgatgagctgaggtctccttctgcctgccttgtggtcgggaaagtcgtcaggggcgggacaggcctgttcgagctcaagcagcctctgagatagcagctaccccggcaccatctgcccagctccaaggacccttggtgagggtggttggccagccctgccttctgcatgagaggaccaggagactggaatccagggcagttccaagtgacagtacagagcacagcagcgaccttgggcctgaaagcagtgggcctctgagct

SEQ ID NO: 222473 - DNA, 1000 bp, Homo Sapiens
accccatttaggtcagcacttgattcgttgttgctgtgaaatatgtccatgggacaaaagagggaatatgaaatatttgcatatgggaagattatagagcataataattttgtaaatggagcaatctcaacctctatttctagatcacattttcttgatgtcttccttcaaattaatgaccttggattacataaggatttctatgcattcattataatttgttattcctttcaatatccttgtatttcaaatcttccatataagaattagacatggcaattcttaaattgattcagaatggtctgatactattccagtatcacctccttaattctgtttctcctcgttttcctgattttccttctcattctctccttccccgctctgtctctctctccctgtcactctctctctctcgttccttattttttgtttcttacctcttactgtttaacctgttgcttccttctggattaatacatttagagccattcctttatatggtcacatttcctatgactttactcaattacttttaaaatcctttctattctgagactaatttttaagaattacaaagctcattcttctgaatctaatatcactaactcctagactttttccgttttctttggatacactttaagtaggaatttatcagaattttcattcaactcgttctttaatgcagatatttactagttataagaccttaaggctgggtgcagtggctcacgcctgtaatcccagcactttgggaggctgaggcgggtggatcacaagctcaggagttcaagaccagcctggccaacatggtgaaaccctgtctctactaaaaaaaaaaaaaaaatagaaaaattagctgggcatggtggcaggagcctgtaatcccagctattctggaggtggagacaggagaattgcttgaaccctggaggcggaggttgcagtgagccaatatctcaccactgtactccagcccagtgcgagactccatctc

SEQ ID NO: 222474 - DNA, 1000 bp, Homo Sapiens
tcccttcctggagaccctgcctcttgctctgttctggggtccctcaacctgcacctgtacagagacccagctcttctgggtctccgctgtcccctgtatcccagcttcccagaggaagcagcactggaggctgaggcagagctgggcggccagccctctttgactgctgaggactcagagatctcgtcccaatgcccatcagccagtggctccagtggctctgacagcagctgtgtgtcagggcaggccctgggtaggggcctggaggacttaccctgtgtctgagcccgggactggacgagcagtagatccagcagcctgcagctccaaggaacattgcctctctggatctgctgtgaccagggtgtggctgacacctgggctacctccaacctacatgtgcaacgctgttgactaccctttctgatgtgtgtggccattggactaactggcacggggcctctctagggaagtctggttgtagagcctgaataggctcctggccccatgaccccttctcctgtccccagctcccatcccagttgtgggttaagaataggctagagcagacattgggtgtttccatgctgtaggctggtgggggaccatgtgcctctaggcagtgactagggtgcccccacccctcaggaagaacacaggtgggctcctagcagctgatccccaatgcctggccttaaagccgagctcagttaccatagggacaggtccacctctactgggccctcatgcttgcctttcctggcccccaggcccagcccctttttactggggcagtttcgttattttgacttgatgccttttgaataactttcaatagaattgtctaaaattatcttactggttgttaggcctttggtgtctcagagaaggagtctaggtctttgatgtgtgatttaatcttttatttgtttataataaaaaatagactgatatgtaaaaaaaaaaaaaaaaaaaaaaaaaaaaaaaaaaaaaaaaaaaa

SEQ ID NO: 222475 - DNA, 1000 bp, Homo Sapiens
gaagcaaattcagatcactcagctctttggggttcccgttgtggtggctctgaatgtcttcaagaccgacacccgcgctgagattgacttggtgtgtgagcttgcaaagcgggctggtgcctttgatgcagtcccctgctatcactggtccgttggtggaaaaggatcggtggacttggctcgggctgtgagagaggctgcgagtaaaagaagccgattccagttcctgtatgatgttcaggttccaattgtggacaagataaggaccattgctcaggctgtctatggagccaaagatattgaactctctcctgaggcacaagccaaaatagatcgttacactcaacagggttttggaaatttgcccatctgcatggcaaagacccacctttctctatctcaccaacctgacaaaaaaggtgtgccaagggacttcatcttacctatcagtgacgtccgggccagcataggcgctgggttcatttaccctttggtcggaacgatgagcaccatgccaggactgcccacccggccctgcttttatgacatagatcttgataccgaaacagaacaagttaaaggcttgttctaagtggacaaggctctcacaggacccgatgcagactcctgaaacagactactctttgcctttttgctgcagttggagaagaaactgaatttgaaaaatgtctgttatgcaatgctggagacgtggtgaaataggccaaagatttcttcttcgttcaagatgaattctgttcacagtggagtatggtgttcggcaaaaggacctccaccaagactgaaagaaactaatttatttctgtttctgtggagtttccattatttctactgcttacactttagaatgtttattttatggggactaagggattaggagtgtgaactaaaaggtaacattttccactctcaagttttctactttgtctttgaactgaaaataaacatggatctagaaaaccaaaaaaaaaaaaaaaaa

SEQ ID NO: 222476 - DNA, 1000 bp, Homo Sapiens
acgaggaggccaccccctggcgatggcagggccactcagacgtggactttgctgtggacgagaatggcctatggctcatctacccggccctggacgatgagggcttcagccaggaggtcattgtcctgagcaagctcaatgccgcggacctgagcacacagaaggagaccacatggcgcacggggctccggaggaatttctacggcaactgcttcgtcatctgtggggtgctgtatgccgtggatagctacaaccagcggaatgccaacatctcctacgctttcgacacccacaccaacacacagatcgtccccaggctgctgttcgagaatgagtattcctatacgacccagatagactacaaccccaaggaccgcctgctctatgcctgggacaatggccaccaggtcacttaccatgtcatctttgcctactgacacccttgtccccacaagcagaagcacagaggggtcactagcaccttgtgtgtatgtgtgtgcgcgcacgtgtgtgtaggtgggtatgtgttgtttaaaaatatatattattttgtataatattgcaaatgtaaaatgacaatttgggtctatttttttatatggattgtagatcaatccatacgtgtatgtgctggtctcatcctccccagtttatatttttgtgcaaatgaacttctccttttgaccagtaaccaccttccttcaagccttcagcccctccagctccaagtctcagatctcgaccattgaaaaggtttcttcatctgggtcttgcaggaggcaggcaacaccaggagcagaaatgaaagaggcaagaaagaagtgctatgtggcgagaaaaaaagttttaatgtattggagaagttttaaaaaacccagaaaaacgctttttttttttaataaagaagaaatttaaaatcaaaaaaaaaaaaaaaaaaaaaaaaaaaaaaaaaaaaaaaaaaaaaaaaaaaaaaaaaaaaaaaaaaaaaaaaaaaaaaaaa

SEQ ID NO: 222477 - DNA, 1000 bp, Homo Sapiens; identical to SEQ ID NO: 117223

SEQ ID NO: 222478 - DNA, 1000 bp, Homo Sapiens; identical to SEQ ID NO: 117224

SEQ ID NO: 222479 - DNA, 1000 bp, Homo Sapiens; identical to SEQ ID NO: 117225

SEQ ID NO: 222480 - DNA, 1000 bp, Homo Sapiens; identical to SEQ ID NO: 117228

SEQ ID NO: 222481 - DNA, 1000 bp, Homo Sapiens
gaccctctgaaattctaggactggatattaaaatgcctgaacctgttatctaaatcctttttaagaaacttaatgttccagctcttgaactacactgtggaacagtaatttgtgcccaatttagtggaagataatgaggctcactgtaaacactacattgtcctgcaaagtaattctgatgagagtttactgacttctagagccattctctttaaccgtctgcaggtctaaggattaactatatttgtgatttgtaataaaactgagttgtacaacactgcctgtgtttgtctggccaagacatttgcttcacttttaaaatgcacgttatctttggagaggtgaattattctacaaaatgcaccctaaatctcattgtttaaaaccttactgatctaataccatctacacaaaaaaatgttgtagttgcagaacttagtttataaaaacaaagaatgtgtatttcttcaatagccgggtatttggattgttctcttgataatatttgaatgtgactcttggatttaagtgcactattattcatggcttatacaataaaattgcactgtatggcaaatatgtctataatgtatgctttgctgaaacctcaagagtgctgtaaggtacaggtttccatattgtgaacctgtgtacgcacacacacatatacatacagtcttagggaaaaaaaaaagcagaacttttgtaagtctgtgtaacattttaatattgtttgtaatattcactaggtgataatttcccctgtaccctataactgtaatcattcaccttgggttggccggtttgtcaagcttggtttactgaatcaagaaagagtcttgtcgaatgtggtactgttcttagtgtgtaatatttgcgtatggtgttcctctgcctcagaggacagttgcacagatggctagtgttaaatttctatagacgatggtaataaaatctgaatatatttaagtgctaataaattaaaaaaaaaaaaaaaaaa

SEQ ID NO: 222482 - DNA, 1000 bp, Homo Sapiens; identical to SEQ ID NO: 117231

SEQ ID NO: 222483 - DNA, 1000 bp, Homo Sapiens
aggttgtgaggaccaagcacgcctcttcaaagacgaggcaagaatagtcagagtgacccatgtatctgggaagactctagtctggactgtggcccagcttggggaccttgtgtgctcagatcatcttcaggaaggaaaaggcatcctggagacaggagtccattcactcctctgctctctacccactcatttgcttgccaaacttagctttgccagtgatagtcaatattaaagtgtacttttttcccctttaatccaatatagttgataattaaagtgtattttgaatgacacagatattgtgatttactgcaaggatcctaacacacacttaaaatcaagagccaaggagtagtgagttgtagataaaaaaagaatgtcagctttggagacagtctgggtttaaatcccagttctgtcaatttgagctgtttactgtctctgagcctacatcttcttgtctgtaaaatggagataaaatgggtttaatgaggtctaccttgcagagccattgtgagcattggaaatgatgaatgaatcataccagaacgtctagtataattacagtcatgcattgcttaacgatggggatacattcttagaaatgtgtcactaggcaattctgtcattgtgtaaacattataggatgtacttacacaaacctagatgttatatgtatttttatttacatgtatattttcacatgaaataccaaatgtcacagcattattactgaatgtcagtcatttcccctacttgatctgcaatgccaatatcaagggccatgtatcaggtttctgtatatgttccactataatcttatgggaccatggttttaaatgtggaatcattgacagaaatgtctttatgtagcatatggctgtgtatcactagtatataatagagcaatattatggaggaatatgtagatccaatcactttacctatacaaaatgactgctatggtgggaacacaataaacaccagttttgacttttaa

SEQ ID NO: 222484 - DNA, 1000 bp, Homo Sapiens
caggaaaggggaggggtagcgggggaggggggcttcagaagggggggaacaccccagatctcagggaaccccgccccctgcctttccctctcccctagaaaagggggggccgtctcacccccgagcccccttggagacaccccccctcccaaaagccatgtccatccagcccttccccccaaacctagcacaaaacggggttcacaagccatggtcggggtccgggggggacagaaatggattttcttggcaataagcggactctgggactccggctccctaccccaaactgaagcgcttccgtgaacacccccgtcctccgtagggggaggggagcaggcgggatcctgggtccctcataagcactttggttttaccgcctgcaacctcactgtgcccgccccgcaccatgccctagccccaggtctagccgggcccattgcagggggcagcacttgggggcatctccggcacttgggtgggaccaaggagatgccaccatagacctttccctcgccttcttcctccctagtccgggttccattcttttcaccagcacccatcgcccaaggggtaccgaggggggcaaggggtgtccagtccaagcccacccccgcctcgccttccgcaaaactgtgagcaaaaagcaatagaagcctcgcccccgcccttccccttcgcaggattcgccgagtctgtagcctccccgatccaagttcctagacctcatggctgtcccctcccaccagtcacctccactgcacaactcgggcgggggtgtgacacctctcccccacccccgactccgtggtttccgtatcgtcaacccttcagccgccgacccgggaggggtctggcctacactggtcttccccttcccatcaactctttctgcttgacaatgtagcaacccaggccccccacccacggtcctcccctttttcctctccctgacaataaagtctgaatttgttctgccctccaaaaaaaaaaaaaaaaa

SEQ ID NO: 222485 - DNA, 1000 bp, Homo Sapiens
tgagccgctcagagacagatgggaccgtgttcagaattcacacaaaagctgaaggatttatggatgcggatatacctctggaattggtgttccatttgccagtcaattatccttcatgtctacctggtatctcgattaactctgaacagttgaccagggcccagtgtgtgactgtgaaagagaagttacttgagcaagcagagagccttttgtcggagcctatggttcatgagctggttctctggattcagcagaatctcaggcatatcctcagccaaccagaaactggcagtggcagtgaaaagtgtactttttcaacaagcacgaccatggatgatggattgtggataactcttttgcatttagatcacatgagagcaaagactaaatatgtcaaaattgtggagaagtgggcttcagatttaaggctgacaggaagactgatgttcatgggtaaaataatactgattttactacagggagacagaaacaacctcaaggtgccaaaaagttaaatgtttctggcatttgaagtcaaagagtattcagcgttggatgaattacaaaaggaatttgaaactgcaggacttaagaagcttttctccgaatttgtacttgctctggtaaaatgaaatggaagacaggaatcttttagtaaaatagcagtgttttttgttgtttttgcattggatttggggagtggttaattgaaatagtcaattttaaagtttctctgaagcaaaatgataggcatcattctaacttcaggaacaaaagccagttctgttttatgaaatattaaacatgaagaaaacttgtatattctaatgtttgccaggaaaggctaggttcagtagatgagacattatttaaaagataaatttaaaaagatggtaaatgaacacttgtttttatagacaatatttgtttgaaactatgtaattttctggctaattttcttgtaattaaatgattttttaaaaaaaaaaaaaaaaaaaaa

SEQ ID NO: 222486 - DNA, 1000 bp, Homo Sapiens
acccgcttctgtggaccatgtgctgcaggagcatcgtgtggagctgcggcccaccacgctgtcggaggagcgggcactgcgggagctcgccctgccaggctgcacctcacgcatgctgaagttactggcgctgcgccagctgccggacatttaccccgaccttctcggcctgcagtggcgcgactgtgtacgccgccagctgggtgactttgacactgaggctggagctgtgtcctcctcagagcccactgtggccagagatgagccagagagcctagccctggctcagaagtcaccggcccccaaggtcaggaagccaggcaggaagccaccaacccctggcccggagaaagcagaggcagctgctggggaagagtcctgtggtgcctcccctacccctgctaccagtgccagcccacctggccccacactgaaggcccgcttccgcagtctgctggagaccgcctggctcaatggcctggctctgcccacctggggccacaagtcctcaagaccagaccagccctcaccctgcccacagctgctggacagccagagccatcacctgtagcactggttgccagtgctgtgtgtatagcagtcactctccacccttcccttctgcctgcccagctgccccggggccacgagtggatgctggggctgtggctgctcccctggaggggttccatctctgaccctgtggcccattcagggtgggctgaagagcccctgagcttttaacgtgagggtctttattggataggactactccctatttcttgcctagagaacacacatgggctttggagcccgacagacctgggcttgaatcccggctcgtgttcttgctgcaggacctgggcaagaaacttcacctctgctgagccctcattccccatgtgtaaaatgggacaacgcaacctacctcacagggttgttgtggggatgctgcctgatacataccctgtccccaaaaaaaaaaaaaaaaaaaaaaaaa

SEQ ID NO: 222487 - DNA, 1000 bp, Homo Sapiens
ctaacttccaaactggaacataaagatttaaatatctcggttgactgcagcttcaatcatgggatctgtgactggaaacaggatagagaagatgattttgactggaatcctgctgatcgagataatgctattggcttctatatggcagttccggccttggcaggtcacaagaaagacattggccgattgaaacttctcctacctgacctgcaaccccaaagcaacttctgtttgctctttgattaccggctggccggagacaaagtcgggaaacttcgagtgtttgtgaaaaacagtaacaatgccctggcatgggagaagaccacgagtgaggatgaaaagtggaagacagggaaaattcagttgtatcaaggaactgatgctaccaaaagcatcatttttgaagcagaacgtggcaagggcaaaaccggcgaaatcgcagtggatggcgtcttgcttgtttcaggcttatgtccagatagccttttatctgtggatgactgaatgttactatctttatatttgactttgtatgtcagttccctggtttttttgatattgcatcataggacctctggcattttagaattactagctgaaaaattgtaatgtaccaacagaaatattattgtaagatgcctttcttgtataagatatgccaatatttgctttaaatatcatatcactgtatcttctcagtcatttctgaatctttccacattatattataaaatatggaaatgtcagtttatctcccctcctcagtatatctgatttgtataagtaagttgatgagcttctctctacaacatttctagaaaatagaaaaaaaagcacagagaaatgtttaactgtttgactcttatgatacttcttggaaactatgacatcaaagatagacttttgcctaagtggcttagctgggtctttcatagccaaacttgtatatttaaattctttgtaataataatatccaaatcatcaaaaaaaaaaaaaaaaa

SEQ ID NO: 222488 - DNA, 1000 bp, Homo Sapiens; identical to SEQ ID NO: 117239

SEQ ID NO: 222489 - DNA, 1000 bp, Homo Sapiens
ccttggtgctaacctggctgaatttcacacaggctcttacacacacacgctcctaggagacatctgcctacacggcaaccatatttcctctgaatgagaaggaattgaaccaaaagtccaagaaagaactgattgcttgttccataggagcttaggaaacaagaaaccctggattgcccagggggtctgagaagttggttggtgactttttttgcggttaaatgaagggtgatggggagatcagcccgaattgccgcctgcctcttgctaaataggagcagaggacttggcctgcagctccttgggagcccttgattgggaagagagtttcaagggaggcagctggattcaatctagcaggtggtcagcttcagctttctccatcgaaatcccattctcctgtccagaggcccagtgggtcatctcccaaggtgggtgtggaccctggcctcagaggccttgctggtgctgtcacctcccacctgttccattccgaggcctcacccagaagtgggaccctccccttcctcaccagagccaccgtgactgtttctgatgacctggagagtcaacaacaaccagaaaggtttctgcccagagcaggcttcttaaggcctttacgaagttttgtgccttccaagtgctgaagaagacctggtcagcctaaatcttcccagtcccgctgtggagctgtcagtcaccggagtaatgagctcctggttcctcgggagtccttcgtgctgtgtggcagggttcctctctagacaagtacacaggccctgccaccctgacatcaaactgttgtactatgatcacagtccctgtgccatccttttccaagactggggctcacaccatgtttttgaatgagaatccctgctggttgagacttttgcttccacttgtttccttggagatgtttttccaagagcataatgtacattaaagtcttcgagttgagaccaaaaaaaaaaaaaaaaaaaaaaaaaaaaaaaaaaaa

SEQ ID NO: 222490 - DNA, 1000 bp, Homo Sapiens; identical to SEQ ID NO: 117240

SEQ ID NO: 222491 - DNA, 1000 bp, Homo Sapiens; identical to SEQ ID NO: 220928

SEQ ID NO: 222492 - DNA, 1000 bp, Homo Sapiens
agaaggagcgagagaagcaggagaaggagcggcagaagcaggagaagaaggctcaaggccggaagctttcgctgcgtcgaaaggcagatgggcccccaggcccccatgatggtggggacaggccctcagccgaggcccggcaggacgcttacttctgacctctgccctggggctggactgcatggcccccctctttccctcagccaagaacaggcctggcccaaggtgccaccccctagcaccttgtcaggctgtcccttgctggggaaagtggcttggttccccatctcctcgccagctgctgatccctacacgggcaggacagatgggcagctgcaaatgagtctggagcctctcatctcccatgaggctcagctggggtctctgtcgctcctgccccagttccctctgggtcccctcctaggtgctgtcctgaatggcccgttgtcatcccaggggtgactcctggtgatgggagtcagcagtttcagattcttacactccatagctccccttaccatgaggtggagctggcttccttttccctgtcttcagccctccctgtctcccccacttcctggccagggctctcattctggacctgtgttgtaattgtgtacagaggatggcgttggcctggggtgggggtgctcgctttgtcttctgtcctttggttctccttccataatgctcctgtacccagtttatttaaggggacatgcactggaataggaaatgtcccccatctcccttcctgcaccctgctgtgctccctccaaacccaccttgctctgtgttctcaggcccccctgcttttgtctcaccaggacccatacctttcaccttgttcccttccacccctccagttagtccctatctgggtaagggtcttcccttgagctccagggggtggaacccaatgtttacattctcttctgtctctgcccccaccccatgcagcgctttgaggaattggaaaagaacctgctgttgtacctgg

SEQ ID NO: 222493 - DNA, 1000 bp, Homo Sapiens; identical to SEQ ID NO: 117243

SEQ ID NO: 222494 - DNA, 1000 bp, Homo Sapiens
ttgtggctctagatcactgttcagcagctgaacattcctggtgagcaaaggtttccctggtgaatttttcaccactgcgttttaggtggtgatcttaaatgggtgagatggaacgagagcacacattaaagagagagtaaattccaaaggtttcaaagaacttggtcataaatatgataatgagaagacaaagtatttatattaaaacagtttagtagccttcagttttgtgaaaatagttttcagcacagaaactgacttctttagacaaagttttaaccaatgatggtgtttgcttctaggatatacactttaaaagaactcactgtcccagtggtggtcattgatggcctttagtaaattggagctgcttaatcatattgatatctaatttcttttaaccacaatgaattgtccttaattaccaacagtgaagcactacaggaggcaactgtggcattgcttccttaaccagctcatggtgtgtgaatgttataaaattgtcactcagatatattttttaaatgtaatgttatataagatgatcatgtgatgtgtacaaactatggtgaaaagtgccagtggtagtaactgtgtaaagtttctaattcacaacattaattcctttaaaatacacagccttctgcctctgtatttggagttgtcagtacaactcatcaaagaaaactgcctaatataaaaatcatatatatggtaataatttccctcttttgtagtctgcacaagatccataaaagattgtatttttattactatttaaacaagtgattaaatttagtctgcacagtgagcaagggttcacatgcattcttttatactgctggattttgttgtgcatcatttaaaacattttgtatgtttcttcttatctgtgtatacagtatgttcttgaatgatgttcatttgtcaggagaactgtgagaaataaactatgtggatactgtctgtttatattaaaagaaaaaaaaaaaaaaaaaaa

SEQ ID NO: 222495 - DNA, 1000 bp, Homo Sapiens; identical to SEQ ID NO: 117245

SEQ ID NO: 222496 - DNA, 1000 bp, Homo Sapiens
tgccaaacctcaacctggactgccgactccctggcctgacgtctttccctgacctctatgccaacttcctggatcattttgaggctgtctcttttggggaccacctctttggggccctggtcctcctgcccctgcagcgtcggttcagtgtcaccttgcgccttgccctctttggggaacacgtgggagccttgcgagctctgagcctgcctctgacccagttgcctgtgtccctggagtgttacacagtgcctcctgaagacaacctggccctccttcagctctacttccggaccctggttactggtgcgctccgcccacgttggtgccccgtgctctatgctgtggctgtggctcatgtcaatagcttcatcttctctcaggacccacagagctcagatgaggtcaaagctgcccgcaggagtatgctgcagaaaacatggctgctggcagatgagggtctccggcagcacctcctgcactataagcttcccaattccacgctcccagagggctttgagctctattctcagttgccccctctgcgtcagcactacctccagagactgacttcaacagtgctccaaaatggggtatcagagacctaggatagttgatatagatggaaagatgggtacgttgtcctgtatccagcctttcaacagatgtctggccagacgaagaacattgtgtcctaatggtaggcaggagaccaaggagcagaaggcttgccttcctgggagcaggttgtttgagctgttttagagcagtgagccctaccattacatcctgatatctggggcttctgaaggtctgtgctgggagtgaagagtggcttagctatttacccgctctttggggacagggcaaactaaatgcatcccttcttacctaactcccaacccctgccctgggctgaggcatatgaatgctatagttgtgcattaaaataaatgttttttatctcctggaaaaaaaaaaaaaaaaaaaaaaaaaaaaa

SEQ ID NO: 222497 - DNA, 1000 bp, Homo Sapiens; identical to SEQ ID NO: 117246

SEQ ID NO: 222498 - DNA, 1000 bp, Homo Sapiens
ccggggaggcggagaggctgcccaatcccctgggcctctgccccagagcaagccggatggaggcgagaccctgtatgtcactgcagacctcaccctggaggacaaccggcgggtgattgtcatggagaagggaccccttcccagccccactgcagggctggaggagagcagtggccagggaccaagctcaccggtggccctgctggggcaggttcaggacttccagcagtctgcagagtgccagccgaaggaagagggttccagggacccggcagacccgagccagcagggcagagtgagaaaccttagagagaagttccaggccttgaactctgtcggttgatgctgactcctgggggagggaggagtcatgttggaggttggggaagaacctgggcatccttcccctcaagcctgggctcatggagcccctgcccagggccctcaggtgggcggaaagtccatcccctccgcccttcaggaaggatgctcccgtgtgcaggggtctcctgcctgtgccatccactggggctcgagacaatttcccactcacctgtgaggccggtgtggctgcttcccttgtaaatagttgttctctggtaagaagccaaatatttaagctcacttcttcccagagagaggaagctctgctcaggcctccagcgttggctggccatggccacagccagatggaggagcccatccccaggagactcaggcagtggcctggagaggctttgttctgtaacggtgccttttcttagggtccaggcaggaatgaagccaataatttattgctttccattctgtggtatgatgtgcgtgtgcgtgagtgtgtggcccctgtttattcccctcctgtcaagaatgaagtggattcagttcaggtacttttgagggttgttgtgctgaccctgtggttgtcgctgatgtacacacatttcattatttgccaatggtgcaataaccactgctgaccaacaaaaaaaaaaaaaaaaaa

SEQ ID NO: 222499 - DNA, 1000 bp, Homo Sapiens; identical to SEQ ID NO: 117248

SEQ ID NO: 222500 - DNA, 1000 bp, Homo Sapiens
tccttaactctttaaatttttatttcatgtgaagtgttttcagtttagttattcactgaattgtcagtttccttcatttggtattacatatttaattcttaaatattgaggccccattgtgagtaataaaaaatacgacataagtagaagactaagaagggcttgtcatattatctttgtgtatatgcttcatgttatttaaccagaaatgtcttatctctaaaaatttttagtagtaattatttaccaaacttaaaaacatttctataaatataaagcttttctttatatttaagacaaaatataaaggctagaatttggttccttctctgtaacactaaatattttagtgtgaaattgaatttttttattactatagtcttttcaatctataatttgtgtttttaatttcttgatatgtcacttctgttcctccctgcttgcattttttaaaaactagacattgtggcttgagaatttatcaatcatctttccgaaatgaccacattgtgcttttagtttgtatgtttaagtggtcaagcaaggctctaggaggtagtcactgagctggaccttaaacacatctgcaggagctcacaaaatgggagcaaaagaggcattccagaaagaagagtagttaagcagatgtgggggcagggcaagaggagacagcaccttgttgccagagattctacacaaaggtgtgatggacactgatgctctattaagaagcttttgtggtgtgtgtggtagagaataattaaggcttctgataagacaggaaagggatatttcatcatgactgttaagaaaaggtaactgggttgtttaatgttttaattgataattgtcactgatcgtatttctacttgttaaataattaaaaatcatcttaaaattcatactttgactttaatttagacacaaggagatgtaatcgctgtgtaacatcagagaaagctatatggattatcgtcagaagtaaatgtttctaacattg

SEQ ID NO: 222501 - DNA, 1000 bp, Homo Sapiens
acacttaccccaaaacttcaatctgaaatgtcttacattaagaatatcttgaatgttgtgtatatattttaaaaagcactttgcaaaatagtttgtacatttatttcctaatttatacatgatttttggtgttaatatatttaatgattaataacagaatgtttatttaatgtgctgtccatttttatgtaatattatggggaaagtgatgccagcagttccttttcattattctatcttctgtcatatgaatgttgagcaaagcttaggccaacatgaattgtttgtgaagtgtggttgatggtgctttgtttttttctgactacttctatggaaggccagtgaagaagcaaaggaagacatgaaaattgacgctcattcttcttcctattgttccctgacatccagcaaattgtgaatttgaaaaatgatggccagttttcagaagtgctgacaaattcatattggtatgcaaaagctcatcacccattaaggtttgttgttgaatcaacagtactcagcatattaaaacagtacatcagaactcatgccaacagtctttatgatgggattaaggtggacaagatctcctaagatctgtgaatgggattaaggtggacaagatctcctaagatctgaaaagaaaccttaatacgctcatatggttggagtgttaagtgaacctctgattttgtcagggtttttctacgtgtaggcgtgaatagggggcaccccttcaaaactgtacaaagaagacgactgttttccatttccatttaaacatttttagccacttcatttctatttattgaacaggtcaaatttgtcttgttatttgtgagtacagtacatttaaaaaacatccttatcggttatttttttttcagtcggagtttgacgtataaattgtttatgcttttggtgtaatctcttaataaactggttcttcaaaaatcatcctataaagtgagttttcatgaagaaaaaaaaaaaaaaaaaa

SEQ ID NO: 222502 - DNA, 1000 bp, Homo Sapiens
ccagaagccgggcaggcagaatccggccagacgacggggctgagccatcaggagctcttgggaaagcaaagcagggagacaccttcagaagaagcttgtctgagcttcaccgcagctcccaccacgcggcgcttcagtacggctggatcctccgcaggcgagcggaaggcccccaggaggagcaggctggtggcactctcctgacctcacgctgccaaggtgcgccctcgactcccgatttcatttgctggccaggaaaatcgaaagggaaacaccctcaattaggaaacattccaaggggagaaaagctgcaaattgctcaactggcattgctgtaacccgttccatttaattggtttttatttcttttgattttcaagctctgctaagctttggggtaccaacgtcatcttcaggtgacctgaatctttcccttaaccgtacagtttctcgatggaattgtgtgatcagaaggtggaattctagtgataggcgacctcagacccgcattcatgttctgtgtgcctcttctattgcacatacactgatttttagcattgtctattcctatttttcctttgcccattgtacttccatatatcttttcattaacttacttgctgccttttttttttcttggtacacatttaaataaagtaatccttaacctgtgctgtaaagttcacccttggcatgctgttccaagaacctgggtttgaatcccaatcgttgtgaaacatactcagtattgataaaacctttttaataagtgatgcagagcagccaaggatatgttgacccagatgtcaaccaggctatttttatacttaaaacatgtcagcagagcataggcagaataaaatggtttaaataccccacagcaaatagagtaactgacaaaccaccaaaaactgaaaccccagacccaccagaaagacaagtgtctagcaatgccttggtacctgatctttttcattcaaataattgtcataggttgttc

SEQ ID NO: 222503 - DNA, 1000 bp, Homo Sapiens
tgacagtagtaccaaaaaggtattttcctttctcatttaaaagcaaaaacctccctttttaattgcctgtagaaggcaagattttctttcatttttgtccatttgtgtttcagaatcagcacaggtttgaagattagactgttagtcatctgtgctttctttaccaactggctagaacggaacagcatcacagcaacgctgcggatcttggttacacagtgtcagagcttttgttttttgatggggttttatcctcttcaccaccactacccactccattttttttctatttttaagattagaggaaaatgaccattaagaaccagaaaaataattaatctctctggaaaaaggaaagctaaagaagactatgataccatacccatctagaaaccaagaactagtttgaaatcgtttatattcatttctgtagcatgacagggatttcaatcacctttctgaaaagagtgggctgataaacttgtaaatccacacacaactctgagaatacccactgccagcatcaaaaagcaaagatactaattttttaagccaaaaatctgtactaacacatgtaatttcttaatgtgcctaagttaatttctgtatcaattcaataaatggaattgactgaacttcccaacgccactaattattaaaatccatctgcttattctaatgctagtcaccaagagctagactccatctttccaataaaaatgagccctatgtagcactaggtttgaattctaaaattcaaaacaggcatttcattttcttaaggcacacttcctacacacagctatcaggggaaaaagctataaatgtcctgttctttttctgaagtgtggatatcaatataaaatttgttaaagaatatttttaacagctgacttacatgatcgttttcctaatacaggaatacagcgacagacctatctgaaaagtctgtttgggggcatacttttcatatcttattgactaaagcccttgagccagg

SEQ ID NO: 222504 - DNA, 1000 bp, Homo Sapiens
ataggtctctaactgttgaactcatgaaagaagatagtgtatgagacttaagccatgagttttgtatcatttcaattagaagactactagctgtgagctcagagtttaatgtaaatgaatctagatgattttgaagaaatgattattcgttcaccagatcactcattgtacattctaaaaagctcaaatgagtcttctagatactcttactcatcctgtctggttgctatgtttaaaattatgtggtgctgtgtaggtgaaactttaagaatatttttgaagcatatgtaatatatgcactgctatttgtgtgtgtgtgtgtgtgtctttgtatatatgtaagaatgtgtgtatgtgtgagagcaagagagaggaaactcaaagaggagtgtttgtcttaagacctgttcatactggtatattggtgagacttctcacttctggttggaggtttcacatatggctcaactcaagtcattaatctctttttaatttttactcttgaattccttaaacttcgctcattatgaaatgttttaaaattatgacaaaaattactctgtctaaccacttgccttgtctgctaccagtttgttaaaaattattccccccaaccagtaattccaccagtactacttgatttgtgttatatttcctatgtacatgtacagcctttgttttgcttgcttgtctatttttactttcccttttttgggtcaaatttttcttttgctttgtttgaagaaggaatatacagaagtaaaatcttgtcttctctgctgattctttaattaatatgagccggatactttccactgtcttcttggcactttcaggatttcttaatgctgatatatggactcttagaatggaatttttgaagaaaaatctcaaagcctgtatcgttcttgaaggtcacatgtacctattgtgaaaatgtgaagctgtatttctgaagctgaaataaattataacatttgaaggaaaaaaaaaaaaaaaa

SEQ ID NO: 222505 - DNA, 1000 bp, Homo Sapiens
atccgaaacataattctgaagctacaggaagatcagagcaaagagaaaagaaagcataaggacacttactcaacagaagcacctttaggcgaaggaacagaacaatgtgtcaatagtatctcagattgaccatttctgttacttgtcatttctactttcagaaactaaatgactttcaaatttgggtatagacaataaagaactgaagtgctcactactcagtgatttggaaattttgatgcttgtataaatgtcagataattaatttccaaaggcgtatgtattaagtaaaagtctgtaaatatgttaatgaggccaatttttccagcatttataattatttttttcacttgttaggaagcttttgttatgtattttctgttaatagtacctaaaattgcaacttctaaacccaaataaaaagaaaatatttataggaggaaatgattaatttgatattctttagtgaacttgtttaattcctcagtgggtgtgacatatttcatgggaatattcaaatatctatggtaatattttgaccctttatatttgttctaaaataagtcaaaatgtgaaaataatattaaatctaagatattttgaactaagcatctttatatgcttgtgtaacaggaacaaagtaacagcctttcaattcatatactgccttgtgttcagtgaacccaagaaatgtaataaatatttgtaattttacacaaatatttaagaggaaagagtattaagagcaattcaaaaaaagtaaccttatactactaaaaaaaaaattcttgcatatattatcatcaaatgcatttttgaagacatcaaagactcaggttaaaactattttggtaagtgcagcttgaatttcaaatatcccgtgttacctttctctattacagcttaaagtatgctacaatctgtgtcatatagttaattgataagcatttttaatctgtgtaaacacaggaatttaaataggaatttactatttttttat

SEQ ID NO: 222506 - DNA, 1000 bp, Homo Sapiens; identical to SEQ ID NO: 117250

SEQ ID NO: 222507 - DNA, 1000 bp, Homo Sapiens
ggccgcagccactggcgccacggccaccccctcggccggggccagcggggggctccagccgcaccagctgagcagctgcgatggggagctggccgtcgcccccctgccagagggggacctccccgggcagttcacacgcgtcatggggaaagtgtgcacacagctcttggtctccagacctgatgaggaaaatataagttcctatttacagctcatagacaagtgtctaattcatgaggcatttacagagacacagaaaaaaagattgttgtcatggaaacagcaggtgcagaagctctttcggtctttccctcggaaaacccttctagacatatcaggatatcgacagcaaagaaatcgaggctttgggcaatccaactccctcccgacggctggctctgtgggcggtggcatgggcagacggaacccgcgccagtaccagatcccctctcggaacgtcccttccgcccgcctgggcctcttgggcaccagtggattcgtcagctccaaccagcgcaacaccacagctacccccaccatcatgaaacaaggaagacagaacctgtggtttgccaaccccgggggcagcaatagcatgccaagccgcacccacagctcagtccagaggacccgctcgctgcccgtgcacacttccccacagaacatgctgatgttccagcagccagaattccagcttcccgtgaccgaacctgacatcaacaacaggctggagtcgttgtgcctcagtatgaccgaacacgccctgggagacggggttgaccggacctccaccatctagaagctgaagatgagagtgaccgcgctggccgtgaaatcgactgctgcgggtccagtgtccgccatcttcagggttgcacagaatcctccaagatactttgcagccttttttccccctggtccctctcccgttttgattttgtgagagcgtaggtcatcctcgtaaacatatcagtagacctggaaaaaaaaaaaaaaaaaa

SEQ ID NO: 222508 - DNA, 1000 bp, Homo Sapiens
tacaaactgcatatgcaaatggaagttcaacacggtatcttgaagaagttatgaaggtacctgtctattgcactaagactggtgtaaaacatttgcaccacaaggctcaagagtttgacattggagtttattttgaagcaaatgggcatggcactgcactgtttagtacagctgttgaaatgaagataaaacaatcagcagaacaactggaagataagaaaagaaaagctgctaagatgcttgaaaacattattgacttgtttaaccaggcagctggtgatgctatttctgacatgctggtgattgaagcaatcttggctctgaagggcttgactgtacaacagtgggatgctctctatacagatcttccaaacagacaacttaaagttcaggttgcagacaggagagttattagcactaccgatgctgaaagacaagcagttacacccccaggattacaggaggcaatcaatgacctggtgaagaagtacaagctttctcgagcttttgtccggccctctggtacagaagatgtcgtccgagtatatgcagaagcagactcacaagaaagtgcagatcaccttgcacatgaagtgagcttggcagtatttcagctggctggaggaattggagaaaggccccaaccaggtttctgaagataattttcatattcctgagaaactggactttttacaagtctttacaaaactgtcaataataatggcagtactaagagatttataatcataatgtttacaatgcagcctactggattgtctctagatctgtttttcttaaacactaacagaataattctttataaataggtaagccttacacttgttaaagaaatttacctctaatttcagtctcactaatgtaaaatactgggacttaagtatacaattcagtcactaactgtacagttttatgtggggaacaattcatgcaggctactggaaaattaaatcttattaccaaaaaaaaaaaaaaaaaaaaa

SEQ ID NO: 222509 - DNA, 1000 bp, Homo Sapiens
atgccgagaagaccgatgggatgttcaaggatggcccagtccctgcccatgaaccatcccaccgctatgatgaccaggcctgggcccggcccccgaagccccctacttttggggagttcctgtcccagcacaaagctgaggccagcagccgcagaaggagaaagagcagtcggccccaggccaaggcagcgcccagggcctacagtgaccatgatgaccgctgggagacaaaagaaggggcagcatccccagcccctgagactccacagcctacttcccccgagacttcccccaaggagacacccatgcagccacccgagatcccagctcctgcccaccggcctcctgaagacgagggggaagagaatgagggggaagaggatgaagaatgggaggacataagtgaggatgaggaagaggaggagatcgaggtggaagaaggtgatgaggaggaaccagcccaagaccaccaagccccagaggctgcccccaccgggatcccctgcagtgagcaggcccacggagtccccttcagtccggaggagcccctgctggagccccaggcccctggcacgccttccagccctttctcaccacccagcggccaccagcctgtgtccgattggggtgaagaggtggagctgaattctccccggaccactcacctggctggcgccctctccccgggtgaggcctggccttttgagagtgtatgaagctggctgcctgtgtgtgtgtgtgtgtgtgtgtgtgtgtgtgtgtgtgtgcgcgcgcgcgcgcgcgcgcgcgcgctagaggggtgtggctggtgggggacccttggggctgggccctgggacccagtgtgccccacagccctgtcagctgagggggtagcgcagcccatgctcttctgtactgtcatgcccgtctctggaatgtccactcccagagcctgccccagcccttcgagccccctccccaataaagaattcacatcctccaaaaaaaaaaaaaaaaa

SEQ ID NO: 222510 - DNA, 1000 bp, Homo Sapiens
tagaccaagacctgttggtctgggaagcatttcatggatagggagagctcctctcggtgaacagtccaaaactaaaatagatgtttatatagaaagcccaagaggagacttttgccatgcctgagttctttcctatcccaccctaacacttaacatattacttagtctgctttgttaaaagcaagtattacctttaacttgcctcttactctttgccctttagctaactaataaagtttgatataggcattattatataattctgagtcattcatggtatctctcatgtttgatgtatttttcaaactaagatctatgatagttttttttccagagttccattaaatcatttatttcctttactttctcacctctgttgaaacatttagaaactggatttgggaacccaattttggaaaaccagattcatagtcatgaaaatggaaacttccatattctgtttttgaaaagatgtggccattattacagtaattttattataggactttgcctcgtacaattaatagtgatattttggacaaggagttctggtgacaagctatacctaattataagctataaaacaatagatatgagtgtttgtacagtttaactcaatggagatcagaatattctatgtattgagaaaatgtttaatatcaatctataaatcttgaatttctaagaggcttattttgttcttttggctgaatgagtatatttgaattggttgaataattaataattctcattgtaaaaataattatatgccaaaaatatatttgatgttaaatcaaatagatgattctgtttacattgttcatatgaataataatctgtgttaatttcattttgataattggcctttaatatttgtatctctaattttattttctctctgttactgtaaaataatagctataatgtataacaattttcttcagaagaattctatgctattattaaaataaaatatttactgtgaaaaaaaaaaaaaaaa

SEQ ID NO: 222511 - DNA, 1000 bp, Homo Sapiens; identical to SEQ ID NO: 220824

SEQ ID NO: 222512 - DNA, 1000 bp, Homo Sapiens; identical to SEQ ID NO: 117257

SEQ ID NO: 222513 - DNA, 1000 bp, Homo Sapiens; identical to SEQ ID NO: 117258

SEQ ID NO: 222514 - DNA, 1000 bp, Homo Sapiens
ggccgaagccctgggccactcacccaaggaccctggcggaggcggggggcctgtgcgtgcagggggcgccagccctgcagcctcctccacggcccagccgccaacccagcatcgccttgtggcccgcaacggcgaagcagaagtcagtcccacagcgggggccgaagctgtcagcgggggtggcagcggcactggggcgacccctggggcccccctgtgctgtaccctgtgcagggagcggctggaagacacccacttcgtccagtgcccctcggtgcccggacacaagttctgctttccctgctcccgggagttcatcaaggcgcagggcccggccggggaggtgtactgcccgagcggagacaagtgcccgctggtcggctcctccgtgccctgggccttcatgcagggcgagatcgccaccatccttgctggagacatcaaagttaagaaagaacgggacccctaggctaccactgcctccaggctactgccctctgcccctttgccacccaccgctgccgcggataaattattccctccccgacccagcccagtgccacctctatctgtgtacatactcccttcttccacccagatgggtcccctggggtagatgcattgtgggtggggggagaaagcttgtggctcctgtccgagggggtgtttggggtcccttggcccctccagtttccctctgtcctccttggcttggctttgctgctgcttgtagttgggggagaggtgcccccctcctccttgagaagggacctcctgaaaactcgctctttataaacgaggcaaaagcatttaattcccacccccccaccccccgctcccttctgctccttcaataaaccgaaagatgggttttttttttcaaaaaaaaaaaaaaaaaaaaaaaaaaaaaaaaaaaaaaaaaaaaaaaaaaaaaaaaaaaaaaaaaaaaaaaaaaaaaaaaaaaaaaaaaaaaaaaaaaaaaaaaaaaaaaaaaaaaaaa

SEQ ID NO: 222515 - DNA, 1000 bp, Homo Sapiens
ctttcatccaacatcagaagaattcctcggcctgggagtgcaagaccagcccctccccgggtcaaacggcaagacagcatggaggcgctacaaatggataggtcagggagtggtaaaaccgtttcaaatgtgattacagagtcacacaattctgacaatgaagaggatgatcaatttgtggtggaagctgcccctcagctctctgaaatgtcagaaattgaaatggtaacagcagtggaactagaagaagaggagaagcatggtggacttgtgaaaaaaattttggagacgaagaaagattatgagaaattgcagcagtcacccaaacctggggagaaggagcgatctctctttgagtcggcatggaagaaggagaaggacatcgtttccaaggagatagagaagctccgcacgtccatccagaccctgtgcaagagcgcacttcccctggggaagatcatggactacatccaggaagacgtggatgccatgcagaatgagctgcagatgtggcacagcgagaacaggcagcacgccgaggccctgcagcaggagcagaggatcacagactgtgccgtggagcccttaaaggctgagctcgcggagctggagcagctgatcaaagaccagcaagacaagatctgtgctgtgaaggccaacatcctcaagaatgaagaaaaaatccagaaaatggtatatagtatcaatttgacttcgagaaggtgaacactcaaaagtttcagagatgaaaagtcacctcagtttaaaagcaaaaaggaagatagaaaatcattactcttttaagttccagtttgctaagaaaatgaacagtttacaatgttattatccagctaattttcagagctttaaaactgtaagcatgttaagtgtattaaaaaaaccatgttttcttacctccttccagatggaatactggctagttataaatagcgcttccaaacaaaaaaaaaaaaaaaaaaaaaaaaaaaaaaaaaaaaaa

SEQ ID NO: 222516 - DNA, 1000 bp, Homo Sapiens
agagaatttttggaaccaacattcaaattctgcctcatctggagggaaaccaaaattgggagggggaagaggacccctgatgttttgctgcttccagagatattagaaactgactcacttgattggaaaatggacaaaagtgccttgacgtggagggtgggcaccagatggggaccagccttgccaactgctgctgtggcctccagcttggctggttttgcaggccgccagcaggaaggcgaaggtggtagtacagcaagaggcactggcggggcagcaggcctgcaggagctgtttttccattgctaggcctgacccctctctacctgtgagcgttcagggggtccctgagatagtttagatgcccccccatcttagacctcagctcccacagtgccttttaagggggacctcacctcctgtgcacagcccacccactttcctctgcttccctggcacagcccaggcatagacgagctggcgttggacccagttcttcccccttttcagccccacagctgctgccacaggggccaactagggccaggtggaaggggagctgagaagccaacccctagcccaggggtgctgtgggaactgggatccaatttgtagcttcctgcctggcttcagagagcccagcaaccttctaggcctgctttccagacttctgagatagcctgggatgagcaatcctgttatagtacatctggaccttccctacctgggctctggggaggctgtgggcctggagagggaaaaggagggagggggtgtctgcaccacctgggaagatagcacaaggcctaatgaggtcaccctgactccccaccccagcatttcattcataccagataatagctgcattactgccaactgaccttataaccctctgcaccttcaaaaagattcatggtttttaattgctgcttttaataacatttgttaaagttataattaatgtgtctgatttatgatttaaaacctccctttgaacaat

SEQ ID NO: 222517 - DNA, 1000 bp, Homo Sapiens
cgctgggaagagctgccctccctccaggaaagaaaaagagaatacaaacaaaaggccttcccagtctattgcctcggaaacactgacgaaacctgcaaaacagaagggggccggtgaatcctcttcaaggcctcagaaagccacgaataggaagcagagtagtggaaagactcgggccagaccctcaacgaaaaccccagagagcagtgcagctcagagaaagcgaaagctgaaggcaaagctggactgttcgcacagcaaacggaggcggctggatgcaaagtgattggaaagatggtagccaagagtaaaactgttctatagaagtaaccttttattttgcattaactaaatctgcttttataagcttatcaagcctttcaaatttacagttaatggagaacaccgtaatttgagatgtcagaaaatgcatctcagatggagaagggaacttgcagagtccttctctgaggctaagggaagttatatattatattctggttgttccttgggttttaaacttggaaccaagcagttttcgtttttaaaagtacagtgccttatttatcctttttgtttttaaatttacaaaagctaaaaagctgatctatgtgattaaaggcttgtattttatacttgatgcacaagcacttgtactgtagccgagaagaccaccatcatgcacataaaaggagcttttcagcagccaccctgcagcatctgcccacgaacagatgcccttctttgcaaaccccagcagtgaacttccctctctgtcttgtttgtttgtttagatgatgtttgaaagctaaaccaaatcattttatggtatgcagaggatttataattataaaagattactatttctgttacccccttttaaaaaagatcatgttcattgttggtccctcctctcacctttgatgttttgtcatttgagagcatgtattctaaattatgtgcccatgggacaagagataaaaaaaaaaaaaaaaaaaaa

SEQ ID NO: 222518 - DNA, 1000 bp, Homo Sapiens; identical to SEQ ID NO: 117260

SEQ ID NO: 222519 - DNA, 1000 bp, Homo Sapiens
aatgccaagagtgtggacgaaagtttagcaataagtcatactacagtaagcacttaaagagacacttacgtgagaagcgtttttgtacagggagtgtgggtgaggcttcatcttgaagttatatctcaccatccatcagaggacacactcaggagagtaactttgctttgttacaagctttagttgaggctgcataacttgttcgtgaagatataacagaggcagacagaatccagagggctacagagaacctgaattcaacccatgtgtccccaagagattcagagaaaagaggtcaatgtttagggaacagagatgccagttgaggggagggcattacctgggctattggggaaatgtggtctctttcctactgagcacatattcttgttgtatttgtgccaggctgtgctttctaaggactgctcttagccagtgactgcagagcagggataccaaggcaggcctgttacactctccccaacctccttggactgcaaacaatctaggacacctccaccaaacctcctcttgcactttccctctggcttccctcccagccttccttggtttggatgttttgtcccctccttaatttatgttgaaactctacataaactgtttactgttgaaacagtgtaagtattaggaggtgggacctttgggaagtgattaagtcaagtcacgaagatagagctttgcgaatgggatcaggtgcccttatgaaaaggcttgatagagggagtttgtcctgtggcccttctattttctgctctgtgaggacacaatgctcctcccttccaaaagatgcagcatgaaggcatcatcttggaaacagacatgagccctcaacagacaactgcacctactgatgttttgatgttgaacttcccagcctccagaactctgggaaaataaagtcctctttatacaaaaaaaaaaaaaaaaaaaaaaaaaaaaaaaaaaaaaaaaaaaaaaaaaaaaaaaaaaaaaaaaaaaa

SEQ ID NO: 222520 - DNA, 1000 bp, Homo Sapiens; identical to SEQ ID NO: 117261

SEQ ID NO: 222521 - DNA, 1000 bp, Homo Sapiens
cttgcaccgagctggtgccccgggcggccgagccgggctacctggtgaccaaggtggtggcggtggacggcgactcgggccagaacgcctggctgtcgtaccagctgctcaaggccacggagcccgggctgttcagcatgtgggcgcacaatggcgaggtgcgcaccgccaggctgctgagcgagcgcgacgcggccaagcacaggctggtggtgctggtcaaggacaatggcgagcctccgcgctcggccaccgccacgctgcacgtgctcctggtggacggcttctcccagccctacctgccgctgccggaggcggccccggcccaggcccaggccgactcgctcactgtctacctggtggtggcattggcctcggtgtcgtcgctcttcctcttttcggtgctcctgttcgtggcagtgcggctgtgcaggaggagcagggcggcctcggtcggtcgctgctcggtgcccgagggcccctttccagggcatctggtggacgtgagcggcaccgggaccctatcccagagctaccactacgaggtgtgtttgaccggagactcaggggccggcgagttcaagttcctgaagccgattattcctaaccttttgccccagggcgctggtgaagaaatagggaaaactgctgccttccggaatagctttggattaaattagagatctcgtgatgacgcgttgttttctgccatttatcccaaactttttcagatctagaattcgagagtgtcatggacaaaaatttcaccttgagattgagcttttatttccctttttaatggatttgtctgttgaacttcatgctgtccaagtgttgaaaagtcaattttatttcattgcatttatttacatagtgtcattccaaatccatgcatgctgttgattttcctgagatttttttctcttcttgttggtatttgttgtgataaaccaccttaataaaatcaagtattaattttaaaaaaaaaaaaaaaaaaaaa

SEQ ID NO: 222522 - DNA, 1000 bp, Homo Sapiens; identical to SEQ ID NO: 117268

SEQ ID NO: 222523 - DNA, 1000 bp, Homo Sapiens; identical to SEQ ID NO: 117269

SEQ ID NO: 222524 - DNA, 1000 bp, Homo Sapiens; identical to SEQ ID NO: 117270

SEQ ID NO: 222525 - DNA, 1000 bp, Homo Sapiens
ctactttgatgagatccccagccggtgcctgacgtgcgtgcggttccgtgctctccgggagtgcgtggtgggcaggacgtcggcgctgccagtctccgtgtacgactactacgaacccgccttcgaggccactcgcttctacaacgtcagcacgcacagcccactcgcccgggaactgtgcgccggacccgcgtgcaacgaagtggagcgcgcccctgcccggggcccgggctggttccccggcgagtcgggccctgccgtggcccctgaggagggggcggcgatcgcgcgatgcggctgcgaccacgactgcggcgcccaggggaacccggtgtgcggctccgacggggtggtctacgccagcgcctgccgcctgcgggaggccgcctgccgccaggccgcgcccctggagcccgcgcctcccagctgctgcgccctcgagcagcggctgccggcctcgtcgtcctccacctacggggatgacctggcttctgtggccccggggcctttacagcaggacgtgaagctgaatggagccggccttgaggtggaggactcagaccctgagcctgaaggggaggcggaggacagggtcacagccgggcctcggcctcctgtgagcagcgggaacctggaaagcagcacccagagcgccagcccgttccacagatggggccagactccggcccctcagagacatagtggccgggtggtgggggcccacaggccagggcttctgagccctgtcttcgtctacagcccagcctttcagagtggtggggaggagggtttatggatgtcaaacacctgcaccttgagataatcctacaaccacatgcagttgtgggaccgcagtttggtcctggggaccattcatacccacacacccagcttgtgcctgtggttaacatctcagaaaactctggtaaatgatcactccaggatattgacacgaatacacgttactgatcttactcacatgttaaaaaaaaaaaaaaaa

SEQ ID NO: 222526 - DNA, 1000 bp, Homo Sapiens
agaagatgatggctttagcccccatactacaccggatgcagtacggaagcaaagagaatctcagggctctgatggtttagaagaaagtgggaccttgcttaaggtcactaaaaagaagtctactcttccaaatccatttcatttgggaaacttgaaaaaggaccttccagaaaaagaattagaaatatataacacagtgaaactgacatctggtcctgagaacacacttttccactacgttgccttagaaacagtgcaaggaatctttattactcctacccttgaagaggtggcacagctaagtggctctatccaccctcagctaataaagaatttccatcagtgttgtctttccattcgtgcagttttccaacagacattggtggaagagaaaaagaaaggactaaatagtggagaccattcagattctgcaaagtcagtgtcttctcttaaccctgttaaagaacatggtgtgttgtttgaatgttcacctggaaactggactgatcagaaaaaagcaccaccagttatggcttactgggtagtagggagactttttcttcatccaaaacctcaagaactttatgtctgttttcatgactcagtcacagaaattgccattgaaatagcttttaaattgttctttgggttaaccttgtagctgtgctttcttgatgcgtagaaacacgtgcatggaggatcaaacactgtcagaattgctgaaatcaatacacaaagagataaagtttagcttctttttactattcaatattgaacataatattgttaaatattgagatgaaatgctgttggatttgatacattaaatcttaatgtaatattgtaagacttttgagaatatacttgattaaaatgtgaaagaagggattgttaacttattgctattttggtatataatgttaatttattgactagtttgaaataatgtgaagtgttttttatatcagattaatataggaaatgtttattcttgaaaaat

SEQ ID NO: 222527 - DNA, 1000 bp, Homo Sapiens
ctcaccgagcacctgcagagcgccatcgacagcatcctgaacctgcagcaggcccccggccggacgcccgcgccctcgtacccccacgctgcctcggccggcacccccgcatccccgccgcccctgcacaggcccgaggcctacccaccctccagtcacaacggtggcctcggcgccaggacgttgaccagataacaccgggccgcctccccttccccgtcccctcctcccgaagacgccgggacagtcgggtgtccgccctcagcctcctggggactcgagccggggatcccctgacggtttttcttgcctaagttatttgagtcacaaaggcctccttccctgccgcctgcttcagctgggttgctggggggtgggcgtggatttagggagggggctgtgatgtaaaacgtctcccctgccaaaggaggggcaaagtgctgtgtcagttcctgtttcttcccatttcctggcacactctgcccctctgtccgggggacacgcgcatgtgtttgccagggatggggccaccgggttgatgccaacgctccgggtgcctgtcttgtctgtgtggcttctcagatggtggagggtgctgggagctggcagggtccttccagacagtctcagcctctccccgccgcccccaacaggctgtcaaacaaaaccggagagggggtgggggagccagcctcccagcgtgctgtgcccgcaggcacccgtgtgacatccgcacgtccagctccgtgacctgtgtgtgtgtgtgtgcacaagtgagtgagagatttcgaacgcccacccctcgactttgaaatctgagcaaaacaagaaactggggtcttcctctcccccgaacctctccccagctagtcttccctctgttcttcctgcctccagccgcccgcgccagattttgaaatctcggagacaaaactagtactgtaagataaatttttttgtactgtatttattgtgtataacgatttttttaaaggagaat

SEQ ID NO: 222528 - DNA, 1000 bp, Homo Sapiens
acctaagcctatggaatccacagtcacaaaatcgaagttaacccagaatctgtgataagcagcttggctttttttttaaatcaatgcaagtacaccattatagccagaatctgtatcacagaggtgcaagctgacagcagagctcagtccccacttcctgcaaacaatggcctgcaccctatcccttgtgtgtgtgacattctctcatgggacaatgttggggtttttcagactgacaggactgcaagagggagaaaggaattttgtcaatcaaaattattctgtattgcaacttttctcagagattgcaaaggattttttaggtagagattatttttccttatgaaaaatgatctgttttaaatgagataaaataggagaagttcctggcttaacctgttcttacatattaaagaaaagttacttactgtatttatgaaatactcagcttaggcatttttactttaacccctaaattgattttgtaaatgccacaaatgcatagaattgttaccaacctccaaagggctctttaaaatcatatttttttattcatttgaggatgtcttataaagactgaaggcaaaggtcagaatgcttacgggtgttatttttataagttgttgaattccttaatttagaaaagctcattattttttgcacactcacaatattctctctcagaaatcaatggcatttgaaccaccaaaaagaaataaagggctgagtgtggtgctcacgcctgtaatcccagcactttggggagcccaggcgggcagattgcttgaacccaggagttcaagaccagcctgggcagcatggtgaaaccctgtatctacaaaaaatacaaaaattagccaggcatggtggtgggtgcctgtagttccagctacttgggaggctgaggtgggaaaatgacttgagcccaggaggaggaggctgcagtgagctaagattgcaccactgcactccaacctgggtgacaagagtgaaactgaat

SEQ ID NO: 222529 - DNA, 1000 bp, Homo Sapiens
ttacttaaggaaaaagagagactaattgagcagcgtgatactttgaaagaaacaaatgaagagcttcgatgttcacaagtacaacaggaccacctaaaccaaacagatgcatctgctacaaaaagttatgagaatcttgctgctgagattatgccagtggaatatagggaggtgtttattcgactgcaacatgaaaataagatgcttcgcttacagcaagaaggctctgagaatgaacgtattgaggaacttcaggagcagctagaacagaaacaccgtaaaatgaatgaactggaaactgagcagaggctgagcaaagagcgtattagagaattgcagcagcagattgaggacctccagaaatctttacaggaacaaggttccaagtctgaaggcgaaagttccagcaaattaaagcagaagttggaagctcatatggaaaaactcacagaggtccatgaagaattacagaagaaacaagaactcattgaagatcttcagccagatataaatcaaaatgtacaaaagatcaatgaacttgaagctgctcttcagaagaaagatgaagatatgaaagcaatggaggaaagatataaaatgtacttggagaaagccagaaatgtaataaaaactttggatcccaagttaaatccagcatcagctgaaataatgctactaagaaagcagttggcagagaaagagagaagaattgagattctggagagtgaatgcaaagtagcaaaattccgtgattatgaagaaaaactcattgtttctgcgtggtataataagagtctagcattccagaaactggggatggaatctagacttgtgagcggcggtggtgcctgcagtgacactggtgcgtgcactcctgcgcggtctttcttagcgcagcaacggcacatcaccaacaccagaagaaatctctctgttaaagtccctgctacaacatctgattaaactgcaaaaaaaaaaaaaaaaaaaaaaaaaaaaaaaa

SEQ ID NO: 222530 - DNA, 1000 bp, Homo Sapiens
acatgcctgtaatcccagcactttgggaggctgaggcaggtgaatcacctgaggtcaggagttcaagaccagcctggccaacatagtgaaaccccgtctctactaaaaacacaaaaattagccaggcttggtggctggcgcctgtaattccagctactcagaaggctgaggcagggagaattgcttgaacccaggagtggaggttgcagtgagctgagatcatgccactgcactccagcctgggcgacagagcgagactccacctcaaaaaataaaatcaagataacctcttgaatgtaatagctcatagcactttaatttggcaagccatttttcctgttttattataaatctatattagatgtttgaatatggtttgaaatatttcactaccgtgctgaaaaaggttggttgatagcagcttggagtgctaactggaagatcaaaatcatgtctcttgctgataacctaagagcattaagctctgagtccagtgaggtcatagcagtgtatgctccttgcccttacggagtgtctgtttttagaaatttagattttaaaaggcgtgggacatacgaccaggccctatagccacataaatataaatttcatagaaaaagaataaaagcggagatatattttttgacacagaggcacccaaagaaatacaaacattgcctagctgctgccatttctgtaactgcccagaagggtgacagatttctgaaggggaaaggattcagatatgaccttttctttagtcccaaccactagttttaacaaatgtgaattattgaaatgtgaagggacaaaaagaatcatacatttaaactgtcttgttcagcataccaatattgtatgttacaaatcatcatttctaaatctggattgattctgttgtgtttttgactgtttctaaagtaagtgtgtataaaagtctcctttttaaaaagatcatatttttaaataaagcattttttgtagaaaaaaaaaaaaaaaa

SEQ ID NO: 222531 - DNA, 1000 bp, Homo Sapiens
gtgcggcagctgacctcatcggagctgctgcagaggctgaagaccattggggtaaagcacccggagctgtgcaaggcactggtcaaggagaagctgcgccttgatcctgacagcgagatcgccaccaccggtgtgcgggtgtccctcatctgtccgctggtgaagatgcggctctccgtgccctgccgggcagagacctgcgcccacctgcagtgcttcgacgccgtcttctacctgcagatgaacgagaagaagcccacctggatgtgccccgtgtgcgacaagccagccccctacgaccagctcatcatcgacgggctcctctcgaagatcctgagcgagtgtgaggacgccgacgagatcgagtacctggtggacggctcgtggtgcccgatccgcgccgaaaaggagcgcagctgcagcccgcagggcgccatcctcgtgctgggcccctcggacgccaatgggctcctgcccgcccccagcgtcaacgggagcggtgccctgggcagcacgggtggcggcggcccggtgggcagcatggagaatgggaagccgggcgccgatgtggtggacctcacgctggacagctcatcgtcctcggaggatgaggaggaggaggaagaggaggaggaagacgaggacgaagaggggccccggcccaagcgccgctgccccttccagaagggcctggtgccggcctgctgaccccggccgcacactcgactttcctggtgctcaccacgcagaggggcacgggccagcctcgggcgcagagggaggagtgacctttctttttctttttattgtcgttcgttttgtttttccacccttttgcctggctcctggcacctgtacctctggactctcctatcgggggattaaaaaaaaaagtaaaatgaaaaaaaaaaaaaaaaaaaaaaaaaaaaaaaaaaaaaaaaaaaaaaaaaaaaaaaaaaaaaaaaaaaaaaaaaaaaaaaaaaaaaaaaaaaaaaaaaaa

SEQ ID NO: 222532 - DNA, 1000 bp, Homo Sapiens
tggggtgttcgtgctgtgttccccccgctccccctttctgtccccttttttggttctgacgtgaagaggtcttagcgcccgcttctgtccacggggtctctccttcctcctccctagctcagggatgggccttccagccggagcaccccgatccccatccggcaccccccaatcccccaacacgcctgtccctcccgcatggccaccaaggagctggaccttggatgcgcctaccctgctgaggtgggtgacaggggccccccacctccagggccttagaaccaccgcccctctccccaccccaggcacccctctttttactcaaaggcactgactgtaatccagggggactgggacctgcctccccccaacctctggctcccacaaggcccggtgttgaccgagccacaggccacggacaggggccggggttggggagactatgtcgccagatgccaggacgccctcaccccgtttgcatatgcaatgctagcatgggaccccgaaaatagacgctctgctgcactgagacttcttgtcaatgcccaaccggcgggggggtgtctccctgcccccgacccccccatacccccttctctgtgacacacacatcttctcgtctctttttctttcattgttaaagggaagctttttaagaaggcaattttcatattgtttctacgggatggttttggttcccttcccttcccacccccccttaagcctgtcagccccctccaaatgtctcaggatcccccctctcccctggggctgggtgacagcaccccggctgcgttcacaccccagtgtcacagggcgagctgttctggagagaaaaccatctgtcgtggctgagcggggagcttgaacacccaggccagggacacccctccccagctcccagagaggccccctgaggggtgagccctctttccaccttcccctatccatgcaccccctcgcaataaaaccaactctaaaatcaaaaaaaaaaaaaaaa

SEQ ID NO: 222533 - DNA, 1000 bp, Homo Sapiens
catctcccaccaactgattaaggagtgggtggaaaaacagacctgttcttccctgcctgcttagcccggatcaagtcacttagatcgctccttggtattcctgagggacaaactagagatcagttgacaaaggagaagtgacaaaagataagctgcagaaggacctcagaagggcagagcaaagggtgagcctacagtaagacacttctatcagcagtgttaatggaagaaattcctaccaatgggcaatcaaaaaagccagtgtgagaagaaaactgatgagctgtcaactgtcaaaaatcagggggaagggggaagcattagtttggatgtaggcccttgttcagtcattttctctaaggccttggaagcaaacatcttctggcatatggcttgttaatgttgtgtttacactaactgccaaaatgtgcctgttgtaagtttggttaaaacttttatcttagtattgaaaatatatagcaagttttaagtcattactgagttacttgttacccttacagaattaagaaaaatagcacagtatgacattttaaaattcatgtacaggtgcattctagttacatgaacatgctagttaaataaaagtcacaattaagtcattatgactcagagtactttataataaatcagatgccctgaggctctgttgaggaagtagaatcccaatgggactccagacagtaaatctttttcgctgttttcagctctgtcacatgctcagtttgtgacccagggaaaagactattgctttgccatgcctgttttcctaaataaaacagttgctggcatttgcacatccacaacgtgttgattaacaaagggattggtggagataaacagatgccaaacctgacctatttcttaaactttatggaataaactaaatttaggatttctcatcattcatatatgatgccataagggagaagagtttatttggggaaaataaaagaaatttccacaaaaaaaaaaaaaaaaa

SEQ ID NO: 222534 - DNA, 1000 bp, Homo Sapiens
ctgcggcctttctgtgctgatgacgcctggccggtgcggccccgcattcacgtgctgcagattttggggcaatcatttcacctgactgaggaggacagcaagctcctcgtgttctttagaactgaagccattctcaaagcctcctggccccagagacaggtagacatagctgacattgagaatgaagagaaccgctactgtctattcatggaactcctggaatctagtcaccacgaggctgaatttcagcacttggttttacttttgcaagcttggccacctatgaaaagtgaatatgtcataaccaataatccatgggtgagactagctacagtgatgctaaccagatgtacgatggagaacaaggaaggattggggaatgaagttttgaaaatgtgtcgctctttgtataacaccaagcagatgctgcctgcagagggtgtgaaggagctgtgtctgctgctgcttaaccagtccctcctgcttccatctctgaaacttctcctcgagagccgagatgagcatctgcacgagatggcactggagcaaatcacggcagtcactacggtgaatgattccaattgtgaccaagaacttctttccctgctcctggatgccaagctgctggtgaagtgtgtctccactcccttctatccacgtattgttgaccacctcttggctagcctccagcaagggcgctgggatgcagaggagctgggcagacacctgcgggaggccggccatgaagccgaagccgggtctctccttctggccgtgagggggactcaccaggccttcagaaccttcagtacagccctccgcgcagcacagcactgggtgtgagggccacctgtggccctgctccttagcagaaaaagcatctggagttgaatgctgttcccagaagcaacatgtgtatctgccgattgttctccatggttccaacaaattgcaaataaaactgtatggaaacgatgagcaagtaaaaaaaaaaaaaatt

SEQ ID NO: 222535 - DNA, 1000 bp, Homo Sapiens
ccagagtgccacgctagctgtgcatcaccggacccacctggagccagcaccctacatctgctgtgagtgtgggaagagcttcagcaacagctccagctttggcgtgcatcaccgcacccacacaggtgagagaccttatgagtgcactgagtgtgggcggaccttcagcgatatctccaactttggagcacaccagcggacccacagaggggagaagccctaccggtgcactgtgtgtgggaaacacttctcccggagctcgaatctcatccgccaccagaaaactcacttgggcgaacaggctgggaaagattccagctgaaggagagccccatttagagtgagggagagagagtgagagaccctaacctattggaggaagatcttcagcatcttttgctgctaccttgacctcaagcccttcatcccactttggagaatggttttgtatagcctctgaagtcaggatctcaggaagtcctgaggagggactctggaataaaaacccttgcctctttccaggccaatttctcgtgttggaaagtcagaagacccagtcttggctttactttcttggggtgaaagagaaatagggtaggctcagaacatgctcatgttattaaggcagcagtccccctggcctttgaggaagtacttatgagatgggtgtcactgtctgaaggttctccaaattgtctgtgaactgcttaggtaggagtgcactgcagtttcctgctagttcccacctgttgtgccccaactttgcttctagatctctggggtgggaggagtgaccttctcaatggaaggggcctccttggtctggagaagagatctgaggtcccaccttagaaatgaaagggaaaccctcagggagccatgacccagggaccttcacactcccccatgtttgttacttgttatccctcccccaacctgcctctgttttccccagagtgattagcagtaaaacccttcaatgaaaaaaaaaaaaaaaaaa

SEQ ID NO: 222536 - DNA, 1000 bp, Homo Sapiens
gcatttaatcactgaagtgacaactgataccttttgggaagtagtccttcaaaaacaggacgttctcctgctctattacgctccgtggtgcggcttctgtccatccctcaatcacatcttcatccagctagctcggaacctgcccatggacacattcactgtggcaaggattgacgtgtctcagaatgaccttccttgggaatttatggtcgatcgtcttcctactgtcttgttttttccctgcaacagaaaggacctaagtgtgaaataccccgaagacgtccccatcacccttccaaacctgttgaggttcattttgcatcactcagaccctgcttccagcccccagaatgtggctaactctcctaccaaggagtgtcttcagagcgaggcagtcttacagcgggggcacatctcccacttggagagagagatccagaaactgagagcagaaataagcagcctccagcgagcacaagtgcaggtggagtcccagctctccagtgcccgcagagatgagcaccggctgcggcagcagcagcgggccctggaagagcagcacagcctgctccacgcacacagtgagcagctgcaggccctctatgagcagaagacacgtgagctgcaggagctggcccgcaagctgcaggagctggccgatgcctcagaaaacctccttaccgagaacacgtggctcaagatcctggtggcgaccatggagaggaaactggagggcagggatggagctgaaagcctggcggcccagagagaggtccaccccaagcagcctgagccctcagccaccccccagctccctggcagctcccctccacctgccaatgtcagcgccacactggtgtctgaaaggaataaggagaacaggacagactaactttttaaatgatatgaagaaatcagaggtgaaaattgtacattgggaatatatttatgcaaattttattgaaatttattgtaaataaagattttctcagtggtctag

SEQ ID NO: 222537 - DNA, 1000 bp, Homo Sapiens
cagcttcttcgagaaggatggagcccccttctgccccgagtgctactttgagcgcttctcgccaagatgtggcttctgcaaccagcccatccgacacaagatggtgaccgccttgggcactcactggcacccagagcatttctgctgcgtcagttgcggggagcccttcggagatgagggtttccacgagcgcgagggccgcccctactgccgccgggacttcctgcagctgttcgccccgcgctgccagggctgccagggccccatcctggataactacatctcggcgctcagcgcgctctggcacccggactgtttcgtctgcagggaatgcttcgcgcccttctcgggaggcagctttttcgagcacgagggccgcccgttgtgcgagaaccacttccacgcacgacgcggctcgctgtgcgccacgtgtggcctccctgtgaccggccgctgcgtgtcggccctgggtcgccgcttccacccggaccacttcacatgcaccttctgcctgcgcccgctcaccaaggggtccttccaggagcgcgccggcaagccctactgccagccctgcttcctgaagctcttcggctgacagcccgctcggctcgccctctcccccggaggccgcgccctcccggaaaagccgggtcctccagaccccgaggccttgctctcagagcgggaggccccacccactggagagccccgcccctaaggtactatgagttctcaggggtcaagttcagaaacggcccagccagacctaaacccacacgcccacaaagtggattgcacacagacaagaactcccgtgcgggcctccactctattcccacccttgagggagcccccttactgggggagggtccttgcaattccagcgaatcggaggccaggccaggacgtccttgctccctgcaccctcactgttctgtgcactttttctacctacataaacacacgcattccacctctaaaaaaaaaaaaaaaaaaaaaa

SEQ ID NO: 222538 - DNA, 1000 bp, Homo Sapiens; identical to SEQ ID NO: 117292

SEQ ID NO: 222539 - DNA, 1000 bp, Homo Sapiens; identical to SEQ ID NO: 222349

SEQ ID NO: 222540 - DNA, 1000 bp, Homo Sapiens; identical to SEQ ID NO: 117294

SEQ ID NO: 222541 - DNA, 1000 bp, Homo Sapiens; identical to SEQ ID NO: 117295

SEQ ID NO: 222542 - DNA, 1000 bp, Homo Sapiens
gcatcaggatgtagccacacggagccggtatgtgaggctggtggacagtgtgaaagagaatgcaggcaccgttaggatattctctagtcttcacgtttctggggaacagctcagccagttgactggggtagctgccattctccgcttccctgttcccgaactttctgaccaagagggtgattccagttctgaagaggattaatgattgaaacttaaaattgagacaatcttgtgtttcctaaactgttacagtacatttctcagcatccttgtgacagaaagctgcaagaatggcactttttgattcatacagggatttcttatgtctttggctacactagatattttgtgattggcaagacatgtatttaaacaataaactaaaaggaaataatctccacgtactaccatcttgattaaattgtgtaattttttataggaattatgagttatctgtagtacttggaaacagaaaatgtgtgtatttaaagacgatgcctatgcagtatattgtttgggatagattgcaaaatttcacactgcatgctttgaaacagttttccttagaaaaagcttttgctatcttatcctgtttacattatttctttattttaattctgcttggtgttcttgcattgcatttaatgatcccttttctccccacctccacacactacattttttttagatttaaatagttttactattttaaatgattgccgtacaattagtagacttgaagacaagttttaaatatttttcttcaaaggcttgttaaaccaatcatgttaaaaggaaattcttggttttggtttgttgttgttagcattagtcatatttgatttagagggtaacttaaatcagttatttttagctttttagaactttgatctgctagggattgtcaaaataatctccttgaggcatctttatttttaaaatgagattaaagtatgtgatttgcttgttatgtggctaaaaaaaaaaaaaaaaaaaaaaa

SEQ ID NO: 222543 - DNA, 1000 bp, Homo Sapiens; identical to SEQ ID NO: 117299

SEQ ID NO: 222544 - DNA, 1000 bp, Homo Sapiens
ggagccgcctggtctcccgcgtccatcggtccattcctgcgtcgttctgtccttccgaacgcacacttcaggagcagccgcgagggtggcatggcagcgagcacagacatggctgggctggaggagagcttccgcaagtttgccatccatggtgaccccaaggccagtgggcaagagatgaatggcaagaactgggccaagctgtgcaaggactgcaaggtggctgacggaaagtccgtgacagggaccgatgtggacatcgtcttctccaaagtcaaggggaagtctgctcgggtcatcaactatgaggagttcaagaaggccctggaagagctggcgaccaagagattcaaggggaagagcaaggaggaggccttcgatgccatctgccagctggtggcaggcaaagagccagccaatgtgggcgtcactaaagcaaaaacagggggtgctgtagaccggctgacggacaccagcagatacacgggctcccacaaggagcgcttcgatgagagcggcaagggcaagggcattgcgggacggcaggacatcctggacgacagtggctacgtgagcgcctacaagaatgcaggcacctacgatgccaaggtgaagaagtgaggcttgggaagaccgccctgccaagtgcggctgcccctgccagaggctcaggcctgggtctaaggggcacgtggagcaagagatcctggtcccctccctgctggacctgccacccagagcttcctgcctagtcccactgggctggcccaccaggcctctgacccaggctgctctgcggccccttcctcctcctcttcctgctccaacttctgtccacctggggacagtctgtgcctgtagcctcatgaccccaacccagccccaggcatggctaacccctgactgcttgcctcatatttaagctgctgctctggccaagtgcctaattttaacccagacctcaataaagacaccttttgtaccaaaaaaaaaaaaaaaa

SEQ ID NO: 222545 - DNA, 1000 bp, Homo Sapiens
atatgaagatatgctaatgtgttaatagcttttaaaagaaaagcaaaatgccaataagtgccagttttgcattttcatatcatttgcattgagttgaaaactgcaaataaaagtttgtcacttgagcttatgtacagaatgctatatgagaaacacttttagaatggatttatttttcatttttgccagttatttttattttcttttacttttctacataaacataaacttcaaaaggtttgtaagatttggatctcaactaatttctacattgccagaatatactataaaaagttaaaaaaaaaacttactttgtgggttgcaatacaaactgctcttgacaatgactattccctgacagttatttttgcctaaatggagtataccttgtaaatcttcccaaatgttgtggaaaactggaatattaagaaaatgagaaattatatttattagaataaaatgtgcaaataatgacaattatttgaatgtaacaaggaattcaactgaaatcctgataagttttaaccaaagtcattaaattaccaattctagaaaagtaatcaatgaaatataatagctatcttttggtagcaaaagatataaattgtatatgtttatacaggatctttcagatcatgtgcaatttttatctaaccaatcagaaatactagtttaaaatgaatttctatatgaatatggatctgccataagaaaatctagttcaactctaattttatgtagtaaataaattggcaggtaattgtttttacaaagaatccacctgacttcccctaatgcattaaaaatatttttatttaaataactttatttataacttttagaaacatgtagtattgtttaaacatcatttgttcttcagtatttttcatttggaagtccaatagggcaaattgaatgaagtattattatctgtctcttgtagtacaatgtatccaacagacactcaataaactttttggttgttaaaaaaaaaaaaaaa

SEQ ID NO: 222546 - DNA, 1000 bp, Homo Sapiens
atcgtggctcatcctgtgaatccgccatactacatcccgctggttgagctggtcccccacccggagacggcccctacgacagtggacagaacccacgccctgatgaagaagattgggacagtgccccatgcgagtccagaaggaggtggccggcttcgttctgaaccgcctgcaatatgcaatcatcagcgaggcctggcggctagtggaggaaggaattcgtgtctcctagtgacctgggaccttgtcatgtcagaagggttgggcatgcggtatgcattcattggacccctggaaaccatgcatctcaatgcagaaggtatgttaagctactgcgacagatacagcgaaggcataaaacatgtcctacagacttttggacccattccagagttttccagggccactgctgagaaggttaaccaggacatgtgcatgaaggtccctgatgacccggagcacttagctgccaggaggcagtggagggacgagtgcctcatgagactcgccaagttgaagagtcaagtgcagccccagtgaatttcttgtaatgcagcttccactcctctcattggaggccctatttgggaacactgcaagcccttaatcagccctctgtgacataggtagcagcccacggagatcctaagctggctgtcttgtgtgcagcctgagtggggtggtgcaggccggtagtctgcccgtcactttggatcatagccctggcctggcggcacagcagcacttgcgttctcggggctgtcgatttcctgccacctgggcagataacctggagatttccaccttttcttttcagcttgattgcatttgactatattttacagccagtgattgtagtttcatgttaatatgtggcaaaatatttttgtaattattttctaatccctttctgagtactctggggccctgcatttatgaggcacctaccttcatttttaacgcttattctgaataaaagtttttgattccttaaaaaaaa

SEQ ID NO: 222547 - DNA, 1000 bp, Homo Sapiens
cagtgttgacttttatcccctcttcagtaatctttaagtccccaaaacattataattttttctttttttgttgagacggagtctcactcttgtcactcaggctggagtgcagtggtgtgatctcagttcactgcaacctctgcctcccacgttcaagcgatcctcctgcctcagcctcctgagtagctgggattacaggtgtcggccaccacacctggctaatttttgtatttttagtagagacagggtttcaccatgttggccaggctggtctttaactcctgacctcaggtgttccacccacctcagccttccaaagtgctaggattacaggcgtgagccactgcagtgggccaatttttgtatttttttaaatgcttgaccaagtgtctaaaataggcaagtagtaccttttgttctttcattgcaatttgatacagtataggctacagtatttttacagggtaaaactagttatggcagtagtatgcacagcagtgttagccatttcgtatgtatgtaatatgcacgtgtgtatccaatctgcctgtgacatgcattttactctttgcagagaatgagctgcagtccagtttaatgtcagtttaataagtggtctctttttagcagagcaaaaaaatatagcgtaaatacttattttttttaaaaacttacttaaatttgtgtgtaaaatatttatttgaaggactttaatatgtaaaaataattgtcttctatgccaccctacagattctattttaatgtgaattatttttttcatttttaccagtagtaaaaaagtagaaaagcaagtatgatatttttgtaagataatttatttggggattcatgttcccctgttagacaatcatgaccttttctacttgtctttttatatataagtagtagatttccacttgtttagggattaagaagatgttctagaatgtagataccttgtccagccataggaatcaaaataaaaaactaaaaaagttca

SEQ ID NO: 222548 - DNA, 1000 bp, Homo Sapiens
tggtgaaggagggctccatgatgattggctaccagccccacgggacccggggcaacttcttccgtgtggttgtggccaactctgcactgacctgtgctgatatggacttcctcctcaacgagctggagcggctaggccaggacctgtgagccttctctgtcttgctgccggccttgataccacccctcacccgcagagtcactgcattccctcccagcctttgaggccgggtgcagtggctcacgcctgtaatcccagcactttgggaggccgaggcgggtggatcacttgaggtcaggagttcgagaccagcctggccaataaggtgaaaccctgtctctactaaaaatacaaaaattagccgagcatggtggcctgtgcctgtaaacccagctactcaggaggttggggcagaattgcttgaacccagggggcagaggttgcagtgagccgagattgcacccctgcactccaggctgggcaacagtacgagactctgttccaaaaaaaataaaaaagaacagcctttttaggccacagtgacctgcgcaatgtttatatgctttgacctactaactttctcctaactaaatatttgattttaggagagtgtttaaataaattacagtatgtctatatgatgaaatgttattttgccattaaaattttgtttacaaagataatttttattgacataaaaataactttaatgtaatttatgttgaaaaagctgaatacaagtctttatatagagtaatatttgagctgtgttcaaaaatacataggaaaagactgataaaatgaaatatggcaaaatgttaatagttttccctggaataggataataggcaattttaaaacagactcctttaaaaaaacaaacaaacaaaaaaaacatagacttctttatatcttttgagctccctcccttttattatgtaatgaatatgtgttgcttttgtaataggaaaataataaagttaaaatttcaactgcaaaa

SEQ ID NO: 222549 - DNA, 1000 bp, Homo Sapiens
tgacctgacatccctgaggggcacccggccttataaccagcgcgcggctgcctcgttctttgcgtgtttggtgatgatcgcctatggagtgagtgccttcttcagctaccaggcctggcgaggagtaggcagcaatgcggccaccagtcagatggctggcggctatgcctaaaccacctgtgccacggccccctctggggctgaagccgccgctgggtcacagagcagggtcaccctgcaagcctgaagctggggagccctgcgtggagtcagcccaacagggactgcatttgctcctctctgcccgtcagacataagctctcacagcgctaaggaagcaggcccaggctggcaggcatctcggcttgcaggaggccaactgctgagacctcttctccatcccccttattcagtggaagatgacgggggatctgaggctgtgtctctgccttgtctttagaggacttcagcgtccaagactggggcccacccttctcaccagcactaaatgcactaacaaggactccagacctgcagccccagacccgccgtagtataagcctaacaagcaacacgtagcaccttagtctttgttccaggagagctgagcaagctggtgaaaccactctccttcctttaaacaccgtttcaaccaacctctccctggagccaacctgtaaaaagtgggttgattgctgacagcatggtcttccctccctgcatttcagacataccagttactgaaagcaaatcagttttaagtgatttctcagtgctgaaaagcctgtccaggtttccttccctttcccaagcctctctctgtaatactccctttgggcgaagctaacatcggtgcctccccgaccttgctgactaggcacatgggacgcaaaggagggagggaagcaaggccttgcctggcgagttgtcatgtggttggtggtgactgttttattttttttaataaaaataaagatgagagaaattaaaaaaaaaccgg

SEQ ID NO: 222550 - DNA, 1000 bp, Homo Sapiens
atgggagagaagtagcgtcccctaccctacaagtcacacattccggggaggggggtggggggtggaggcaggaagtcatgggggtgggggtgggagcacgggaacagctttcttaaggcctcagggtcctgttttccctggcctcttctagagggcccgtggacaggtcgcagtgcgtgcttatttggaaaccaggtgtgtgagccgaatgcctgccaggccatgcactcagcagaggagcccttgtacctggctgccctgagaggagcaagaggccacctcccatgtggctctagacaccacgtgggctcattagccccagcgtctgtgccggctccaggtgcctgcctctgggtgtgtgagtgggagactttgctccctggcctcatcctagagaggcccctggtgcctagtgctgaggcctctggggctggaaagcctcagcagaaaggaggcactactgagcaactatgcattgtcattgtcgggtttggggctttcggtggttccttggtgactgggaattgcttgtgtgcatgtgttgggtgcatgcttccgggtctcagctgccccaggcccgcacaggcaaccccttcccatccaaagccattggtggagcttctctggaatcatttgccaaaagcccaaggcagaatccaagggtccaagaccatttccatggagctcatgtttttcttttctgtaggaacttttttttaaccagcacccaccataattccgaaggccacgtttcatctttcctggatcactacagtgaagtattacagttgtacagttcccagtctggccttggcttgctcggataaaactttgtatgtattttgtatggcatagattctatattgtaatgatgtcctatgcaaaaagaaaaattaacgaaattgtaaattttattgttttaacgtgtatgcatgtttagtgacgtttacattttgaaataaaatttatgattcattattttaaaaaaaaaaaaaaaaaa

SEQ ID NO: 222551 - DNA, 1000 bp, Homo Sapiens; identical to SEQ ID NO: 117306

SEQ ID NO: 222552 - DNA, 1000 bp, Homo Sapiens; identical to SEQ ID NO: 115509

SEQ ID NO: 222553 - DNA, 1000 bp, Homo Sapiens
gtaaaacctctcaaaccgaggccagaaccaccaaagaaaccatctaattggagaaggaaacatgaagaattcattgctaccataagagcagctaaaggccttgatcaggccctcaaagagggtggcaaacttcctcctcctcctccaccttcttatgatcctgattatattcaatgtccatattgtcagaggagattcaatgaaaatgcagctgatagacatataaatttctgtaaagaacaggcagcacgtattagtaatgaaggggaattttctacagataccaaaggaaaaccatcttctcggacacaggtgtataagccacccgcacttaaaaagtcaaattctcctggaactgcatcatcaggatcttcacgattaccgcagccaagtggcgctggcaaaactgttgtaggtgttccttcaggtaaagtgtcttcaagtagcagctctttgggaaacaaacttcagaccttgtctccctctcataaagggatagcagcccctcatgcaggagctaatgtcaaaccccgaaattccacaccacctagtttggcaagaaatcctgccccaggtgtgcttacaaacaaaagaaaaacatatactgagagctacatagccaggccagatggggactgtgcatcttcccttaatggtggaaatattaaaggcattgaaggacattcacctggaaacttaccaaaattctgccatgagtgtgggactaaataccctgtagaatgggccaaattttgctgtgaatgtggcattcgaagaatgattctatgaatagaatctcaaaaaaaaaaaaaagccaagttcagagtttatgattattgctgcttggacagctagagcacatcctctagttagtttgtgctaaaaatactcgaaataccatttccagttaattttgaagtgtaatcttttggctatataatgtgtgtatgtttatatgtgtacatatactgtatataataaatatttgataccccaaaaa

SEQ ID NO: 222554 - DNA, 1000 bp, Homo Sapiens; identical to SEQ ID NO: 117309

SEQ ID NO: 222555 - DNA, 1000 bp, Homo Sapiens
gacagaatatcaaaataatttgtggctgtggatttttttaactgctagtagtggaatactggaaaagcttcatttctgaagatgaattttatttttaaaaaatacatgcacactcaaaacttttagctttgatcacaagtggacaaatttctgaaaccaaaggcaactaagttgctgtgttagctcttgctggattttgagcctaggtcctactgtctgccagtactcatgtgagttgtatgtgcccccagtgctacatacgcaggtatgcgtaagtgtgtatgcttgttttaaacaaacactcaacgtacatatgtacataatctacacatatttatatcacatatctagttttattactatagactatacgaattggtggttaacatgaaatgttaccttttaacagactgtttttaaaaattaaaaatgtatgtataggttttgaaatttttttaaaaggggagaaagactgttaagaggaggctatttgatgacataacacttgaatattttatgcctcattctgtttatcagttctcgcaatctgtataaatgcattttagaactgatagacagtaaacttgaatttatctttgataagaatacatgccactgtacattcagatattatttaaatttgcaaacacattgttctatatgtaagggtactgtatgtaaaactctgtattaaaactattccacatatcctaaaatttcagcttgcctttttgcggccttatattttgatgtaaagattaaaagaatgtgcaaaacagtcagaaatttttattgccttttgagattctccaacttgacaaatgtgccaaagatcaacagacagaaaatatcatcctgtgtatttacttgtcatactttaactttgtgaaagatcttactgataaatgaaaagctttagcagaggtggtattgtggggtaattgcttaaatttacatatcaaagtaaaaaagtagtgcctgtaaaaaaaaaaaaaaaaaa

SEQ ID NO: 222556 - DNA, 1000 bp, Homo Sapiens
tccaaccataaacccagaaatgctgccatagaggaacccattagcaagatcaataaccatcgtggatattccaaagagcagagcatttaacccagaatctgaaatctcagtaataacagaaatgtcaatatgagattgtggttattaacaatatgttatcctcactactttatttcttttttcatccaggtgtttcattaagtattctcatttatatgctcatagaagtcatcagatcaacacattcactccaacacctgggtataaaggcgaattaaaacctgaagaattactttattattcattaagaactgcattcccacatcctcacaccaatatcttccactgttactgtgcagtcataataagagttgggttatgtgatttatgcaaaattgttattggtgtgttctaatgatttttttccaggaattcaagtaagtgaagtacaaatacttagcaccatagattgtaaaaatagaaagaggaaatgagaaaacttaatgtcgttcttgtacagttgagttttgcttctttataaactgtctgttaaaatcaggggttgctgttagactgtcaagcagaagtgatggatgttcaaggaggcaggttgccccaaagtgttttctaactttcaagtagagaactttatgctctaataagaaaaatacaactcattcttaaccacccccccaaaacagagaaaacacatacatttatgcattttaaagataaaaagtagtttctcaaaaaaatctgaagttctctgaaaaccagcttattaaaagtgctgttttgtggtgaaaattgaaaccaaatccactcacatttcctatcgggtcttgaaattcttggtggtgtgtcaccattccactagatggcagtgttgcttactgagtgtcaatggcttttttccccgtaaatggaatcatgtttttctcccccaaagtacaataaagctgccttgtctgcaccaaaaacaaaaaaaaaaaaaaaaaaa

SEQ ID NO: 222557 - DNA, 1000 bp, Homo Sapiens
ttggggtcttcaggactgaagaggagggagagtggggtcagaagattctcctggccaccaagtgccagcattgcccacaaatccttttaggaatgggacaggtaccttccacttgttgtatttattagtgtagcttctcctttgtctcccatccactctgacacctaagccccactcttttcccattagatatatgtaagtagttgtagtagagataataattgacatttctcgtagactacccagaaacttttttaatacctgtgccattctcaataagaatttatgagatgccagcggcatagcccttcacactctctgtctcatctctcctcctttctcattagccccttttaatttgtttttccttttgactcctgctcccattaggagcaggaatggcagtaataaaagtctgcactttggtcatttcttttcctcagaggaagcctgagtgctcacttaaacactatcccctcagactccctgtgtgaggcctgcagaggccctgaatgcacaaatgggaaaccaaggcacagagaggctctcctctcctctcctctcccccgatgtaccctcaaaaaaaaaaaaatgctaaccagttcttccattaagcctcggctgagtgagggaaagcccagcactgctgccctctcgggtaactcaccctaaggcctcggcccacctctggctatggtaaccacactgggggcttcctccaagccccgctcttccagcacttccaccggcagagtcccagagccacttcaccctgggggtgggctgtggcccccagtcagctctgctcaggacctgctctatttcagggaagaagatttatgtattatatgtggctatatttcctagagcacctgtgttttcctctttctaagccagggtcctgtctggatgacttatgcggtgggggagtgtaaaccagaacttttcatctatttgaaggcgattaaactgtgtctaatgcaaaaaaaaaaaaaaaaaa

SEQ ID NO: 222558 - DNA, 783 bp, Homo Sapiens
cgagtctcgctcaggctcggttttaccccggagtctattcgaagggggctgctacgtcagcgcgtctcagcgtaagacggcgctattccgctgtaacagcttccggcgggtcctggatgttgatgtcctgcatctaacgcggtgtaacccccgaagccgagcgagctccggaggaatttcagtatctgctacggtaacttcatcagcccgccaagatggcgatgcaagcggccaagagggcgaacattcgacttccacctgaagtaaatcggatattgtatataagaaatttgccatacaaaatcacagctgaagaaatgtatgatatatttgggaaatatggacctattcgtcaaatcagagtggggaacacacctgaaactagaggaacagcttatgtggtctatgaggacatctttgatgccaagaatgcatgtgatcacctatcgggattcaatgtttgtaacagataccttgtggttttgtactataatgccaacagggcatttcagaagatggacacaaagaagaaggaggaacagttgaagcttctcaaggagaaatatggcatcaacacagatccaccaaaataaatgttttctacattttcatttggactaaatcccacgaatgacaactaccacctttttttcctttttaattaatactaaatattgtgatttcttatttgaggttcaaaatgacctgcttgaaactttgatacatattggaatacattatgttaataaacttgtagctttttgtgaaacaaaaaaaaaaaaa

SEQ ID NO: 222559 - DNA, 1000 bp, Homo Sapiens
gaggttacttcaaagacaaagcttttgttaattatcttaaatacttgctttactggaaagacccagaatatgccaagtatctaaagtaccctcagtgtttacacatgttagagctgctccaatatgaacacttccgaaaggagctggtgaatgctcagtgtgcgaaatttattgatgaacagcagattctacattggcagcactattcccggaagcggatgcgccttcagcaagccttggcagagcagcaacagcaaaataacacatcgggaaaatgaaaaactggatacaaacgaggcacttaatacatgtatataatgtatttcttttgtacagtgaagacaaaaaaaatgaaaactcttcctatctacctttattatggtagcccctagaacctttagtgtgctttttcatccaactttttattgttaatagactatttctgttaaacctgaattgttctttgatttccctgtggatttgtaaggtgtttttcttttttacgcatttagcataatcagctgattaagaatggaaaagttaggtgctttagaccaaataaggcactggggcatggggtaggggtgggccaccaagtatactgaattctaaggctagctgttcctgacatatagtagggcaagaccatctcctggaaccttactgtctcagatcaactactctaccactctactctaagatgtagtgagagtagcggagtcactgacctctttaaatcataggacaggaactgcataaaggttcttgaattctgcaggacaggaaataactgtattacctgctttgcaaggtggctttaagaatcactgaatcactgtggcctcacttgacctagtcatggcaggacaactagtggttagttactaactggactcttgactttagaacaaacatgaggagcctcaaatacttgtgttcatttgggaaagctaccattgatttgggaggtaccacaaaccaggtgctatgttaagtgctt

SEQ ID NO: 222560 - DNA, 1000 bp, Homo Sapiens; identical to SEQ ID NO: 117318

SEQ ID NO: 222561 - DNA, 1000 bp, Homo Sapiens
cttaacttgtaaaactgctgttaactcggtttaaatttttaaattaatataatagaaagaacactaaaatacttactggtaactgcttagagccatttatctgatcctgtggattacagaatgcattccctcttctgctgtagcttatcattgctttgttttgtagctctgcatattttgcccaccttgtcttccctgtaagtttaagacgtttccaaggaaaagcttcagggctgatagtttcttagcaattcctattcttatgcccttactttaaaatagtccttttattttgtgtattttatttcctaagtttcagatgtaatatctgttgcttcctaacatgtcgattaccagaacgttagaattttacctaatttcttgtggatattgcagaagttctggttaaatcacaacttaaaagtttttaaaagtgctttgagcatatgtatatgtttagtgacaaatcatataaaaccattcacaagttttggtttttttttttcgtttgttttagtgactaattcaggatgaaagtttttttgttcttgtatttaacccttttttatgagcagctgaagacaccatatttaacactatatctcagtgatagggaaatagctgcattgatcttacatgagcataatcatccttatacttcatgaggggattattagtacaatccccattttactgtgtttgagttaaaaaccaaacatccctgtaatttaatttgaagattctttaacagattgcagcaaagttcattataaaactgttatggtgtcttcaaagacttgataaaataacactgagagagaattggtccatttgtatgctgtatttctattacttgccaaaaggaatggggttaagattaaacttgtttccattctcttcacatggatatacatccccatgtttaactgacacactgggggctcagttgtgtgctgtaatgtcttattaaagaagatattaaagaaaaaaaaaaaaaaaa

SEQ ID NO: 222562 - DNA, 1000 bp, Homo Sapiens
tacagtaattggtgtgtggtatagaagaaaaacgggttcaaaccccacttctgccacctaccagctatatggccttgaatgagtcattcagctttaataaggttcattttcttctgtttaaaaagacacaaaacttgaaaatcagctttggccatctacctgagaattagaaagtctgatttttggaattagaaatcatgattgtaggctgggcacagtggctcgcgcctgtaatcccagcactttgggaggccaaggcggacggatcacttgaggttaggagtttgagaccagcctggccaacatggtgaaaccccatctctactaaaaaaaaaaaaaaaattaggtgtggtgacacatggctgtggtcctagttacttgggaggctgaggcaggagaatggcttgaactggggaagcagagcttgcagtgagccaagatggtgccattgcactccagcctgggcgtgacagagtgagactccatctgattgtaaagcatctagtacagtgtacagtgccttggaaatgataggtatggaataaatggtaattatttttatattatatatattatgtattcctgttattaagtgtagagttttatgagtataatttgattttattaccttcttttttacaagctgttttctcagtatttttcttggatgggatgacgctaggctggaaagtttttttcatcactatgattttataaaacaattttttctatgaacctttacttacttgactggattggactaaaagcactgatcagaggccacgacataaaaattcagtccctttgtccttccccgtgcctcccaaagttactttaagatccttagaatatttctttaaatattttatagacaaaaaatttaaagactatctgtattgcaaaattaaactatttctttaatgaatatattgcttattttaagttccaaaggtgaagtctttaagaataaaacattaccaactcctgcttttatatgtaa

SEQ ID NO: 222563 - DNA, 1000 bp, Homo Sapiens; identical to SEQ ID NO: 117328

SEQ ID NO: 222564 - DNA, 1000 bp, Homo Sapiens; identical to SEQ ID NO: 117329

SEQ ID NO: 222565 - DNA, 1000 bp, Homo Sapiens
gcaggagggggatttctgttgccttgacatgtcgttgctcagtgcctggattgcaggcgagtctctcttttttatgttgctttgatttcaagatctcttagatatactaggtagtgtatgaatgtgcataaatccagtttgagaatggtgtttatgaagaagctgtttcgtgtgtacagttgctgctgtaatttagccagcagtgccctgccctgccctgcagtgtctgctcagctcccactgcttctctttgctgttgggcatgtgaggcatgacttggaggggggcctggtgcctggggacctgctgaagagaatgctcaccaccagctctctgtttccctttctgctttggtaatcaacacgtgtttgcctgcagtggccgggaccgtgactgtttctgcccttgtgcctagttaagagccttcaaaagcataatgaacacttttgatatgatattgtaactttagtaaatgctttacttccctctaattgcccccaaatgccttaattttgtggactgtttatttcaacaggtggaagtgttggtcgtgcgaaatcttggtattcgcatttcaagaagggagttcttttttctttcttctttctatggaacgtttcaagtgattggatagaaagaagggctctgaagcaggagttttcacctgctctgagggaacttggggctccagggacgtaccccaaatgttgcccaggttgaaactccctgacagcctgttctacgtagtggctcgtggtttccagtttgaagagagttgtgcccctaaaagtgtttgaaacctgtggctttcaagcaaggtaccgttgtccccacagtgttccgtggggtagggggtgatggagactgtgggcaagcctgttgtttttggccccctgttgttacatgggacctgttttgacggtgggagggtgagatgtgaagatgtgggatgaacctggaatgaacgaattaaataaagacatgcatccatctgtcagcg

SEQ ID NO: 222566 - DNA, 1000 bp, Homo Sapiens
tgcgtccctaaccccttccccagcttggtgttttaccccgaaacaggaaggaacaggggtcctgtagaacaggggtcctggggaaggtgtccagggcagggtcctgggaagggtgtcccgaccgcttcctctccagctgtggctccatctgcccagcttgcctgcctcctgcacccactgccctgaccttcctgcttcccacgctgccatctctgccagggtgccacatgggttcctgtgccaccctttccccgcccctcaaatcgtcctttaagtcttccttccaagtgctgtggggcataacgatgaggcgctggccttgggggccacaccaggtcgcagcaaatggcttcagcctgggacgccagtgttttatgctcttagttcagtaaaatacgcccccgaaattcaagattgagtgtcaggctttatatatattcagcattcctcattacagaaatcttctattgaatgggaaaggtttaaatgctaaccaaagcaatttatttttaattaatatttttagactctgtgctgtcatactgaactcactgctagctaagagacctatcagagatttagatatattttctccaggttttttgtgggttttctttgttgttgttgttgttctagccatgtgacagaggctctttctaaaagtatgtagttcgctgtgtgtcggctccagcagtaaccgtcctcactgcgccacgcactcctctgtagatgtgtgcccagtgggagttccttccagccccaggaccacagcagcagccaggtgccgagtggattgagtgccaggtgcatccaagactttccctcccttccagaaggcactgactgaagacaggatggatcatgcggagccggctgaaatgctccaactttttcaaagtgtgggtggtccagtttggactgatgggaatcttcttgtcattctttttaaacggatgataccgatggaaataaaaggtgggaaatatattcaaaaaaaaaa

SEQ ID NO: 222567 - DNA, 1000 bp, Homo Sapiens
tatcacagacagagaagaaaagtacaatcaagctaaggagaaactgcagcgagctgcaattgcccagaaaaagagaaaatctcttcatgaaaacaaattgaaaagactacaagagaaagtagaagtcttggaggcaaagaaagaagaattggaaacagaaatcaggtcttaaatagacaaaatgttcctttgaagactatacaaggcttcaaaaaagactaaaagatatacagagaagacataatgaatttcgaagtctaattttggttcctaacatgcctccaacagcatctatcaatcctgttagctttcagtcatcagccatggttccaagcatggaactaccatttcctcctcatatgcaggaggaacaacatcaaagggaactctctctacttcgcaaaagactagaagaactggaaacaacacaaagaaaacaactagaggaacttggatcttccggagaatgatgttcttggagaacaggcagatcaaaagaggtgaagttggtgactcagtaaaacttgacattttaacctgtggcatttagatactttttactgtttgccaaaacacttgaatgtgcctcaagaaaaggtacctactacatgctgtattgtatgactgtcaggattttaagattatacaagtgaagcattaaaagagaaattctcagagatatttagaatatttgacaatggtttgagaatgtaaaacaaaaaggaactagttagagtcaagttttaaaatttttactttgttgaatttttttttttggcattttgagtgaaatataactatcattaattctctcttcatctttgagatgcttggccataacagggtccatacacatcttctggtttactatatacaaaaactgtagttgaaaaaagatgacaatttaaaagtcagcctaaagaatgtaaaggtatctatatacaaaaggctaccttttctaaaatctgtgtgcacataattaaagagcttaatttttaaa

SEQ ID NO: 222568 - DNA, 1000 bp, Homo Sapiens
agctgcctggctcttagcttggccaggcctagctctacctctggtggctatggcagcggggggcagatgggtgcggcagcagggcccccgggtgcgccggggcatatctcgactctggttgcgggttctgctgcgcctgtcacccatggccttccgggccctgcagggctgtggggctgtgggggaccggggtctgtttgcactgtaccccaaaaccaacaaggatggcttccgcagccgcctgcccgtccctgggccccggcggcgtaatccccgcaccacccaacacccattagctctgttggcaagggtctgggtcctgtgcaagggctggaactggcgtctggcacgggccagccagggtttagcatcccacttgcccccgtgggccatccacacactggccagctggggcctgcttcggggtgaacggcccacccgaatcccccggctactaccacgcagccagcgccagctagggccccctgcctcccgccagccactgccagggactctagccgggcggaggtcacgcacccgccagtcccgggccctgcccccctggaggtagctgactccagcccttccagcccaaatctagagcattgagcactttatctcccacgactcagtgaagtttctccagtccctagtcctctcttttcacccaccttcctcagtttgctcacttaccccaggcccagcccttcggacctctagacaggcagcctcctcagctgtggagtccagcagtcactctgtgttctcctggcgctcctcccctaagttattgctgttcgcccgctgtgtgtgctcatcctcaccctcattgactcaggcctggggccaggggtggtggagggtgggaagagtcatgttttttttctcctctttgattttgtttttctgtctcccttccaacctgtccccttccccccaccaaaaaaagaaaaagacaaacacaaataaaatatctgagcggaactgtgaaaaaaaaaaa

SEQ ID NO: 222569 - DNA, 1000 bp, Homo Sapiens
cctggttaagtttctgaagactttgtacatacagaagtatggctctgttctttctatactgtatgtttggtgctttccttttgtcttgcatactcaaaataaccatgacaccaaggttatgaaatagactactgtacacgtctacctaggttcaaaaagataactgtcttgctttcatggaatagtcaagacatcaaggtaaggaaacaggactattgacaggactattgtacagtatgacaagataaggctgaagatattctactttagttagtatggaagcttgtctttgctctttctgatgctctcaaactgcatcttttatttcatgttgcccagtaaaagtatacaaattccctgcactagcagaagagaattctgtatcagtgtaactgccagttcagttaatcaaatgtcatttgttcaattgttaatgtcactttaaattaaaagtggtttattacttgtttaatgacataactacacagttagttaaaaaaaatttttttacagtaatgatagcctccaaggcagaaacacttttcagtgttaagtttttgtttacttgttcacaagccattagggaaatttcatgggataattagcaggctggtctaccactggaccatgtaactctagtgtccttcctgattcatgcctgatattgggatttttttccagcccttcttgatgccaagggctaattatattacatcccaaagaaacaggcatagaatctgcctcctttgaccttgttcaatcactatgaagcagagtgaaagctgtggtagagtggttaacagatacaagtgtcagtttcttagttctcatttaagcactactggaatttttttttttgatatattagcaagtctgtgatgtactttcactggctctgtttgtacattgagattgtttgtttaacaatgctttctatgttcatatactgtttacctttttccatggactctcctggcaaagaataaaatatatttatttt

SEQ ID NO: 222570 - DNA, 1000 bp, Homo Sapiens
atttctttaaggaccagctgtactggcgctacgatgaccacacgaggcacatggaccccggctaccccgcccagagccccctgtggaggggtgtccccagcacgctggacgacgccatgcgctggtccgacggtgcctcctacttcttccgtggccaggagtactggaaagtgctggatggcgagctggaggtggcacccgggtacccacagtccacggcccgggactggctggtgtgtggagactcacaggccgatggatctgtggctgcgggcgtggacgcggcagaggggccccgcgcccctccaggacaacatgaccagagccgctcggaggacggttacgaggtctgctcatgcacctctggggcatcctctcccccgggggccccaggcccactggtggctgccaccatgctgctgctgctgccgccactgtcaccaggcgccctgtggacagcggcccaggccctgacgctatgacacacagcgcgagcccatgagaggacagaggcggtgggacagcctggccacagagggcaaggactgtgccggagtccctgggggaggtgctggcgcgggatgaggacgggccaccctggcaccggaaggccagcagagggcacggcccgccagggctgggcaggctcaggtggcaaggacggagctgtcccctagtgagggactgtgttgactgacgagccgaggggtggccgctccagaagggtgcccagtcaggccgcaccgccgccagcctcctccggccctggagggagcatctcgggctgggggcccacccctctctgtgccggcgccaccaaccccacccacactgctgcctggtgctcccgccggcccacagggcctccgtccccaggtccccagtggggcagccctccccacagacgagccccccacatggtgccgcggcacgtcccccctgtgacgcgttccagaccaacatgacctctccctgctttgtaaaaaaaaaaaaaaaaaaa

SEQ ID NO: 222571 - DNA, 1000 bp, Homo Sapiens
ggtgcctcaggccatggagtggctaattgaacacgcagaagacccgaccatagacacgcctcttcctggccaagctcccccagaggccgagggggccacagcagctgcctccgaggctgccgcgggagccagcgccaccgatgaggaggccagagatgagctgacggaaatcttcaagaagatccggaggaaaagggagtttcgggctgatgctcgggccgtcatttccctgatggagatggggttcgacgagaaagaggtgatagatgccctcagagtgaacaacaaccagcagaatgccgcgtgcgagtggctgctgggggaccggaagccctctccggaggagctggacaagggcatcgaccccgacagtcctctctttcaggccatcctggataacccggtggtgcagctgggcctgaccaacccgaaaacattgctagcatttgaagacatgctggagaacccactgaacagcacccagtggatgaatgatccagaaacggggcctgtcatgctgcagatctctagaatcttccagacactaaatcgcacgtaggtggcgttgttccactcggctatcaggccacagcagccccctggtgcggcccgagaccgggcagagtggacctcacctggaaactcaccttcagcgcctcagccctggactgttagaggtgctgcagctgctcctgctctctgatcttattgcttataaactttggtgacggtagtgtgtaaggccgtatttttagcatctgacaggtgtttacaaaaaagtggttgtcgcactgggaagtggagtgatggcctcgtctccagtgctcctctgggctcttgagttgctgcttgaattgccgtgtagacatttgcttggagagtccacttgttatttgacggaggtaggtttcaacccagagttaatgtcaagcatgctaatttaactagtcactcacagatgacttttctttaataaagtcccttttcctaaaaaaaaaaa

SEQ ID NO: 222572 - DNA, 1000 bp, Homo Sapiens
tggcccacatctgacctggcagcccatgtattccggtcattagggatgggaagccatgaggacctggccttctgcccgacccaggcagccattcaagttgagcaatggccacttcgaagactcaagtgcacctgatccctgcgcaacagccacaccaggagaacaggctgtccttggcggcagtaggagcaggcgccaggtttcctggagctcttggcttcagccagcccccagccagagtcctggctaggacagtgacctgatctcctcctcatgaccttctgccctggacaagccccctgaactggatttgggactgtcaaagcaactctacccctgctctggtaggctgaacagtgaccccccaaaatggcagtgtcttaatcacctaaaccttaacatgtgactatattaccttcacatagcaaaatggactttgcagatgtgattaaggatcttgagatggaaggagtatcctggatttttcaggtaaactgagtataatcacaagggcctctgtaaaggaggcaggagtgtcagagtgacggaagaaaatgtatgtaacaatggaagcagaggtcagagtgatgcaattgctggaggaagagccatgagccgaggaatgcagacagcctcttctcctctggggcctcaagaagaatgcagtcctgccaataccttgattttaagccctgtgaaactgatttcagattgctgacctccagaacagtaagatcataaatttgtgttgttttcacatgtgtgaaaacacatgtgtgataatttgttacagcagccacgggaaacgaatatagattgtggtgcccaaattagagtgctgctgtaacacacgcctactgattgaagtggctttggaattgcaacgtggaaatgggcagaggctggaagaattttgagagtcatgataaattgccttaaccacctctcttctgataggtgatgtggccaggggaactcttcctcaaccttcagacctaaa

SEQ ID NO: 222573 - DNA, 1000 bp, Homo Sapiens
cgtccgggacctggaccaggacggtgacaagcagctctctgtgcccgagttcatctccctgcccgtgggcaccgtggagaaccagcagggccaggacattgacgacaactgggtgaaagacagaaaaaaggagtttgaggagctcattgactccaaccacgacggcatcgtgaccgccgaggagctggagagctacatggaccccatgaacgagtacaacgcgctgaacgaggccaagcagatgatcgccgtcgccgacgagaaccagaaccaccacctggagcccgaggaggtgctcaagtacagcgagttcttcacgggcagcaagctggtggactacgcgcgcagcgtgcacgaggagttttgagcgcccggccgcgccccgcgccgccccccacgcaccaccggggcggcctcgcgggtgactccgggctccgtggctgtcccggaccccacctcttccctgccgcccgccaccggccgaccgaccgcggctgccccagttgatgagcggcgtgtcccctctgcagcgcgcaccccggcggggctttggctgtgacgcggtcggggcgcggggctgggctgtggccccgcggcgccgcctcctccctggtccctcgaaatcgtggcatctcacttctgagaacgaaatctcgcttcagtcactctgccgaaggcgctgacggcatcgcggccggaacctctgggcccggcccctcccagggccgccgctccgtgggaaaaaacagctcctccatttccttgaaaactgaacgattattaaaaatagattaaacttcgctggaaatgagtagccaggaagttcaggggagggtgccgggtccttcccgggcctggcgtgtcggagccacccaggtcccgcagctgccgctgagaaaatgcaaatatttgttgtgacaagaatcacatacatttactttaaatatagttgccttttttggtcagcttcaaaaaaaaaaaaaaaaaaaaaaaaaaaaaa

SEQ ID NO: 222574 - DNA, 1000 bp, Homo Sapiens
agctgaaggacatccggaacgcctggaagcacagccggatgttctttggcaaaaacaaggtgatgatggtggccttgggtcggagcccatctgatgaatacaaagacaacctgcaccaggtcagcaaaaggttgaggggtgaggtgggtctcctgttcaccaaccgcacaaaggaagaggtgaatgagtggttcacgaaatacacagaaatggactacgcccgagctggtaacaaagcagctttcactgtgagcctggatccagggcccctggagcagttcccccactccatggagccacagctcaggcagctgggcctgcccaccgccctcaagagaggtgtggtgactctgctgtctgactacgaggtgtgcaaggagggcgatgtgctgaccccagagcaggctcgcgtcctgaagctttttgggtatgagatggctgaattcaaggtgaccatcaaatacatgtgggattcacagtcgggaaggttccagcagatgggagacgacttgccagagagcgcatctgagtccacagaagagtcagactcagaagatgatgactgaaagggactcgggactgaaggtctcctggaagcttctgggtctcactggaccatcaggactgctgccgcccctctggagagagcagctttttatttgtctgtagacagggaacatgatgggcactgacctcctgtaaagaataaaactgtgggccgggcgcggtggctcacgcctggaatcccagcactttgggaagccgaggtgggcagatcataaggtcaggagattaagaccatcctggctaacacggtgaaaccccgtctctactaaaaatagaaaaaaaaactagttgggcatagtggcatgtgcctgtagtcccagctactcaggaggctgaggcaggagaatcacttgaacccgggaggtggaggttgccgtgagttgagattggaccactgctctccagcctgggcaacagagtaaaactctgtccc

SEQ ID NO: 222575 - DNA, 1000 bp, Homo Sapiens
gatatatcaggccaagtgattttaatggaccagaaaatgaaggagagtgatcaccagattatcaaacgacgacttcgaacaaaaacagccaaataaatcacttatggaaatgtttaatataaattttatagtcatagtcattggaacttgcatcctgtattgtaaatataaatgtatatattatgcattaaatcactctgcatatagattgctgttttatacatagtataattttaattcaataaatgagtcaaaatttgtatatttttataaggcttttttataatagcttctttcaaactgtatttccctattatctcagacattggatcagtgaagatcctaggaaagaggctgttattctcatttattttgctatacaggatgtaataggtcaggtatttggtttacttatatttaacaatgtcttatgaattttttttactttatctgttatacaactgattttacatatctgtttggattatagctaggatttggagaataagtgtgtacagatcacaaaacatgtatatacattatttagaaaagatctcaagtctttaattagaatgtctcacttattttgtaaacattttgtgggtacatagtacatgtatatatttacggggtatgtgagatgttttgacacaggcatgcaatgtgaaatacgtgtatcatggagaatgaggtatccatcccctcaagcatttttcctttgaattacagataatccaattacattctttagatcatttaaaaatatacaagtaagttattattgattatagtcactctattgtgctatcagatagtagatcattctttttatcttatttgtttttgtacccattaaccatccccacctccccctgcaaccgtcagtacccttaccagccactggtaaccattcttctactctgtatgcccatgaggtcaattgattttatttttagatcccataaataaatgagaacatgcagtctttgtcaaaaaaaaa

SEQ ID NO: 222576 - DNA, 1000 bp, Homo Sapiens; identical to SEQ ID NO: 117343

SEQ ID NO: 222577 - DNA, 1000 bp, Homo Sapiens; identical to SEQ ID NO: 117344

SEQ ID NO: 222578 - DNA, 1000 bp, Homo Sapiens
cgccgctcccagctgccgctccagatgctgctgctgccgccgcggccaccccaccctcggtcctcctctccggaggccatggacccaccgccccccaaggctccccctttccccaaggcggaaggcccctcctccactccttcctcggcggcggggccccgacccccgcggctgggccgccacctcctcatcgacgccaatggggtcccctacacatacacggtgcagctggaggaggagccccggggcccgccccagcgcgaggcgcccccaggagagcccggccctcgcaagggctacagctgcccggagtgcgcccgtgtctttgccagccctctgcggctgcagagccaccgcgtgtcgcactcggacctcaagcccttcacgtgcggcgcctgcggcaaggccttcaagcgctccagccacctgtcgcggcatcgcgccacgcaccgcgcccgcgccgggccgccgcacacctgcccgctctgcccacgccgcttccaggacgccgcggagctggcgcagcacgtgcgcctccactaagctcgagacccggcctgtgctgccctgcccgtctcagggccaccaagtctgacccacacagcgtcactcactcccacacacaccccctggctctgctgaggttactgccttaccctgggcctcagtttccccaccttccaaagggaggagcatcattccttccttaccccctttctagctgtgtgatgtagaccaaagtcgttgcccctccctgggcctgggaaccagtcggaactgggttccagtccagctgtgctgtgtgagcctgtgcaagtgacatgacctctctaaaccttggttttctgctctctggagcggtgaaccggtggttgtctgcggggaagagatgataaagagcacgggcacggtctggttcatttctgtatctaccccccttccgcccacgcccccgaccctttgctcaataaacattccgcactccaaaaaaaaaaaaaaa

SEQ ID NO: 222579 - DNA, 1000 bp, Homo Sapiens; identical to SEQ ID NO: 117345

SEQ ID NO: 222580 - DNA, 1000 bp, Homo Sapiens
tagctgaagtgtgttttctctggggacaaccaagtaggatttaattgttttgcttccttttttgggaacttagacccatcttgcgatgtcctaagtctccaagcatcttatttgacctgcttatacacatttgactaaatagctaaatatgaccacattgacgtggtaaagctttaacacttttgtccagattgaatcactccatctgctatcagttaagcagtggaaaactgttatggaaaagcaaacatgttttgatagatttaatgtgtaaagaaggtatccatactctggaatgctgctgatcaataaatgagctgcaagactttgttcgaaacaacactcaagcacaactgttttactttccataccaagtttggctgtgactgaatgaagaacatcagcattgatctttgctttgcacttgtacaagagactatttgcagagagccaaatatagcaacagaggatttaatatcttgccaaaaaatacaaaatctgttcccctttaagcatgacactctatcctttcttgtggatcttgctaaaaggaaaatatagctttaaactcccctattccttctgttgaaagcttaagaatctttttcaaatgagctatgtatggttttgtggtattttatgtttccaaaagaaaatggctacatgaaaaatctgtccagtgttatcatttttcttacaaaaaatacttctagttatggttgtattaattaatttgattgtgataatgattacacaatgtttacctatatcaaatcatcatatcgtataccttaaatatatataacttttatgtgtcaattataactcagtaagtctgggaaaatatcgttaagtcaaagattagagtcaacagaaataaagaaaaatcatactttgataacttcaggactaatcaaggatcaatgggtgacatgatatcatgctatgtgccattttgtgttaaacaaattacaccaacaataaaaaaaattggcttcaa

SEQ ID NO: 222581 - DNA, 1000 bp, Homo Sapiens
gatcctggaagaagaaaattcactagcagagtatcatagcagactagatgagacaatacaggccattgccaatggaaccttgaaccagccactgaccaaattggatagatcttctgaagagcctttgggagttctggtaaatcccaacatgtaccagtcccctccccagtgggttgaccacacaggtgcagcctcacagaagaaggctttccgttcttcaggatttggactagagttcaactcatttcagcaccagttgcgaatccaggatcaagaatttcaggaaggctttgatggtggctggtgcctctctgtacatcagccctgggcttctctgcttgtcagagggattaaaagggtggagggcagatcctggtacaccccccacagaggacgactttggatagcagccacagctaaaaaaccctcccctcaagaagtctcagaactccaggctacatatcgtcttcttcgtgggaaagatgtggaatttcctaatgactatccgtcaggttgtcttctgggctgtgtggacctaattgactgcttgtcccagaagcaatttaaggagcagtttccagacatcagtcaagagtctgattctccatttgttttcatctgcaaaaatcctcaggaaatggttgtgaagtttcctattaaaggaaatccaaaaatctggaaattggattccaagatccatcaaggagcaaagaaggggttaatgaagcagaataaagctgtctgacccaggagaaaaggaactatacagcatagtggagttttgtgtactaaaattgctatctactggtcctttggaattgaagtagtagaaacctaaaggcttggcgtcaggcttgaatatctcagaacttaaactcttaccaaaatctgtatatttttcttaaggagtgggattcctactttatgtaatggggtcgaaatctttgaacacattatttataaaaacctgtttaaaaattctaaaaaaaaaaaaaaaaaa

SEQ ID NO: 222582 - DNA, 1000 bp, Homo Sapiens
ttatactgaatataaaaacatttgtaagggctctcaaagattcacacatgcctatattatcataagaatttttcagcacttaactactttgttggcattgatcctagtgtctttaaatacttcatgagcattcataattaaaatttatcttaagttctatgaagagtattaatgtaactagcataagtggtttcttcaggaaaataaatatcacagtattatctgtgttaaaatggtttttgcctaaaatataatttttaatttggcttttcttatttaaaattccattatcttatgaataagcacttgaatcagtttttaaaatatttagtctaagatgattcaaagtagttttattttaatacaggacttttaaatggcagtatttcatttcttgtcaattatgttggtactttccacaaatctataaagaaggataaattgtaccatcattttattataatcctcaagagaaaatgtgtaattcaaaagattaatgtgtattaaaacacattatgtatcttagttacatttctatcagtacttttattaatatttgtgaaagaagacagcttaatagtagttagcttaagtagtttctccaagtacttttgtgctatcaatgagttcttctcaaaaaataattagttaggccaggcacaatggctcacacctgtaatgccagccctttgggaggccgaatgggcagatcacttgaggtcaggagtttgagaccagcctcgccaacatggtgagaccctgtctctactaaaacgataaaaaaaaaaaaaaaattagccaggcttggtggcacacgcctgtaatcccagctactcagatggctgaggcaggagaactacttgaacctgggaggtcaaagctgcagtcagccaagatcttgccactgtactccagcctgaagagcgagactctgtctcaataatataataatagttattatttaattgcaacatgaagttggaagccattttctgttact

SEQ ID NO: 222583 - DNA, 1000 bp, Homo Sapiens
agctacctattacaggtacagaaatagtaaagccatatacacctgtatctggttccttactctcagagttcaaggaaccagttcttcccaacaataaatacatctactttttgataaaaatctatcccactggactcttcacaccagagcttgatcgtcttcagattggagattttgtttctgtaagcagtcctgagggcaattttaaaatatccaagttccaagaattagaagatctctttttgttggcagctggaacaggcttcacaccaatggttaaaatactgaattatgctttgactgatatacccagtctcaggaaagtgaagctgatgttcttcaataaaacagaagatgatataatttggagaagccaattggagaaattagcatttaaagataaaagactggatgttgaatttgttctctcagcacctatttctgaatggaatggcaaacagggacatatttcaccagctcttctttctgaatttttgaaaagaaatttggacaaatccaaagttctcgtctgcatttgtggaccagtgccatttacagaacaaggagtaaggttgctgcatgatctcaacttttccaaaaatgagatccatagttttacagcataatgaagagctgtcattgtcctttattcaactagtttatctaaatttgtgattgcttagggttttttaagagaacatttttgtacataacaaaaggttaactagaatccagccttcagtttcttaaatgaaatcaaatgttccttcagtacaggtaacttcttggctttcttttgtaccacaacttattttactactgatatttgacctggaaagttaatcatggcaacaaatacatacaggattctttgttatgaatcacaaatttccttgccatttaaattatatcactgttctacaataagcacttgtgttttatgacatgataaagtaaatgatcacttcgatcatgtttccatgcaaaaaaaaaaaaaaaa

SEQ ID NO: 222584 - DNA, 1000 bp, Homo Sapiens
tgcatctttcatgtgtgtaaataattcatttctgggctaatttcaaaagaatcccaatattgctgtatagaaagagaactagcttgcacattttaggtctgtgaaattttgtgagacttttcctgcactggacagtaaaaaaataataaaagacaaaaacaaatttaaaaaaaaatttaagccacaaaaaaaggcacatagggaattatgtcaaatgtgtttgtgtccttaggcaaagctgtgggagtcttgaaatgtcacagtagtaaataacttattactttttgacaagttctttttttctgttggaacactgaattcttctgtgcatatgtacatatgaatacaaatcgaaggcctctacctcctggagttatacaacttggcttgtttacctccacatgctgatgatgactatttttttttttgagttcagtgtggagacttgaaacttgaatgtcccttccaacttttatattaaaaataaaaagacaagaaaattgaagatcatttttcacctgtacaaggaatactaatggatcgtcttaaaattggtctaggaaaaaaccttggtgtgtgttatggacaattaactgttaaagttattgtaagttatctgtatttagcagagtattttcaacttgagtgatctgagctgaatttgaagactattaataagttatgtttggaagttttaacttcaatgaagtaattatttgctgtgaaagaaacaaacattgaattactaaacaaagatggtgcaatatctttgttttttttttatgaggctcctgagaatcaacccaactgaagcatttcaattcacttgaatgagaaacgtgtttagtatcaaaagagcccaagaagacactggtgtgaaaggtacaatctcagaggttggtcaattaccgtggcacactttctggtcactttgtacaatgtagatttgaagtacagtggtgaaaacattaaatgtgacatttgaaaaaaaaaaaaaaaa

SEQ ID NO: 222585 - DNA, 1000 bp, Homo Sapiens
tggagtgtcatgcctcacctgcaacccatgtggttctcagacttgaatcttctcggcccccaaaaatgaaggacctcatttcttatagcctctcctgtgattcaacacaacccatggagatgtccccttctcactctgaaatcatccatttggggacaaatccacattggggtctagaaacatccacgtatctcatcagccatcttgtcctgtgcatcctaacagaggaaggatccatgattctgctttggtccaattgcttcctctctgcagaggaacaaccccaaaaccagaccactccacgcaggacaggcaggagagattcttcctaaagcctcccccataaaaagggagctgtggatccacttagatcagggcggaaccatctttcacccggccaagctcctgcccagatgttgaccctcacccagcgtgagctttcacatagtaggagcttctagatgcatgtggaagcaatgagagttgtcccttagccttataaactccccatgatctgacatgcagaaatccagccttgtccagaatcctcctggaattgcttggaggacgaaagtatgctgggggatgggtgggtactagggagactgggtacaagggtgaaaagtagttcccataatacacatggttgactatggtgatccaccttgtgatggttaatattaggtgtctggagaaggttgcttcattggccctgggacttctctctgcaggaggagagaacgctgcctctcctctggattggtctcaggctctctgttggcctttggtcagcgtttccacatcctgctctgctgcaggagagggggctaaggggctggatccaccaaggcagctcacagcgggaaaactctgggactgaaccactgaattcaggggatgggggtgggggcccggttctcgaggtgtgtgccagctacacgtgtgttctgtatgggtccagctgcgtttccatcactcgctaataaatcaacagaaacac

SEQ ID NO: 222586 - DNA, 1000 bp, Homo Sapiens
gccccaaggaaacctttgcgggtggggcgttactgccaaaactccagaggcaaagtggacctggcaaccacaagaccctccccataagcaggggaccagcatacccgggagctgtccctgtctgtcacagcacagtggggccacgaggctgacattctctggccttgcacacagtgccccctgagaagttcaacatttatttcttcacgtgtccagaaaattcctcaattcatccttgcctctgcccttcaggagcagcctggaaggaatccaagcaggagtttcatctgcatgggggcactctgcaggccctggaacattgggcctgagtggagatgggagacagaggcaggccagaaggttctctctgcacagctgcctcccttgctctccctgaggctggcctgccccattccccaagggggctcctctggagtggtggggaggattaggctgcagaagggccaaccccttgcaacagggcagctctcgcctcccgcacacggctctcctgatcacagctgcatgccgaccttgtcccaccgggacccacaatggcccgagccctctttgcatgggcagccagctggactaggagtgggaagggcctggacactcacagaggccccctctgtcatcactccttggcacccaccaacttcctgcacacactggcagagaggggcgctgggaaatcaccccacagggtggaggtctcctgttggctacactctaaagctgctttgccttcatgttcaaacagattcaggcaccaccccctccaccgcccgcaaggttagggcatagagttgtctccttcccaacacggacccagagagcagcccttccctgctcaaagcctttccgcaccctcctgactgtcctggatgtgcaactggtttgcactgcacaccccacggccatgtaactctcctgtccacatatgataataccattctgcatagtattactgactcagtaaagagctatttccaggagt

SEQ ID NO: 222587 - DNA, 1000 bp, Homo Sapiens
aactcagagttcaattaaaacaacagaaataccaggtagtgttctacaaccagatgcatcaccttctaaaactggtacattaacctcaataccagttacaattccagaaaacacctcacagtctcaagtaataggcactgagggtggaaaaaatgcaagcacttcagcaaccagccggtcttattccagtattattttgccggtggttattgctttgattgtaataacactttcagtatttgttctggtgggtttgtaccgaatgtgctggaaggcagatccgggcacaccagaaaatggaaatgatcaacctcagtctgataaagagagcgtgaagcttcttaccgttaagacaatttctcatgagtctggtgagcactctgcacaaggaaaaaccaagaactgacagcttgaggaattctctccacacctaggcaataattacgcttaatctccagcttctatgcaccaagcgtggaaaaggagaaagtcctgcagaatcaatcccgacttccatacctgctgctggactgtaccagacgtctgtcccagtaaagtgatgtccagctgacatgcaataatttgatggaatcaaaaagaaccccggggctctcctgttctctcacatttaaaaattccattactccatttacaggagcgttcctaggaaaaggaattttaggaggagaatttgtgagcagtgaatctgacagcccaggaggtgggctcgctgataggcatgactttccttaatgtttaaagttttccgggccaagaatttttatccatgaagactttcctacttttctcggtgttcttatattacctactgttagtatttattgtttaccactatgttaatgcagggaaaagttgcacgtgtattattaaatattaggtagaaatcataccatgctactttgtacatataagtattttattcctgctttcgtgttacttttaataaataactactgtactcaatactctaaaaaaaaaa

SEQ ID NO: 222588 - DNA, 1000 bp, Homo Sapiens
cgaggcaagcactgtgaggaatttgtgtctgagcccgtgatcataggcatcactattgcctccgtggttggacttcttgtcatcttttctgctatcatctacttcttcatcaggactcttcaagcacaccatgacaggagtgaaagagagagtcccttcagtggctccagcaggcagcctgacagcctctcatctattgagaatgctgtgaagtacaaccccgtgtatgaaagtcacagggctggatgtgagaagtatgagggaccctatcctcagcatcccttctacagctctgctagcggagacgtgattggtgggctgagcagagaagaaatcagacagatgtatgagagcagtgagctttccagagaggaaattcaagagagaatgagagttttggaactgtatgccaatgatcctgagtttgcagcttttgtgagagagcaacaagtggaagaggtttaaccaaaactcctgttctgaaactgattagaagcctggagaagatggagattacttgttacttatgtcatataattaacctggattttaaacactgttggaagaagagttttctatgaaaaaattaaatatagggcacactgtttttttttcagcttaagttttcagaatgtagtaagagatgttaccatttttatttctataaagactgaatgctgtgtttaaataaattgaaaactacgtaaactctggaaagtattctataagaaaaagctggacctaggatttagggctgcagttgctgtctgcttctgaatcactgggggtgtctcctaagaactgtgcctcgggtttttcaataggaaaataaggtgagactcttacatggagaagtctggcttagtaagggaatattttggagcatatttgttattgttgggtagaaggggaaacctttgaaatagtcttaatggatagtttataatcaggcattcatctaaataaaattctttcttttttttgatcaaaaaaaaaaaaa

SEQ ID NO: 222589 - DNA, 1000 bp, Homo Sapiens; identical to SEQ ID NO: 117352

SEQ ID NO: 222590 - DNA, 1000 bp, Homo Sapiens
caccatcatcgtcactaagagaaacatgcctacccatgaaggcgtgtttgattactccaggcttctggacacacatacccatgggtgatttttgctcctcaggcccaatattctcagacagcccagcagtgtgaacacacaatgccaggccaggaactgggaccaccatcttgctgatggaaggaacaacaggtggcccaggacatgctcctgcatactcctgggtgtcccagggactgtgtgctcaggagcactgtggtagagcactggccctgccttgagaagagacacaggtctcccgtccctgcaccagctgagagagacttgccacaaagcacaaggctggcagagatttatgtatgacttgcacagacacaaaaatatacagacaatcaaaacattgatatattcaaactctcctttaaattccaatcttattgcaacaactctgtgaattgcaaggtcccagaatctgccttctcacatactctaccctcattcatccttttgggctaattgatgagcatcttatttcttatctctaaaaattatcagcaaaggctacttcagatggccactttagtcctttcagctgtagtcaggattatttaacttacctgtatatcaaaagtgaagaaaaagttagttcataagtaaaggcactaaatcctttcctgacaatggcagagtctctagaggtagaaatttgccttgctgcagagagagaaggaatggcgtgggatgggggaaagaaaagaaagagaagaagctggggtctccaggcagggtagtaagctgacactaaatattttttacacaaaaatgtattgaagcaacaaatatttcctgaagatccaccctgggtgaggctttgagctgactttagagatcactgtggggtcaagaatgtcttacatgttttattcatcattcttgaaaaaagaaataattcaaaccttggaattaaaaagtcagaaaaataaaaaaaaaaaaaaaaaaa

SEQ ID NO: 222591 - DNA, 1000 bp, Homo Sapiens
ggacactcaggaagtgcctctggaaaaggctaagcaggtgttgaaaattatagccagctacaagcacaccacttccatttttgatgacttctcacactatgagaaacgccaaagaggaagaagaaagtgttaaaaaggaacgtcaaggtcgtgggaaataaaaggcagttctacacagactgcagcaacggttgcatctgcatatcctaagaggaaaaaatgaccttcaagagaattaggacttttttcttaatttcactgacttcagagacgattgcagacttgcagtttaagtattggaatttcacaaaagacataggacttaactggaaaatgaaaagaaaagaaaaagaaaaaactaaacaaaaaatccctctaggtagtttaggtgaaaaatgtcccttttattttggctttggttgtgatttcagagcataatgctatgttttttgtctttttactatgtttttcggatttttaagtccgtaagtgcatacagttttctctaatttttaaaccctttcctcctcccatttggacatttgcacttggagaacacttgagttgtgaaggttttgggcatccaccccagaaagtgggaatttgattttatccttccgaactggaagaacatttttatgaagaatttttgtctaggagaatataacagtgttacccaaggttgtgtctttaagggtggttcattttctctgaccttttgttactcaaagtaaagtactaggagtcctaagaaatgttctgttcttgtacattatactgattaagtcaggattaatttgatttcaaagctgagaacagtggtaaaaactcgtttacagaaatgcattttggaagagaaaaatactgtaaaacgtgtcgtgaatgtttcttcagtttcttgttcagccaatgaggaaagggcattgcctttctttttaccattaatcacttctcaataaacgtgagatcctgttgagcatcaaaaaaaaaaaaaaaaaaa

SEQ ID NO: 222592 - DNA, 1000 bp, Homo Sapiens
aaggccagtggggccatcgcttcctggggcgaccctggcagtggttgggagacgcccagatggagggggaggctgaccaagggccccgcagggcgggctgcaacttttctgttgatcctggaatgtagctggtgcagtgagagggaaagagaattgaaaaactcaggctgccataggttctgcgatgagaggtgcaggaggcaggagcctggcccagggggtgctggtgcctccccggggtctgggcggagagaacaggaggaatggctgggaagtggctgagggagccaggaggccggggggccgggggctgcaggggaggctgtgggggtcctggcagccaggaggccccaggtggttttgaggctcgctcttgcgcggtgcctgagaagagggtgaaggagctggggcaggccccatcctgggcattggagatgatgaaaccgagcagacctggcccatgtggagctggcatgggggacacagcccagagacagagaagcttatgaggaagtgaggaggtggcgtcacaagggtggggagggggccttggggaagggcggccttggatcagaggctcaccacaagcctggcatttcagccagggctggagaaggcagggacgcctgggtgagaggcaaagggcacagccatgcaaaggccctggggcaggacggcacctggtatgcgggaggaacagagtgaggagaggagggcagggcgtgcagggccttgtgggcctcagggaggacttgggcacctaccccgagggagtggagctcctgggtgcgtgtccagatgggaaaggcagggtcgtatctgtggggacctgacaagggcaggggaagcggagaccagggtgcaggctccgcccccacccaaggccgggcccagccagaggaggggcagggcagggcaggaggtttctggatgtttgttgggtttggtttggttttgttttgttttgtttattgtggtaaaatacaaaatctaccgtctt

SEQ ID NO: 222593 - DNA, 1000 bp, Homo Sapiens
tgccgcaagtctactctcacgacccacctgaggacccacacaggagagaaaccgtatgaatgtaatgagtgtggaaaattcttctctcggttgtcatatctcactgtacattatagaactcattcaggagagaaaccctatgaatgtaatgaatgtggaaaaaccttctacctgaattcagccctcatgagacatcagagagtgcacacaggagagaaaccttacgaatgtaatgaatgtggaaagttattctcccagttgtcatacctcactatccatcatagaactcattcaggagtaaaaccctatgaatgtagtgaatgtgggaaaaccttctaccagaactcagccctttgtagacatcggagaatacacaaaggagagaagccctatgaatgctatatatgtggaaaattcttctctcagatgtcatacctcactatacatcatagaattcattcaggagagaagccctatgaatgtagtgaatgtgggaaaaccttctgccagaattcagcccttaatcgacatcagagaacacacacaggagagaaagcctacgaatgttatgaatgtgggaagtgcttctctcagatgtcctatctcactatacatcatcgaattcattcaggagagaaaccctttgaatgtaatgagtgtggaaaagccttctctcggatgtcatacctcactgtacattatagaactcattcaggagagaaaccctatgagtgtactgaatgtggaaaaaaattctaccacaaatcagcattcaacagccatcagagaattcataggagaggcaatatgaatgtaatagatgtgggaaggcttctctgaagtcagacctcattttatatcagagaaccctttcagtatagtgaatcagaaactcctgcctgaagtcaaacaccttgtacatcagagagttcacacaggttagtgtggacatccccttgtgtgttggactcataatctgaagactcacagaatggaaacc

SEQ ID NO: 222594 - DNA, 1000 bp, Homo Sapiens
ggaatggaattcccggtgtgtccttttcacctacttccaaggggacatcagcagcgtagtggatgaacacttctccagagctctgagcaatatcaagagcccccaggaattgaccccctcgagtcagagtgaaggtgtgatgctgaaaaacgatgatagcatgtctccaaatcagtggcgttactcgtctccatggacaaagccacaaccagaagtacctgtcacaaaccgtgccgccaactgcaacttgcatgtgcctggtcccatggctgtgaatcagttctcaccgtccctggctaggagggcctctgttcggcctggggagctgtggcatttctcctccctggcgggcaccagctccttagagcctggctactctcatcccttccccgctcggcacctggttccagagccccagcctgatgggaaacgtgagcctctcctaagtctcctccagcaagacagatgcctagcccgtcctcaggaatctgccgccagggagaatggcaaccctggccagatagctggaagcacagggttgctcttcaacctgcctcccggctcagttcactataagaaactatatgtatctcgtggatctgccagtaccagccttccaaatgaaactctttcagagttagagacacctgggaaatactcacttacaccaccaaaccactggggccacccacatcgatacctgcagcatctttagtcaagttggaggagaaagacaacacttggtctaagacacggcagcaagacatccctgcatattgttccagataaaaatgaaagctgctcacacccacttgcctccccaatctgttaaacagcttcgtgtctagtatgagctcagtacttgccctgtgaaaatcccagaagcccccgctgtcaatgttccccatccacaccctgcttgctcctgtgtaacagctcagatgatgaataataataaaactgtacttttttggatggtgaaaaaaaaaaaaaaaaaaaa

SEQ ID NO: 222595 - DNA, 1000 bp, Homo Sapiens
cccagtctgggccaccctttgtttccctcatcctcggctcccacacaggtgacagacccagcagatagcttctctctgggaaaggttggatgctgccttacatccccttctagccctcctcccatccacacacacaggcacccacccacaccaggtcggcttgtttctcacatgtagggagagaggggagaccaacccctttgtgtcttttgaaatacgaagaaaaatgtgtgttcaggagcatgactccagtgctgcgctcttgggcccagttcagtctgtcttgtctcaaatctaggcatttttgcttcaattttattttttttaagaatacaaaaacagaaatctgcactaatttacctggtttcgtaggaaaacttttttttattttttacattttttggtgtccgtttgtattgaataatttgctacatttgtaaaatgtaagaggtatataatatatgtatatttctaacgtaaaaaacataatttttttcttttcaagattttttcttaaaaagatgagagaaacatattttttcaggaaaaacaaactttaaaaaaaaaagaggagaaataaaaccttttctcccctttccccatcctctatctatccctctttcccaggaacaaatcaaaaggtggattatcttctgaagaatggaaactgttagtccagaatgatgtgtttttctcaatgcagtgagttatagattctctagttttctccctagggatgggaagggggcattgaggcaagcctggagaggagcccggggagcagggtcatgaacttttttctttagtgaaggaggaatacaatcaagggttttgtattcagaatgttgtgcaatattttggaatgggacattggtgtgtttagagattttagtttaaaaacaaaacaaaaagattgatcaaatctgtacagtttctattgttccagatttttttaagtttgtattaaaagcatgatacataatagccttcaaaaaaaaaa

SEQ ID NO: 222596 - DNA, 1000 bp, Homo Sapiens
tcagtgctggccaaaacctggccgtctcttctattcacagtacacgtcacagtattgatgtgattcaaaatgtttcagtgaaaactttggagacagttttaacaaaaccaataaaccaacaacaaaaaaagtggatgtatattgctttaagcaatcactcattaccaccaatctgtgaaagtaaagcaaaaaataataataataaatgccaagggggagagagacacaatatccgcagccttacaccttaactagctgctgcattattttattttattttatttttttggtatttattcatcaggaataaaaaaaacaaagttttattaaagattgaaaatttgatacattttacagaaactaattgtgatgtacatatcagtggtgacatattattacttttttggggacgggggtgggtggggtgaagagatcttgtgattttagactgctgcagagttaacttgtctcagcatatctgatgtatcataatcatttctgctgtgcagaggagggatacacttaggggctcacagatcccagtagcacaattgggctttggcaaatgggtattttgtgtatagaggaatttaaggagaggtattacttattttcatattgtattttaactgtttctcggatcaaattttttaacttcttcttcgtgttcttccccacctccttccttttccagttcagtatttggagttcaacactgtctctcaatcagatcatctggatctttttctttatctcccttccccttcctaagtcccatttcttggtcataaatattgcattattcacactttcaaactgtgtattttcttacaataaaaaatgatgaaaaaaaaaaaggctttacttcttttgcatgcactttaaaaacaaaacaaaacatttttcaggttccaaggaagagcatgataactgtcagagcttttaattatatttgtaaataaaagtgttcatcacaaaaaaaaaaaaaaaaaaaaaaaaa

SEQ ID NO: 222597 - DNA, 1000 bp, Homo Sapiens
tctcatccagtaaccaggtatcctgcccgctatgtgaccaatgctttccacccacaaagattgaacgacatgccatgtactgcaatggtctgatggaggaagatacagtattgactcggagacaaaaagaggccaagaccaagagtgacagtgggacagctgcccagacttctctagacattgacaagaatgagaagtgttacctctgtaaatccctggtcccatttagagagtatcagtgtcatgtggactcctgtctccagcttgcaaaggctgaccaaggagatggacctgaagggagtggaagagcatgttcaactgtggaggggaagtggcagcagaggctgaagaacccaaaggaaaaaggccacagtgaaggccgactccttagtttcttggaacagtctgagcacaagacttcagatgcagacatcaagtcttcagaaacaggagccttcagggtgccttcaccagggatggaagaggcaggctgcagcagagagatgcagagttctttcacacgtcgtgacttaaatgaatctcccgtcaagtcttttgtttccatttcagaagccacagattgcttagtggactttaaaaagcaagttactgtccagccaggtagtcggacacggaccaaagctggcagaggaagaaggagaaaattctgaatttctagggtccaaaagttgacaaaaccattagtaggaggggtgggccatgttcattaagccatagtggtccctagttcattgttgagcaagttttagccctgcagttttcaccaccagcacctacccagcattctggtttttatgttttttatgatctatgcagacaactgtgtattctgttttataacagtttgtttgaatttacttacagttaaaaaatttaaatatatttatgtttgtacgaaatcttatttcaatagatggaaattttaataaaaaaaaaaaaaaaaaaaaaaaaacaaaaaagaaaaaaaaaaaaaaaaaaa

SEQ ID NO: 222598 - DNA, 1000 bp, Homo Sapiens; identical to SEQ ID NO: 117357

SEQ ID NO: 222599 - DNA, 796 bp, Homo Sapiens
gggagctgccgggagttggagcctgcggagttcgagaccatgctgctgttctgccccggctgcgggaacgggctgatcgtggaggagggacaacgctgccaccgcttcgcctgcaacacgtgcccctacgtgcacaacatcacccgcaaggtaacaaatcggaagtacccaaaactgaaagaagtggatgatgtgcttggtggagcagctgcctgggagaatgttgactctactgcagagtcgtgtcccaaatgcgaacatcctcgtgcttacttcatgcagcttcagacccgctctgcagatgagccgatgaccaccttctacaagtgctgcaatgctcagtgtggacaccgctggagggattagggccaggatggcccagctgccctagtgtgtgcttgccttgtccctcggggtagatgcttagctggcagtatgagttgtgtgtcctgagggtctttgctagtgtggtggaaagataaaccttttgaggtgaagagccagggggtcaggaaatatggcctatctgccaggcagggtggatgaagtcatgaatgtctgggagtttttctgtgtggggaggagacagagacccataactaaatatgctctgtgtaaagtcctattctttcatcttccactttattggcagttgacattcccttactcccaatcaacactcttaaatatttgtactgtttgtaaaacttagtacatgtccctaaatatttaactgttacttgtaaacttgtgtaatttattatttattttaatcaaaattctgaatatttcattt

SEQ ID NO: 222600 - DNA, 1000 bp, Homo Sapiens
tttggtgcctccccttggacctgccccccctgggctgttcccaccagctcccttgccaaaccctggggttttaagtgccccacccaacttgattcagcgacccaaggcggatgatacaagtgcagccaccattgagaagaaagccacagcaaccatcagtgccaagccacagatcactaatcccaaggcagagattactcgatttgtgcccactgcactgagagtacgtcgggagaataaaggggctactgctgctccccaaagaaagtcagaggatgattctgctgtgcctcttgccaaagcagcacccaaatctggtccttctgttcctgtctcagtacaaactaaggatgatgtctatgaggctttcatgaaagagatggaagggctactgtgacagcttttgatgccagaaaaggcttctgttcacaacagtggcccatggagaaagaggctcttattaaacttagatgaaagagctgcttccattgtcagggtattttctaatttcagttcaaggaatatcctaaaatttagccttgttcagaatttactgcacataaaaaagggtatttcatccagaatagatcagttattgaagcagtgctgctaacatccattccctttcataccaccattttcaccctgtttcttcccctcctccagttctttggaaatttgtgatcgggggatcttagttgcttatttgttttgactcttgtgtgctgtgggcactggagtagagatttctggagaaaaaaaaacagtttatttcatcttgccttttgtgtttgagttatttttaatattttcctgtaaatattttgtaatattttacttgtaatgaaatggatcacaatgtcatttcctaatacaaggcaggatatgtgggaagaatatgtacaattatttgattaaaattatttcccactgacctaaactttcagtgatttgtgggaaaaataaataaatgttctacaccaaaaaaaaaaaaaaaaaa

SEQ ID NO: 222601 - DNA, 1000 bp, Homo Sapiens
tttgtgatgccctcttggttttgatactttaaaatctgtggcacccgttctacatgaattatcaatatttggtaaattcaatctgtatttgttttgttaaagtcaaaaatctcattttccaaaaaaaaaaaaaaaacccagttactgctcagtttagtcttgaacatgagcaataaaattctcttgcatttcattattgatgtgctgatgaacctggacttttaaaaatatttgtttcctatacctttaccctttacctaacagactaatttgtactcagtaaaacaaaaatttatggtcaaaatttctaacttggttcatcacattataagataaataaattaaattaatgaaaatgtgacttagagtaggggtagccctcaaaaatagatttatcatttactcattggaattttcttcaagtgttaaaggtacattttcactaggaaaagaaatcaaatatgcttatgcaatatatatttgtgtgtttttccttaatgttatatggtatatatgagccttcttgtttagtttcttttatctgctaagttgtaccttaattagagggcaatatatgtttcataaagaagagtctttataattttgtttgtcagatagtattttggaatttgtataataaggatgtttagaagccatataagtggctttttttaacagatagaatttgtatttttattgtactttaaaaagatttatgtaataggtatatatttagtggccatttattatcaatggtaacacaatggagtactaagatggtatttgcacatttaagatatgttactttaccaatttttaatggtaatcaactctgctactggcatgatgaaatagtacataactggtcattaattatgaacatttatttctccagtgcgtttttatgaagatctggttgaaaattgtatttctatgtaaactcaacgatatgtttggttttcctgaaaataaatgattttaaataaaaaaaaaaaaaaaa

SEQ ID NO: 222602 - DNA, 1000 bp, Homo Sapiens
gggaaccagctcctggcaccaaccagcgccagcccagcaagaaagcctcaaagggcaaggggctccgagggagcgccaagatttggtccaagtcgaattgaaagaactgtcgtttcctccctggggatgtggggtcccagctgcctgcctgcctcttaggagtcctcagagagccttctgtgcccctggccagctgataatcctaggttcatgacccttcacctcccctaaccccaaacatagatcacaccttctctagggaggagtcaaatgtaggtcatgtttttgttggtactttctgttttttgtgacttcatgtgttccattgctccccgctgccatgctctctcccttgtttccttaagagctcagcatctgtccctgttcattacatgtcattgagtaggtgggtagccctgatgggggtcgctctgtctggagcataacccacaggcgttttttctgccaccccatccctgcatgcctgatccccagttcctataccctacccctgacctattgagcagcctctgaagagccatagggcccccacctttactcacaccctgagaattctgggagccagtctgccatgccaggagtcactggacatgttcatcctagaatcctgtcacactacagtcatttcttttcctctctctggcccttgggtcctgggaatgctgctgcttcaaccccagagcctaagaatggcagccgtttcttaacatgttgagagatgattctttcttggccctggccatctcgggaagcttgatggcaatcctggaagggtttaatctccttttgtgagtttggtggggaagggaagggtatatagattgtattaaaaaaaaaaaggtatatatgcatatatctatatataatatgacgcagaaataaatctatgagaaatctatctacaaaaaaaaaaaaaaaaaaaaaaaaaaaaaaaaaaaaaaaaaaaaaaaaaaaaaaaaaaaaaaaaaaaaaaaaaaaa

SEQ ID NO: 222603 - DNA, 1000 bp, Homo Sapiens
tggaccaaatgccatcattggaagacttgaaagaactcagtcctgatttgggaaagaatttgcaaacacttctggatgatgaaggtgataactttgaggaagtattttacatccattttaatgtgcactgggacagaaacgacacaaacttaattcctaatggaagtagcataactgtcaaccagactaacaagagagactatgtttctaagtatatcaattacattttcaacgactctgtaaaggcggtttatgaagaatttcggagaggattttataaaatgtgcgacgaagacattatcaaattattccaccccgaagaactgaaggatgtgattgttggaaatacagattatgattggaaaacatttgaaaagaatgcacgttatgaaccaggatataacagttcacatcccaccatagtgatgttttggaaggctttccacaaattgactctggaagaaaagaaaaaattccttgtatttcttacaggaactgacagactacaaatgaaagatttaaataatatgaaaataacattttgctgtcctgaaagttggaatgaaagagaccctataagagcactgacatgtttcagtgtcctcttcctccctaaatattctacaatggaaacagttgaagaagcgcttcaagaagccatcaacaacaacagaggatttggctgaccagcttgcttgtccaacagccttattttgttgttgttatcgttgttgttgttgttgttgttgttgtttctctactttgttttgttttaggcttttagcagcctgaagccatggtttttcatttctgtctctagtgataagcaggaaagagggatgaagaagagggtttactggccggttagaacccgtgactgtattctctcccttggatacccctatgcctacatcatattccttacctcttttgggaaatatttttcaaaaataaaataaccgaaaaactaaaaaaagaaaaaaaaaaaaaaaaaaaaaaa

SEQ ID NO: 222604 - DNA, 1000 bp, Homo Sapiens
gacagggctttcaagaaaattatgacgcgaggctctcacggatcgacatcgccaacacactaagggagcaggtccaggaccttttcaataagaaatacggggaagccttgggcatcaagtacccggtccaggtcccctacaagcggatcaagagtaaccccggctccgtgatcatcgaggggctgcccccaggaatcccgttccgaaagccctgtaccttcggctcccagaacctggagaggattcttgctgtggctgacaagatcaagttcacagtcaccaggcctttccaaggactcatcccaaagcctgatgaagatgacgccaacagactcggggagaaggtgatcctgcgggagcaggtgaaggaactcttcaacgagaaatacggtgaggccctgggcctgaaccggccggtgctggtcccttataaactaatccgggacagcccagacgccgtggaggtcacgggtctgcctgatgacatccccttccggaaccccaacacgtacgacatccaccggctggagaagatcctgaaggcccgagagcatgtccgcatggtcatcattaaccagctccaaccctttgcagaaatctgcaatgatgccaaggtgccagccaaagacagcagcattcccaagcgcaagagaaagcgggtctcggaaggaaattccgtctcctcttcctcctcgtcttcctcttcctcgtcctctaacccggattcagtggcatcggccaaccagatctcactcgtgcaatggccaatgtacatggtggactatgccggcctgaacgtgcagctcccgggacctcttaattactagacctcagtactgaatcaggacctcactcagaaagactaaaggaaatgtaatttatgtacaaaatgtatattcggatatgtatcgatgccttttagtttttccaatgatttttacactatattcctgccaccaaggcctttttaaataagtaaaaaaaaaaaaaaaaaaaaaaa

SEQ ID NO: 222605 - DNA, 1000 bp, Homo Sapiens
agtaacttttttaaattataaaattttattggcattgctccattttctgtatataaatatatctttaatgtggtattttcaattgcgtgatagtttgtagtttcaaccactcttggtgactgtcatcctgtttcttccatattctctgatttcatgaattgaaaagaaacaaatgtattgaagaagtgagctacagttttccttccttaaccatgggtgctagtaactttttaaaactcaagacaagattagttttttatgtgtgaagtcattaaattattacacgaccagaactaaaatgcaatatacagttaagtccacggatactcccattaatgagaaataacactaggaagccactattacaggaagaaaagatttggttttcatggcagtctgtttttttaaaaaaaaatttttgagccactatctattgttgaatattttaagatgggatgagggaggaactaataagggcttacacaataaaaaataactatatcataactcattcataacttgatgtttcattttctgttgaggaaccataaattcattcacagacttaatatttttttcttagagatggtctcgttctgttgtccaggatggagtgcagtggttgatcatagctcccgggccgtagtctcccaggctcgagcaatcctcccacttcaccctcctgcatagctaggactacaggcatgtggcaccatgcccgctaagtttttaaatttcttgtagagatgagatctcgctatgttgcccaggccagtctcaaactcctggactcaagcaatcctcccaccttggccttccaaatcactgggattataggcatgagccattatgcctgactcttgcccaaatttctgatgtcaaattgttcattgacagaaaacccactgaagtatttaaagttaggaagatctgggagataggggttgctggcatgaaaatgtataacttacaacatttattaataaaatgataaattagc

SEQ ID NO: 222606 - DNA, 1000 bp, Homo Sapiens
caaagaggtgatcttgagctcagaggaggagagtttctttgtccaagtgcatgatgtttctccagagcaacctcgaacagtcatcaaagcaccccgcgtcagcactgcacaggatgtcattcagcagaccttatgcaaagccaaatattcctacagcatcctgagcaaccccaatccaagcgactatgtgcttttggaagaggtggtgaaagacactaccaacaagaagactaccacaccaaagtcctctcagcgggtccttctggatcaggagtgtgtgtttcaagcccaaagcaagtggaaaggtgcaggaaaattcatccttaagctaaaggagcaggtgcaggcatctcgagaagataaaaagaaaggcatttctttcgcaagtgaactcaagaagctcaccaagtcaactaaacagccccgaggacttacatcaccttctcagctcttgacctcagaaagtatccaaaccaaggaggagaaacctgtgggtggcttgtctccagtgacacaatggattaccgacagtgactaagggcagcatgtttaacccaggtggagatctttaagcaagaagttaaagagtgaacatggtggaaaaaatataattattttcatcagacttaaactggaaattgatgatttctgaactgaagccttcacacatgtgagatccatgctgaggagaagcaaaatggcacagggctagttgccaccaaccaatttactgatgaatgaagcccaggggactgccattttataaatgtcagcagttggaaaaatcgtcacgaattgacttagagcaagggtcagcaagcttgtctgtaaagggccaaacagtaaatattttagggctgggggccataaaatatgttgcaaccacccaattctgccattgtagtgcaaaagcagccatagacaacacatacatgaacgaacgtggctgtattccaataaaactttatttatggacactgaaaaaaaaaaaaaaaaaaaa

SEQ ID NO: 222607 - DNA, 830 bp, Homo Sapiens
ctggactcagtgacttcagacacagaagtctgtccatggctccttatcacatccgcaaataccaggagagcgaccgcaagtcggtcgtgggcttgctctccggggggatggccgaacacgccccagccaccttccggcgattactgaagctgcctcgaaccctcatactcttacttgggggggcccttgccctactcctggtctctggctcctggattctggccctcgtgttcagcctcagcctccttcctgccctgtggttccttgccaaaaaaccctggacgcggtatgtagacatagcattgcgcacagacatgtctgacatcaccaaatcctacctgagtgagtgtggctcctgcttctgggtggctgaatctgaagagaaggtggtgggcacagtaggagctctgcccgttgatgatcccaccttgagggagaagcggttgcagctgtttcatctctctgtggacaatgagcaccgtggtcaggggatagcaaaagccctggtcaggactgtcctccagtttgcccgggaccagggctacagtgaagttgtcctggacaccagcaacatccagctctctgccatgggcctctaccagagcttgggcttcaagaagacgggccagtccttcttccacgtgtgggccaggctggtggatcttcatacagttcatttcatctatcacctcccttctgctcaggcagggcgtctatgatttctttccttctgtattggtcagaatagaatccattcggctgtagcagcaagcaatccccaacctctgactgcaatgacctttctgtgcaataaaagcttattgtccatt

SEQ ID NO: 222608 - DNA, 1000 bp, Homo Sapiens
gcgtggggttataaaaactatcgagaacagaggtcaaatgggctctctcattcttggagtgaaaggattccagacacaaaacatatttcagacatctgtgaaaatgggcgacctcgaagtaactcttggcaaggtaacctgggaggcaacaaaaagaaaatcagaggcaaaagatttagacctcggtctaattcaactgagactttatctcctgccaagtctccttcttcatcaactgggtctattgcctccagcagaaaatacccttacccaatgcctccacttcctgatgaggacaagaaagtgaaccgacaaagtgccaggctatgggagacatccatttaagatcaactgtttacatgtgatacatcgaaaactgtttacttcaacttttatagaaacccaggctcatggaatcactgcaaatctatctgctcttcagacaatacgaagaccctctgagatgctacagaggagaggaagcggagtttcacatctggttaccattttctttttgtcattggcttaggatttaactaaccatgaaaagaactactgaaatattacactataacatggaacaataaaggtactggtatgttaatggataatccgcatgacagataatatgtagaaatattcataaagttaactcacatgacccaaatgtagcaagtttcctaaggtacaatagtggattcagaacttgacgttctgaggcacatcctcactgtaaacagtaatgctatatgcatgaagcttctgtttattgttttccatatttaaggaaacaacatcccataatagaaatgagcatgcagggctaaggcatataggatttttctgcaggactttaaagctttgaaaggccaatatcccataggctaactttaaacatgtatttttatttttgttttgttttttacttttcatatttatattagcatacaaggacaattgtatatatgtaacatttttaaaattttaaaaaaaaaaaaaa

SEQ ID NO: 222609 - DNA, 1000 bp, Homo Sapiens
atcagtgaaggtctctccctccctcctctcctgtttttttttttttgagacagagttttgctcttgttgcccaggctggagtgtgatggctcgatcttggctcaccacaacctctgcctcctgggttcaagcaattctcctgcctcagcctcttgagtagcttggtttataggcgcatgccaccatgcctggctaattttgtgtttttagtagagacagggtttctccatgttggtcaggctggtctcaaactcccaacctcaggtgatctgccctccttggcctcccagagtgctgggattacaggtgtgagccactgtgccgggcccgtcccctccttttttaggcctgaatacaaagtagaagatcactttccttcactgtgctgagaatttctagatactacagttcttactcctctcttccctttgttattcagtgtgaccaggatggcgggaggggatctgtgtcactgtaggtactgtgcccaggaaggctgggtgaagtgaccatctaaattgcaggatggtgaaattatccccatctgtcctaatgggcttacctcctctttgccttttgaactcacttcaaagatctaggcctcatcttacaggtcctaaatcactcatctggcctggataatctcactgccctggcacattcccatttgtgctgtggtgtatcctgtgtttccttgtcctggtttgtgtgtgtgtgtgtgtgtgtgtgtgtgtgtgtgtgtgtgtttgtgtgtgtgtgtctgtctattttgtatcctggaccacaagttcctaagtagagcaagaattcatcaaccagctgcctcttgtttcatttcacctcagcacgtaccatctgtccttttgttgttgttttgtttttgtttttttgcttttaccaaacatgtctgtaaatcttaacctcctgcctaggatttgtacagcatctggtgtgtgcttataagccaataaatattcaatgtgaaaaaaaaaaaaaaaaa

SEQ ID NO: 222610 - DNA, 1000 bp, Homo Sapiens; identical to SEQ ID NO: 117369

SEQ ID NO: 222611 - DNA, 1000 bp, Homo Sapiens; identical to SEQ ID NO: 117371

SEQ ID NO: 222612 - DNA, 1000 bp, Homo Sapiens; identical to SEQ ID NO: 117372

SEQ ID NO: 222613 - DNA, 1000 bp, Homo Sapiens; identical to SEQ ID NO: 116627

SEQ ID NO: 222614 - DNA, 1000 bp, Homo Sapiens
ctttttacatttttgacctgtattagattagaatttcattatgcattccttttagttgaggcgcttcatagttttctggagatagtcaatttttagttttttattatacatttgaatggccgttttcctgctttgtctgcctgcacattgtatatttgtttaaaaatattctctacttttagtctatgtaagtttcatttagaaagacatgcatttatattttgtttctgtaatattctactgtaggtgaaatcttttcaaaaatcaagagactgggtagataagaatatatgaatgactaatatacaaaagatttaaaccattgtgatggcgtatatctcaaatggtaatatcttgcaatggcacacagatttaatggataaaggtatacctcagacttcactgtgctcacaatctttgaggagaaagtttggtcacctgtttggcttgatttagttactgctgcctttggttttctccaggaatgaagtattcagcacagtgactcagtattttctagttattttgcatgggctggtagtacctctgttatgctctcagttacaatcaatttaaaactgtataacagtcttggtacctaacagtagctatgcataatcctgtggcgcagtacactcccaagccaccaatgcagttaatatgctctcatagtggtttttctatgctatatgaaaatagtcttcaagccttggttctctaatgcagctaccacaagaggttgatatttttatagtggcgtgtaatctccttttcgggaggctttttatggaaggtagaatttgtaaaagttcgtatgctttgcctctcaactgcattaaccagtcacaggctcagactgtttttgtgtaaaggatgtcaaagaacggcactttttctaaagagaagtttgatattttgtatgcttgttaagaaagtacagtattggaaattaaaggtggacaactgataaaaaaaaaaaaaaaaaaaaaaaaaaaaaaaa

SEQ ID NO: 222615 - DNA, 1000 bp, Homo Sapiens; identical to SEQ ID NO: 117382

SEQ ID NO: 222616 - DNA, 1000 bp, Homo Sapiens; identical to SEQ ID NO: 117383

SEQ ID NO: 222617 - DNA, 1000 bp, Homo Sapiens; identical to SEQ ID NO: 117384

SEQ ID NO: 222618 - DNA, 1000 bp, Homo Sapiens
tcaccatttgatatataatgaattataggacaagtataagctgatctgctatagctgtccatcagagagaatacacgtggctataacatctataacaaaacgacgattcctctacaagaggctgtttctcactgctaacgttggtgtttctggcgtgggaagaaatgcacaggcgtgcatggcatgcacgttcagacagctgcattgtaagagttctgtcatgcagtctgaaaagggaagaaacaggatggctttctgtagccacacctgtgaggcgtgatgattgttgtattattagattactgatttttcttttctgaaaatacatttgagttttaatcacatctgtggaagctgtaacttttaaggtagtcaatttcatgtcttgttcaacgatgtaagcagaaactgaattgccctaattttgccaactggccattattgggattattgtttaaatttttggtaaaggaagtaatctcctttcattcattgtgacttttgttcttagggaagcagagaagactccccaagttcttataacctcattgtgcttccctaatttaaagccatgttgaggggctccattcccaattcctgggtcaaggtgaattaaccctatgttggagcactggaaaccgttatttgcaaacattgctgttaccatttagaaatatgtgcactatcagctgggtgcagtggctcacgtctgtaatcccagcactttgggaggccgaggcaggtggatcacctgaggtcaggagttcgagaccagcctggccaacagggtgaaaccccgtctctactaaaagtacaaaaattagctgggcgtggtggcggacgcctgtaatctcagctacttgggaggctgaagcaggagaggtgctggaacctgggaggcggaggttgaagtgagccgagattgcgctattgcactccagctcgggcgacaactgcaagactccatctcaaaaaaataaaaataaaaaaaaaaaaaaaa

SEQ ID NO: 222619 - DNA, 1000 bp, Homo Sapiens; identical to SEQ ID NO: 117387

SEQ ID NO: 222620 - DNA, 1000 bp, Homo Sapiens
tgctttcagttggttttcaatttgctcactggccagagacattgatggcagttcttatctgcatcactaatcagctcctggattttttttttttttttttcaaacaatggtttgaaacaactactggaatattgtccacaataagctggaagtttgttgtagtatgcctcaaatataactgactgtatactatagtggtaacttttcaaacagcccttagcacttttatactaattaacccatttgtgcattgagttttcttttaaaaatgcttgttgtgaaagacacagatacccagtatgcttaacgtgaaaagaaaatgtgttctgttttgtaaaggaactttcaagtattgttgtaaatacttggacagaggttgctgaactttaaaaaaaattaatttattattataatgacctaatttattaatctgaagattaaccatttttttgtcttagaatatcaaaaagaaaaagaaaaaggtgttctagctgtttgcatcaaaggaaaaaaagatttattatcaaggggcaatatttttatcttttccaaaataaatttgttaatgatacattacaaaaatagattgacatcagcctgattagtataaattttgttggtaattaatccattcctggcataaaaagtctttatcaaaaaaaattgtagatgcttgctttttgttttttcaatcatggccatattatgaaaatactaacaggatataggacaaggtgtaaatttttttattattattttaaagatatgatttatcctgagtgctgtatctattactcttttactttggttcctgttgtgctcttgtaaaagaaaaatataatttcctgaagaataaaatagatatatggcacttggagtgcatcatagttctacagtttgtttttgttttcttcaaaaaagctgtaagagaattatctgcaacttgattcttggcaggaaataaacattttgagttgaaatcaaaaaaaaaaaaaaaaaa

SEQ ID NO: 222621 - DNA, 1000 bp, Homo Sapiens; identical to SEQ ID NO: 117388
